United States Patent Application Publication US 2017/0114356 A1 - sequence listing, part 18

SEQ ID NO: 23104 - DNA, 2267 bp, Zea Mays
cagtcgtgggtgtttacccatcttgtagccgcagctgcctttctggctttcttggcccctcaaaatcattcaaccaatcccactaccaccctcaccgtgtacccagttcgtgcgcgatcagctgctacccagcgctctgggatcgggaaaaggaggctcttttgtggttcctgcgggcatatctcgcggagattcggtcagatttggatttagggtttaggaggtggtggtggtgatcggtttgtaccgccaggtgaaatgtcggcggctgtggcgtgcgcggagaaggcgaccaacgacatgctgattggcccggactgggcgatcaacatcgaactctgcgacatcatcaacatagatcccggagaagcaaaggatacactcaagctcctcaagaaacgtcttggaagcgagaattcaaaagtgcaaattctaacactatatgtgctagagactctaagcaaaaattgtggggatattgttcatcaacagatagttgagcgtgacatattgagtgaaatgattaagatagtgaagaaaaagccagacttaaacgtccgagagaagatattgagtttgattgacacatggcaagtggtttttggaggtccgtccggaaaatatcgacaatatcatgcagcttacgaagaactcagggctgctggtgttgattttccacctcgtgaggaaaattcactcccgttgtttacaccacctcaaactcaaccattaagacattcacatctatatccacctcctggtcaaagctatgaagatgctgccatacaagcttctcttcaatctgcccctcctgcacctgccctcagtctgagcgagatccaaagtgctcgagggattgtggatgtcttagatgaaatgttaaatgctctagaccaccggcatcctgagggtgtaagggaggaggtcatcgttgaccttgttggccaatgccgatcttatcaatctcgtgtcatggatcttgttaacagtactggcgtcatgatgacatagcgaaggggatcctccctcctggtaccggagcacctgtacctgcttctgcaaatgtcaaccaagggactaccccacctaggcccacggcggtttcattttctccactcctgaatgtacacgaggacgatgaaccggaagacgagttcgtcgtgcttttccgtaggcctgcaagggatggcacagtagcacggaacaatctgccttatgcacgaagaaatgaaaggccgtaccgaagcccacttcttcctccaccaccagcatctaagaggcctgtttacaccgaggcaagcagtatcgactatcttagtggcggctcctacaagtcgtcagaaaaggttccagatgatttcatcaacccaactgctccagctaatgtaactacatcaccccattcgaagccagaagcatatccgccaccgagttacagtagcaggccagacagtgtgtccgacgacttcataaacccaaccgcgcctagcttttctgcgccttctcgccctacagacgaggagccaacccgttcgcctgtgaagcggcaggagagtatacccgacgatgacttcataaacccaactgctcttcctggtttttcgtcgtcttcagctactaaggagttcagcgaagatcttccaagggctccatgggaagcacaggctgccgcagcaggttccctgccaccgcctccggcgaggcatggtcagagacagcagtacttggagcaaaacgtgtattctggtgggagcaacggaggtggatatgatgaactgttgacacggactgaaaacctctccctgaaccctgagaagaatgcttcacggccgacagcatcctgccaggctaaacccgaggactcactcttcaaggacctggtcgacttcgcgaagaccaagccttcgtctccgtcgaaatcggccaacagccgcaggacccgctaaacggttatccgtttcgcaggttagcagctttagattgcataccccatgaaataagggcgttggaaaattatttggttccgtttagaagcagatgtcagaaacaatacttggtcattgtcctgggcgtgtgtgtggtgtcagttagctgctcctaaatatgtgtcattggcttccatttgtttgtttgtttttttcaatagctgagtatgtatatattacccgattcggcagcaacattcatagttgagtttgcaacttgagtgttgcctattttcagtgtggataaattaggaggctatggtcaaaccttcattttttttt

SEQ ID NO: 23105 - DNA, 2239 bp, Zea Mays
cagtcgtgggtgtttacccatcttgtagccgcagctgcctttctggctttcttggcccctcaaaatcattcaaccaatcccactaccaccctcaccgtgtacccagttcgtgcgcgatcagctgctacccagcgctctgggatcgggaaaaggaggctcttttgtggttcctgcgggcatatctcgcggagattcggtcagatttggatttagggtttaggaggtggtggtggtgatcggtttgtaccgccaggtgaaatgtcggcggctgtggcgtgcgcggagaaggcgaccaacgacatgctgattggcccggactgggcgatcaacatcgaactctgcgacatcatcaacatagatcccggagaagcaaaggatacactcaagctcctcaagaaacgtcttggaagcgagaattcaaaagtgcaaattctaacactatatagactctaagcaaaaattgtggggatattgttcatcaacagatagttgagcgtgacatattgagtgaaatgattaagatagtgaagaaaaagccagacttaaacgtccgagagaagatattgagtttgattgacacatggcaagtggtttttggaggtccgtccggaaaatatcgacaatatcatgcagcttacgaagaactcagggctgctggtgttgattttccacctcgtgaggaaaattcactcccgttgtttacaccacctcaaactcaaccattaagacattcacatctatatccacctcctggtcaaagctatgaagatgctgccatacaagcttctcttcaatctgcccctcctgcacctgccctcagggtgtaagggaggaggtcatcgttgaccttgttggccaatgccgatcttatcaatctcgtgtcatggatcttgttaacagtactggcgatgagagccttttatttcaggcactaggactaaatgatgagttacagcgtgttgttcagcgtcatgatgacatagcgaaggggatcctccctcctggtaccggagcacctgtacctgcttctgcaaatgtcaaccaagggactaccccacctaggcccacggcggtttcattttctccactcctgaatgtacacgaggacgatgaaccggaagacgagttcgtcgtgcttttccgtaggcctgcaagggatggcacagtagcacggaacaatctgccttatgcacgaagaaatgaaaggccgtaccgaagcccacttcttcctccaccaccagcatctaagaggcctgtttacaccgaggcaagcagtatcgactatcttagtggcggctcctacaagtcgtcagaaaaggttccagatgatttcatcaacccaactgctccagctaatgtaactacatcaccccattcgaagccagaagcatatccgccaccgagttacagtagcaggccagacagtgtgtccgacgacttcataaacccaaccgcgcctagcttttctgcgccttctcgccctacagacgaggagccaacccgttcgcctgtgaagcggcaggagagtatacccgacgatgacttcataaacccaactgctcttcctggtttttcgtcgtcttcagctactaaggagttcagcgaagatcttccaagggctccatgggaagcacaggctgccgcagcaggttccctgccaccgcctccggcgaggcatggtcagagacagcagtacttggagcaaaacgtgtattctggtgggagcaacggaggtggatatgatgaactgttgacacggactgaaaacctctccctgaaccctgagaagaatgcttcacggccgacagcatcctgccaggctaaacccgaggactcactcttcaaggacctggtcgacttcgcgaagaccaagccttcgtctccgtcgaaatcggccaacagccgcaggacccgctaaacggttatccgtttcgcaggttagcagctttagattgcataccccatgaaataagggcgttggaaaattatttggttccgtttagaagcagatgtcagaaacaatacttggtcattgtcctgggcgtgtgtgtggtgtcagttagctgctcctaaatatgtgtcattggcttccatttgtttgtttgtttttttcaatagctgagtatgtatatattacccgattcggcagcaacattcatagttgagtttgcaacttgagtgttgcctattttcagtgtggataaattaggaggctatggtcaaaccttcattttttttt

SEQ ID NO: 23106 - DNA, 2260 bp, Zea Mays
cagtcgtgggtgtttacccatcttgtagccgcagctgcctttctggctttcttggcccctcaaaatcattcaaccaatcccactaccaccctcaccgtgtacccagttcgtgcgcgatcagctgctacccagcgctctgggatcgggaaaaggaggctcttttgtggttcctgcgggcatatctcgcggagattcggtcagatttgggtttaggaggtggtggtggtgatcggtttgtaccgccaggtgaaatgtcggcggctgtggcgtgcgcggagaaggcgaccaacgacatgctgattggcccggactgggcgatcaacatcgaactctgcgacatcatcaacatagatcccggagaagcaaaggatacactcaagctcctcaagaaacgtcttggaagcgagaattcaaaagtgcaaattctaacactatatgtgctagagactctaagcaaaaattgtggggatattgttcatcaacagatagttgagcgtgacatattgagtgaaatgattaagatagtgaagaaaaagccagacttaaacgtccgagagaagatattgagtttgattgacacatggcaagtggtttttggaggtccgtccggaaaatatcgacaatatcatgcagcttacgaagaactcagggctgctggtgttgattttccacctcgtgaggaaaattcactcccgttgtttacaccacctcaaactcaaccattaagacattcacatctatatccacctcctggtcaaagctatgaagatgctgccatacaagcttctcttcaatctgcccctcctgcacctgccctcagtctgagcgagatccaaagtgctcgagggattgtggatgtcttagatgaaatgttaaatgctctagaccaccggcatcctgagggtgtaagggaggaggtcatcgttgaccttgttggccaatgccgatcttatcaatctcgtgtcatggatcttgttaacagtactggcgtcatgatgacatagcgaaggggatcctccctcctggtaccggagcacctgtacctgcttctgcaaatgtcaaccaagggactaccccacctaggcccacggcggtttcattttctccactcctgaatgtacacgaggacgatgaaccggaagacgagttcgtcgtgcttttccgtaggcctgcaagggatggcacagtagcacggaacaatctgccttatgcacgaagaaatgaaaggccgtaccgaagcccacttcttcctccaccaccagcatctaagaggcctgtttacaccgaggcaagcagtatcgactatcttagtggcggctcctacaagtcgtcagaaaaggttccagatgatttcatcaacccaactgctccagctaatgtaactacatcaccccattcgaagccagaagcatatccgccaccgagttacagtagcaggccagacagtgtgtccgacgacttcataaacccaaccgcgcctagcttttctgcgccttctcgccctacagacgaggagccaacccgttcgcctgtgaagcggcaggagagtatacccgacgatgacttcataaacccaactgctcttcctggtttttcgtcgtcttcagctactaaggagttcagcgaagatcttccaagggctccatgggaagcacaggctgccgcagcaggttccctgccaccgcctccggcgaggcatggtcagagacagcagtacttggagcaaaacgtgtattctggtgggagcaacggaggtggatatgatgaactgttgacacggactgaaaacctctccctgaaccctgagaagaatgcttcacggccgacagcatcctgccaggctaaacccgaggactcactcttcaaggacctggtcgacttcgcgaagaccaagccttcgtctccgtcgaaatcggccaacagccgcaggacccgctaaacggttatccgtttcgcaggttagcagctttagattgcataccccatgaaataagggcgttggaaaattatttggttccgtttagaagcagatgtcagaaacaatacttggtcattgtcctgggcgtgtgtgtggtgtcagttagctgctcctaaatatgtgtcattggcttccatttgtttgtttgtttttttcaatagctgagtatgtatatattacccgattcggcagcaacattcatagttgagtttgcaacttgagtgttgcctattttcagtgtggataaattaggaggctatggtcaaaccttcattttttttt

SEQ ID NO: 23107 - DNA, 2279 bp, Zea Mays
cagtcgtgggtgtttacccatcttgtagccgcagctgcctttctggctttcttggcccctcaaaatcattcaaccaatcccactaccaccctcaccgtgtacccagttcgtgcgcgatcagctgctacccagcgctctgggatcgggaaaaggaggctcttttgtggttcctgcgggcatatctcgcggagattcggtcagatttggatttagggtttaggaggtggtggtggtgatcggtttgtaccgccaggtgaaatgtcggcggctgtggcgtgcgcggagaaggcgaccaacgacatgctgattggcccggactgggcgatcaacatcgaactctgcgacatcatcaacatagatcccggagaagcaaaggatacactcaagctcctcaagaaacgtcttggaagcgagaattcaaaagtgcaaattctaacactatatgtgctagagactctaagcaaaaattgtggggatattgttcatcaacagatagttgagcgtgacatattgagtgaaatgattaagatagtgaagaaaaagccagacttaaacgtccgagagaagatattgagtttgattgacacatggcaagtggtttttggaggtccgtccggaaaatatcgacaatatcatgcagcttacgaagaactcagggctgctggtgttgattttccacctcgtgaggaaaattcactcccgttgtttacaccacctcaaactcaaccattaagacattcacatctatatccacctcctggtcaaagctatgaagatgctgccatacaagcttctcttcaatctgcccctcctgcacctgccctcagtctgagcgagatccaaagtgctcgagggattgtggatgtcttagatgaaatgttaaatgctctagaccaccggcatcctgagggtgtaagggaggaggtcatcgttgaccttgttggccaatgccgatcttatcaatctcgtgtcatggatcttgttaacagtactggcgtgttgttcagcgtcatgatgacatagcgaaggggatcctccctcctggtaccggagcacctgtacctgcttctgcaaatgtcaaccaagggactaccccacctaggcccacggcggtttcattttctccactcctgaatgtacacgaggacgatgaaccggaagacgagttcgtcgtgcttttccgtaggcctgcaagggatggcacagtagcacggaacaatctgccttatgcacgaagaaatgaaaggccgtaccgaagcccacttcttcctccaccaccagcatctaagaggcctgtttacaccgaggcaagcagtatcgactatcttagtggcggctcctacaagtcgtcagaaaaggttccagatgatttcatcaacccaactgctccagctaatgtaactacatcaccccattcgaagccagaagcatatccgccaccgagttacagtagcaggccagacagtgtgtccgacgacttcataaacccaaccgcgcctagcttttctgcgccttctcgccctacagacgaggagccaacccgttcgcctgtgaagcggcaggagagtatacccgacgatgacttcataaacccaactgctcttcctggtttttcgtcgtcttcagctactaaggagttcagcgaagatcttccaagggctccatgggaagcacaggctgccgcagcaggttccctgccaccgcctccggcgaggcatggtcagagacagcagtacttggagcaaaacgtgtattctggtgggagcaacggaggtggatatgatgaactgttgacacggactgaaaacctctccctgaaccctgagaagaatgcttcacggccgacagcatcctgccaggctaaacccgaggactcactcttcaaggacctggtcgacttcgcgaagaccaagccttcgtctccgtcgaaatcggccaacagccgcaggacccgctaaacggttatccgtttcgcaggttagcagctttagattgcataccccatgaaataagggcgttggaaaattatttggttccgtttagaagcagatgtcagaaacaatacttggtcattgtcctgggcgtgtgtgtggtgtcagttagctgctcctaaatatgtgtcattggcttccatttgtttgtttgtttttttcaatagctgagtatgtatatattacccgattcggcagcaacattcatagttgagtttgcaacttgagtgttgcctattttcagtgtggataaattaggaggctatggtcaaaccttcattttttttt

SEQ ID NO: 23108 - DNA, 2321 bp, Zea Mays
cagtcgtgggtgtttacccatcttgtagccgcagctgcctttctggctttcttggcccctcaaaatcattcaaccaatcccactaccaccctcaccgtgtacccagttcgtgcgcgatcagctgctacccagcgctctgggatcgggaaaaggaggctcttttgtggttcctgcgggcatatctcgcggagattcggtcagatttgggtttaggaggtggtggtggtgatcggtttgtaccgccaggtgaaatgtcggcggctgtggcgtgcgcggagaaggcgaccaacgacatgctgattggcccggactgggcgatcaacatcgaactctgcgacatcatcaacatagatcccggagaagcaaaggatacactcaagctcctcaagaaacgtcttggaagcgagaattcaaaagtgcaaattctaacactatatgtgctagagactctaagcaaaaattgtggggatattgttcatcaacagatagttgagcgtgacatattgagtgaaatgattaagatagtgaagaaaaagccagacttaaacgtccgagagaagatattgagtttgattgacacatggcaagtggtttttggaggtccgtccggaaaatatcgacaatatcatgcagcttacgaagaactcagggctgctggtgttgattttccacctcgtgaggaaaattcactcccgttgtttacaccacctcaaactcaaccattaagacattcacatctatatccacctcctggtcaaagctatgaagatgctgccatacaagcttctcttcaatctgcccctcctgcacctgccctcagtctgagcgagatccaaagtgctcgagggattgtggatgtcttagatgaaatgttaaatgctctagaccaccggcatcctgagggtgtaagggaggaggtcatcgttgaccttgttggccaatgccgatcttatcaatctcgtgtcatggatcttgttaacagtactggcgatgagagccttttatttcaggcactaggactaaatgatgagttacagcgtgttgttcagcgtcatgatgacatagcgaaggggatcctccctcctggtaccggagcacctgtacctgcttctgcaaatgtcaaccaagggactaccccacctaggcccacggcggtttcattttctccactcctgaatgtacacgaggacgatgaaccggaagacgagttcgtcgtgcttttccgtaggcctgcaagggatggcacagtagcacggaacaatctgccttatgcacgaagaaatgaaaggccgtaccgaagcccacttcttcctccaccaccagcatctaagaggcctgtttacaccgaggcaagcagtatcgactatcttagtggcggctcctacaagtcgtcagaaaaggttccagatgatttcatcaacccaactgctccagctaatgtaactacatcaccccattcgaagccagaagcatatccgccaccgagttacagtagcaggccagacagtgtgtccgacgacttcataaacccaaccgcgcctagcttttctgcgccttctcgccctacagacgaggagccaacccgttcgcctgtgaagcggcaggagagtatacccgacgatgacttcataaacccaactgctcttcctggtttttcgtcgtcttcagctactaaggagttcagcgaagatcttccaagggctccatgggaagcacaggctgccgcagcaggttccctgccaccgcctccggcgaggcatggtcagagacagcagtacttggagcaaaacgtgtattctggtgggagcaacggaggtggatatgatgaactgttgacacggactgaaaacctctccctgaaccctgagaagaatgcttcacggccgacagcatcctgccaggctaaacccgaggactcactcttcaaggacctggtcgacttcgcgaagaccaagccttcgtctccgtcgaaatcggccaacagccgcaggacccgctaaacggttatccgtttcgcaggttagcagctttagattgcataccccatgaaataagggcgttggaaaattatttggttccgtttagaagcagatgtcagaaacaatacttggtcattgtcctgggcgtgtgtgtggtgtcagttagctgctcctaaatatgtgtcattggcttccatttgtttgtttgtttttttcaatagctgagtatgtatatattacccgattcggcagcaacattcatagttgagtttgcaacttgagtgttgcctattttcagtgtggataaattaggaggctatggtcaaaccttcattttttttt

SEQ ID NO: 23109 - DNA, 2246 bp, Zea Mays
cagtcgtgggtgtttacccatcttgtagccgcagctgcctttctggctttcttggcccctcaaaatcattcaaccaatcccactaccaccctcaccgtgtacccagttcgtgcgcgatcagctgctacccagcgctctgggatcgggaaaaggaggctcttttgtggttcctgcgggcatatctcgcggagattcggtcagatttggatttagggtttaggaggtggtggtggtgatcggtttgtaccgccaggtgaaatgtcggcggctgtggcgtgcgcggagaaggcgaccaacgacatgctgattggcccggactgggcgatcaacatcgaactctgcgacatcatcaacatagatcccggagaagcaaaggatacactcaagctcctcaagaaacgtcttggaagcgagaattcaaaagtgcaaattctaacactatatgtgctagagactctaagcaaaaattgtggggatattgttcatcaacagatagttgagcgtgacatattgagtgaaatgattaagatagtgaagaaaaagccagacttaaacgtccgagagaagatattgagtttgattgacacatggcaagtggtttttggaggtccgtccggaaaatatcgacaatatcatgcagcttacgaagaactcagggctgctggtgttgattttccacctcgtgaggaaaattcactcccgttgtttacaccacctcaaactcaaccattaagacattcacatctatatccacctcctggtcaaagctatgaagatgctgccatacaagcttctcttcaatctgcccctcctgcacctgccctcagggtgtaagggaggaggtcatcgttgaccttgttggccaatgccgatcttatcaatctcgtgtcatggatcttgttaacagtactggcgatgagagccttttatttcaggcactaggactaaatgatgagttacagcgtgttgttcagcgtcatgatgacatagcgaaggggatcctccctcctggtaccggagcacctgtacctgcttctgcaaatgtcaaccaagggactaccccacctaggcccacggcggtttcattttctccactcctgaatgtacacgaggacgatgaaccggaagacgagttcgtcgtgcttttccgtaggcctgcaagggatggcacagtagcacggaacaatctgccttatgcacgaagaaatgaaaggccgtaccgaagcccacttcttcctccaccaccagcatctaagaggcctgtttacaccgaggcaagcagtatcgactatcttagtggcggctcctacaagtcgtcagaaaaggttccagatgatttcatcaacccaactgctccagctaatgtaactacatcaccccattcgaagccagaagcatatccgccaccgagttacagtagcaggccagacagtgtgtccgacgacttcataaacccaaccgcgcctagcttttctgcgccttctcgccctacagacgaggagccaacccgttcgcctgtgaagcggcaggagagtatacccgacgatgacttcataaacccaactgctcttcctggtttttcgtcgtcttcagctactaaggagttcagcgaagatcttccaagggctccatgggaagcacaggctgccgcagcaggttccctgccaccgcctccggcgaggcatggtcagagacagcagtacttggagcaaaacgtgtattctggtgggagcaacggaggtggatatgatgaactgttgacacggactgaaaacctctccctgaaccctgagaagaatgcttcacggccgacagcatcctgccaggctaaacccgaggactcactcttcaaggacctggtcgacttcgcgaagaccaagccttcgtctccgtcgaaatcggccaacagccgcaggacccgctaaacggttatccgtttcgcaggttagcagctttagattgcataccccatgaaataagggcgttggaaaattatttggttccgtttagaagcagatgtcagaaacaatacttggtcattgtcctgggcgtgtgtgtggtgtcagttagctgctcctaaatatgtgtcattggcttccatttgtttgtttgtttttttcaatagctgagtatgtatatattacccgattcggcagcaacattcatagttgagtttgcaacttgagtgttgcctattttcagtgtggataaattaggaggctatggtcaaaccttcattttttttt

SEQ ID NO: 23110 - DNA, 2239 bp, Zea Mays
cagtcgtgggtgtttacccatcttgtagccgcagctgcctttctggctttcttggcccctcaaaatcattcaaccaatcccactaccaccctcaccgtgtacccagttcgtgcgcgatcagctgctacccagcgctctgggatcgggaaaaggaggctcttttgtggttcctgcgggcatatctcgcggagattcggtcagatttgggtttaggaggtggtggtggtgatcggtttgtaccgccaggtgaaatgtcggcggctgtggcgtgcgcggagaaggcgaccaacgacatgctgattggcccggactgggcgatcaacatcgaactctgcgacatcatcaacatagatcccggagaagcaaaggatacactcaagctcctcaagaaacgtcttggaagcgagaattcaaaagtgcaaattctaacactatatgtgctagagactctaagcaaaaattgtggggatattgttcatcaacagatagttgagcgtgacatattgagtgaaatgattaagatagtgaagaaaaagccagacttaaacgtccgagagaagatattgagtttgattgacacatggcaagtggtttttggaggtccgtccggaaaatatcgacaatatcatgcagcttacgaagaactcagggctgctggtgttgattttccacctcgtgaggaaaattcactcccgttgtttacaccacctcaaactcaaccattaagacattcacatctatatccacctcctggtcaaagctatgaagatgctgccatacaagcttctcttcaatctgcccctcctgcacctgccctcagggtgtaagggaggaggtcatcgttgaccttgttggccaatgccgatcttatcaatctcgtgtcatggatcttgttaacagtactggcgatgagagccttttatttcaggcactaggactaaatgatgagttacagcgtgttgttcagcgtcatgatgacatagcgaaggggatcctccctcctggtaccggagcacctgtacctgcttctgcaaatgtcaaccaagggactaccccacctaggcccacggcggtttcattttctccactcctgaatgtacacgaggacgatgaaccggaagacgagttcgtcgtgcttttccgtaggcctgcaagggatggcacagtagcacggaacaatctgccttatgcacgaagaaatgaaaggccgtaccgaagcccacttcttcctccaccaccagcatctaagaggcctgtttacaccgaggcaagcagtatcgactatcttagtggcggctcctacaagtcgtcagaaaaggttccagatgatttcatcaacccaactgctccagctaatgtaactacatcaccccattcgaagccagaagcatatccgccaccgagttacagtagcaggccagacagtgtgtccgacgacttcataaacccaaccgcgcctagcttttctgcgccttctcgccctacagacgaggagccaacccgttcgcctgtgaagcggcaggagagtatacccgacgatgacttcataaacccaactgctcttcctggtttttcgtcgtcttcagctactaaggagttcagcgaagatcttccaagggctccatgggaagcacaggctgccgcagcaggttccctgccaccgcctccggcgaggcatggtcagagacagcagtacttggagcaaaacgtgtattctggtgggagcaacggaggtggatatgatgaactgttgacacggactgaaaacctctccctgaaccctgagaagaatgcttcacggccgacagcatcctgccaggctaaacccgaggactcactcttcaaggacctggtcgacttcgcgaagaccaagccttcgtctccgtcgaaatcggccaacagccgcaggacccgctaaacggttatccgtttcgcaggttagcagctttagattgcataccccatgaaataagggcgttggaaaattatttggttccgtttagaagcagatgtcagaaacaatacttggtcattgtcctgggcgtgtgtgtggtgtcagttagctgctcctaaatatgtgtcattggcttccatttgtttgtttgtttttttcaatagctgagtatgtatatattacccgattcggcagcaacattcatagttgagtttgcaacttgagtgttgcctattttcagtgtggataaattaggaggctatggtcaaaccttcattttttttt

SEQ ID NO: 23111 - DNA, 2125 bp, Zea Mays
ccacgtgagtaaggtttgaggaaggtataaaccgaggcaagccttcctccgcaaatgcggagaggctgcttcaaagccacgacctagtgacttagtgcgacacctctcgtcattgcactaaatctacgcttcaacttatggacttcctatactaatatttagagaagcaaaggatacactcaagctcctcaagaaacgtcttggaagcgagaattcaaaagtgcaaattctaacactatatgtgctagagactctaagcaaaaattgtggggatattgttcatcaacagatagttgagcgtgacatattgagtgaaatgattaagatagtgaagaaaaagccagacttaaacgtccgagagaagatattgagtttgattgacacatggcaagtggtttttggaggtccgtccggaaaatatcgacaatatcatgcagcttacgaagaactcagggctgctggtgttgattttccacctcgtgaggaaaattcactcccgttgtttacaccacctcaaactcaaccattaagacattcacatctatatccacctcctggtcaaagctatgaagatgctgccatacaagcttctcttcaatctgcccctcctgcacctgccctcagtctgagcgagatccaaagtgctcgagggattgtggatgtcttagatgaaatgttaaatgctctagaccaccggcatcctgagggtgtaagggaggaggtcatcgttgaccttgttggccaatgccgatcttatcaatctcgtgtcatggatcttgttaacagtactggcgatgagagccttttatttcaggcactaggactaaatgatgagttacagcgtgttgttcagcgtcatgatgacatagcgaaggggatcctccctcctggtaccggagcacctgtacctgcttctgcaaatgtcaaccaagggactaccccacctaggcccacggcggtttcattttctccactcctgaatgtacacgaggacgatgaaccggaagacgagttcgtcgtgcttttccgtaggcctgcaagggatggcacagtagcacggaacaatctgccttatgcacgaagaaatgaaaggccgtaccgaagcccacttcttcctccaccaccagcatctaagaggcctgtttacaccgaggcaagcagtatcgactatcttagtggcggctcctacaagtcgtcagaaaaggttccagatgatttcatcaacccaactgctccagctaatgtaactacatcaccccattcgaagccagaagcatatccgccaccgagttacagtagcaggccagacagtgtgtccgacgacttcataaacccaaccgcgcctagcttttctgcgccttctcgccctacagacgaggagccaacccgttcgcctgtgaagcggcaggagagtatacccgacgatgacttcataaacccaactgctcttcctggtttttcgtcgtcttcagctactaaggagttcagcgaagatcttccaagggctccatgggaagcacaggctgccgcagcaggttccctgccaccgcctccggcgaggcatggtcagagacagcagtacttggagcaaaacgtgtattctggtgggagcaacggaggtggatatgatgaactgttgacacggactgaaaacctctccctgaaccctgagaagaatgcttcacggccgacagcatcctgccaggctaaacccgaggactcactcttcaaggacctggtcgacttcgcgaagaccaagccttcgtctccgtcgaaatcggccaacagccgcaggacccgctaaacggttatccgtttcgcaggttagcagctttagattgcataccccatgaaataagggcgttggaaaattatttggttccgtttagaagcagatgtcagaaacaatacttggtcattgtcctgggcgtgtgtgtggtgtcagttagctgctcctaaatatgtgtcattggcttccatttgtttgtttgtttttttcaatagctgagtatgtatatattacccgattcggcagcaacattcatagttgagtttgcaacttgagtgttgcctattttcagtgtggataaattaggaggctatggtcaaaccttcattttttttt

SEQ ID NO: 23112 - DNA, 1999 bp, Zea Mays
aaatctacgcttcaacttatggacttcctatactaatatttagagaagcaaaggatacactcaagctcctcaagaaacgtcttggaagcgagaattcaaaagtgcaaattctaacactatatagactctaagcaaaaattgtggggatattgttcatcaacagatagttgagcgtgacatattgagtgaaatgattaagatagtgaagaaaaagccagacttaaacgtccgagagaagatattgagtttgattgacacatggcaagtggtttttggaggtccgtccggaaaatatcgacaatatcatgcagcttacgaagaactcagggctgctggtgttgattttccacctcgtgaggaaaattcactcccgttgtttacaccacctcaaactcaaccattaagacattcacatctatatccacctcctggtcaaagctatgaagatgctgccatacaagcttctcttcaatctgcccctcctgcacctgccctcagtctgagcgagatccaaagtgctcgagggattgtggatgtcttagatgaaatgttaaatgctctagaccaccggcatcctgagggtgtaagggaggaggtcatcgttgaccttgttggccaatgccgatcttatcaatctcgtgtcatggatcttgttaacagtactggcgatgagagccttttatttcaggcactaggactaaatgatgagttacagcgtgttgttcagcgtcatgatgacatagcgaaggggatcctccctcctggtaccggagcacctgtacctgcttctgcaaatgtcaaccaagggactaccccacctaggcccacggcggtttcattttctccactcctgaatgtacacgaggacgatgaaccggaagacgagttcgtcgtgcttttccgtaggcctgcaagggatggcacagtagcacggaacaatctgccttatgcacgaagaaatgaaaggccgtaccgaagcccacttcttcctccaccaccagcatctaagaggcctgtttacaccgaggcaagcagtatcgactatcttagtggcggctcctacaagtcgtcagaaaaggttccagatgatttcatcaacccaactgctccagctaatgtaactacatcaccccattcgaagccagaagcatatccgccaccgagttacagtagcaggccagacagtgtgtccgacgacttcataaacccaaccgcgcctagcttttctgcgccttctcgccctacagacgaggagccaacccgttcgcctgtgaagcggcaggagagtatacccgacgatgacttcataaacccaactgctcttcctggtttttcgtcgtcttcagctactaaggagttcagcgaagatcttccaagggctccatgggaagcacaggctgccgcagcaggttccctgccaccgcctccggcgaggcatggtcagagacagcagtacttggagcaaaacgtgtattctggtgggagcaacggaggtggatatgatgaactgttgacacggactgaaaacctctccctgaaccctgagaagaatgcttcacggccgacagcatcctgccaggctaaacccgaggactcactcttcaaggacctggtcgacttcgcgaagaccaagccttcgtctccgtcgaaatcggccaacagccgcaggacccgctaaacggttatccgtttcgcaggttagcagctttagattgcataccccatgaaataagggcgttggaaaattatttggttccgtttagaagcagatgtcagaaacaatacttggtcattgtcctgggcgtgtgtgtggtgtcagttagctgctcctaaatatgtgtcattggcttccatttgtttgtttgtttttttcaatagctgagtatgtatatattacccgattcggcagcaacattcatagttgagtttgcaacttgagtgttgcctattttcagtgtggataaattaggaggctatggtcaaaccttcattttttttt

SEQ ID NO: 23113 - DNA, 1914 bp, Zea Mays
ttcaacttatggacttcctatactaatatttagagaagcaaaggatacactcaagctcctcaagaaacgtcttggaagcgagaattcaaaagtgcaaattctaacactatatgtgctagagactctaagcaaaaattgtggggatattgttcatcaacagatagttgagcgtgacatattgagtgaaatgattaagatagtgaagaaaaagccagacttaaacgtccgagagaagatattgagtttgattgacacatggcaagtggtttttggaggtccgtccggaaaatatcgacaatatcatgcagcttacgaagaactcagggctgctggtgttgattttccacctcgtgaggaaaattcactcccgttgtttacaccacctcaaactcaaccattaagacattcacatctatatccacctcctggtcaaagctatgaagatgctgccatacaagcttctcttcaatctgcccctcctgcacctgccctcagggtgtaagggaggaggtcatcgttgaccttgttggccaatgccgatcttatcaatctcgtgtcatggatcttgttaacagtactggcgatgagagccttttatttcaggcactaggactaaatgatgagttacagcgtgttgttcagcgtcatgatgacatagcgaaggggatcctccctcctggtaccggagcacctgtacctgcttctgcaaatgtcaaccaagggactaccccacctaggcccacggcggtttcattttctccactcctgaatgtacacgaggacgatgaaccggaagacgagttcgtcgtgcttttccgtaggcctgcaagggatggcacagtagcacggaacaatctgccttatgcacgaagaaatgaaaggccgtaccgaagcccacttcttcctccaccaccagcatctaagaggcctgtttacaccgaggcaagcagtatcgactatcttagtggcggctcctacaagtcgtcagaaaaggttccagatgatttcatcaacccaactgctccagctaatgtaactacatcaccccattcgaagccagaagcatatccgccaccgagttacagtagcaggccagacagtgtgtccgacgacttcataaacccaaccgcgcctagcttttctgcgccttctcgccctacagacgaggagccaacccgttcgcctgtgaagcggcaggagagtatacccgacgatgacttcataaacccaactgctcttcctggtttttcgtcgtcttcagctactaaggagttcagcgaagatcttccaagggctccatgggaagcacaggctgccgcagcaggttccctgccaccgcctccggcgaggcatggtcagagacagcagtacttggagcaaaacgtgtattctggtgggagcaacggaggtggatatgatgaactgttgacacggactgaaaacctctccctgaaccctgagaagaatgcttcacggccgacagcatcctgccaggctaaacccgaggactcactcttcaaggacctggtcgacttcgcgaagaccaagccttcgtctccgtcgaaatcggccaacagccgcaggacccgctaaacggttatccgtttcgcaggttagcagctttagattgcataccccatgaaataagggcgttggaaaattatttggttccgtttagaagcagatgtcagaaacaatacttggtcattgtcctgggcgtgtgtgtggtgtcagttagctgctcctaaatatgtgtcattggcttccatttgtttgtttgtttttttcaatagctgagtatgtatatattacccgattcggcagcaacattcatagttgagtttgcaacttgagtgttgcctattttcagtgtggataaattaggaggctatggtcaaaccttcattttttttt

SEQ ID NO: 23114 - DNA, 1988 bp, Zea Mays
acttatggacttcctatactaatatttagagaagcaaaggatacactcaagctcctcaagaaacgtcttggaagcgagaattcaaaagtgcaaattctaacactatatgtgctagagactctaagcaaaaattgtggggatattgttcatcaacagatagttgagcgtgacatattgagtgaaatgattaagatagtgaagaaaaagccagacttaaacgtccgagagaagatattgagtttgattgacacatggcaagtggtttttggaggtccgtccggaaaatatcgacaatatcatgcagcttacgaagaactcagggctgctggtgttgattttccacctcgtgaggaaaattcactcccgttgtttacaccacctcaaactcaaccattaagacattcacatctatatccacctcctggtcaaagctatgaagatgctgccatacaagcttctcttcaatctgcccctcctgcacctgccctcagtctgagcgagatccaaagtgctcgagggattgtggatgtcttagatgaaatgttaaatgctctagaccaccggcatcctgagggtgtaagggaggaggtcatcgttgaccttgttggccaatgccgatcttatcaatctcgtgtcatggatcttgttaacagtactggcgatgagagccttttatttcaggcactaggactaaatgatgagttacagcgtgttgttcagcgtcatgatgacatagcgaaggggatcctccctcctggtaccggagcacctgtacctgcttctgcaaatgtcaaccaagggactaccccacctaggcccacggcggtttcattttctccactcctgaatgtacacgaggacgatgaaccggaagacgagttcgtcgtgcttttccgcctgcaagggatggcacagtagcacggaacaatctgccttatgcacgaagaaatgaaaggccgtaccgaagcccacttcttcctccaccaccagcatctaagaggcctgtttacaccgaggcaagcagtatcgactatcttagtggcggctcctacaagtcgtcagaaaaggttccagatgatttcatcaacccaactgctccagctaatgtaactacatcaccccattcgaagccagaagcatatccgccaccgagttacagtagcaggccagacagtgtgtccgacgacttcataaacccaaccgcgcctagcttttctgcgccttctcgccctacagacgaggagccaacccgttcgcctgtgaagcggcaggagagtatacccgacgatgacttcataaacccaactgctcttcctggtttttcgtcgtcttcagctactaaggagttcagcgaagatcttccaagggctccatgggaagcacaggctgccgcagcaggttccctgccaccgcctccggcgaggcatggtcagagacagcagtacttggagcaaaacgtgtattctggtgggagcaacggaggtggatatgatgaactgttgacacggactgaaaacctctccctgaaccctgagaagaatgcttcacggccgacagcatcctgccaggctaaacccgaggactcactcttcaaggacctggtcgacttcgcgaagaccaagccttcgtctccgtcgaaatcggccaacagccgcaggacccgctaaacggttatccgtttcgcaggttagcagctttagattgcataccccatgaaataagggcgttggaaaattatttggttccgtttagaagcagatgtcagaaacaatacttggtcattgtcctgggcgtgtgtgtggtgtcagttagctgctcctaaatatgtgtcattggcttccatttgtttgtttgtttttttcaatagctgagtatgtatatattacccgattcggcagcaacattcatagttgagtttgcaacttgagtgttgcctattttcagtgtggataaattaggaggctatggtcaaaccttcattttttttt

SEQ ID NO: 23115 - DNA, 1831 bp, Zea Mays
gaccaggcgaggcagcgagccacagtgaactcgtcgcgtgccccgccttatttaacgccctctccccgcagcagcagcggcacctccggacgaaatctgacccgggccaccgtcggcactgctctgacatggcgatccgctccaaggcctggatctcgctgctgctagcgctcgccgcggtgctctccgcccgggcggaggagcccgccgcggcggaggctgaggccgtgctcaccctcgacgtcgacagcttcgacgaggctgatggcattgtggattacttgaagaagcaggttggccctgcgtccaaggagatcaagtcagcagaaggtgtggccgcccattttgatgacaagaagatctatatcgttggaatcttcaaagaattcagtggcactgaatttacaaacttcatggagcttgctgagaagctgagttctgattatgactttggacacactttgcacgcaaaccacctcccacgtggtgatgcatctgtggaggggccattgatcaggctgctgaagccttttgatgaccttgttgttgacagcaaggattttgatgttgctgctctggagaagtttattgatgctagcagcacccctagagttgtcacttttgacaataatcctgacaaccacccatacctcatgaagttcttccaaagctcagctcccaaggctatgctgtttttgaacttctccacgggaccattggattctttcaagtctgtttactatgctgccgctgaggagttcaaggacaaggaaatcaagttccttattggtgacattgaagccagccagggtgccttccagtactttggtctgaaagaggaccagacaccccttatcctcattcaggatggtgattccaagaagttcttgaaggatcacattgaggctgaccagattgtctcttggttgaaggagtactttgatggcaaattgacgccgttcaagaagtctgagcctattcctgaggtcaacaatgagcctgttaaggttgttgtggctgacaacatccacgatgtggtcttcaagtctggaaaaaatgttcttattgaattctatgccccctggtgtgggcactgcaagaagctggcgcccatcttggaagaggcagccaccactcttctaagtgacgaggaagttgtgattgctaagatggacgcgaccgccaatgacgtgcccagtgagttcgaggtccaaggctacccaaccatgtacttcgtgactcccagcgggaaggtcacctcctacgacagtggcaggacggcggatgacatcgtcgacttcatcaacaagagcaaggagaccgccagcgccgtccaggcgacggcgacggcatctgggaaggcagctgacgcagccgagaagaccgagcccgtcaaggacgagctgtaaacagccttggcgtggacgctatgggtaatgggacagaggaggggggacaaaagctggcgccaacgtactcgccaagcctccggctttagtttttgcgagggaagagggcaaagtaagagaatgggagggaggggtctgtggcgtgttttgctctggtgcggcatgcctgtgtatcccattgagattctgtacaattgcaaacagagagcggtacctttttagttaattatcagagatgactgtagaaagaaactgattgtggtgaggttgagtggacgaataaatggcgagtctgcctcattggatgcatcatgaaacgggcacttttgaggagggatggtaatggggaaatttccgtggagaatagcttttagcgtgtgtttggttagcgggttgatgcgggtttgaatgggttcaatcca

SEQ ID NO: 23116 - DNA, 1975 bp, Zea Mays
cgcagcagcagcggcacctccggacgaaatctgacccgggccaccgtcggcactgctctgacatggcgatccgctccaaggcctggatctcgctgctgctagcgctcgccgcggtgctctccgcccgggcggaggagcccgccgcggcggaggctgaggccgtgctcaccctcgacgtcgacagcttcgacgaggccgtcgccaagcaccccttcatggtcgtcgagttctacgccccatggtgtggacattgtaagaaccttgctccagagtacgagaatgcggccaaggaacttagcaagcatgacccaccgattgttctcgctaaggttgatgctaacgaggagaagaacaggccgcttgctaccaagtacgagatacaagggttcccaaccctcaagatcttcaggaaccaggggaagaacattcaggaatacaagggccctagggaggctgatggcattgtggattacttgaagaagcaggttggccctgcgtccaaggagatcaagtcagcagaaggtgtggccgcccattttgatgacaagaagatctatatcgttggaatcttcaaagaattcagtggcactgaatttacaaacttcatggagcttgctgagaagctgagttctgattatgactttggacacactttgcacgcaaaccacctcccacgtggtgatgcatctgtggaggggccattgatcaggctgctgaagccttttgatgaccttgttgttgacagcaaggattttgatgttgctgctctggagaagtttattgatgctagcagcacccctagagttgtcacttttgacaataatcctgacaaccacccatacctcatgaagttcttccaaagctcagctcccaagtctgtttactatgctgccgctgaggagttcaaggacaaggaaatcaagttccttattggtgacattgaagccagccagggtgccttccagtactttggtctgaaagaggaccagacaccccttatcctcattcaggatggtgattccaagaagttcttgaaggatcacattgaggctgaccagattgtctcttggttgaaggagtactttgatggcaaattgacgccgttcaagaagtctgagcctattcctgaggtcaacaatgagcctgttaaggttgttgtggctgacaacatccacgatgtggtcttcaagtctggaaaaaatgttcttattgaattctatgccccctggtgtgggcactgcaagaagctggcgcccatcttggaagaggcagccaccactcttctaagtgacgaggaagttgtgattgctaagatggacgcgaccgccaatgacgtgcccagtgagttcgaggtccaaggctacccaaccatgtacttcgtgactcccagcgggaaggtcacctcctacgacagtggcaggacggcggatgacatcgtcgacttcatcaacaagagcaaggagaccgccagcgccgtccaggcgacggcgacggcatctgggaaggcagctgacgcagccgagaagaccgagcccgtcaaggacgagctgtaaacagccttggcgtggacgctatgggtaatgggacagaggaggggggacaaaagctggcgccaacgtactcgccaagcctccggctttagtttttgcgagggaagagggcaaagtaagagaatgggagggaggggtctgtggcgtgttttgctctggtgcggcatgcctgtgtatcccattgagattctgtacaattgcaaacagagagcggtacctttttagttaattatcagagatgactgtagaaagaaactgattgtggtgaggttgagtggacgaataaatggcgagtctgcctcattggatgcatcatgaaacgggcacttttgaggagggatggtaatggggaaatttccgtggagaatagcttttagcgtgtgtttggttagcgggttgatgcgggtttgaatgggttcaatcca

SEQ ID NO: 23117 - DNA, 1859 bp, Zea Mays
ccaactatacaacgtgctgttgcttctgtgtgatttattactgttgggacacacttgcaagttgcaaccttgctgatgtgtggacattgtaagaaccttgctccagagtacgagaatgcggccaaggaacttagcaagcatgacccaccgattgttctcgctaaggttgatgctaacgaggagaagaacaggccgcttgctaccaagtacgagatacaagggttcccaaccctcaagatcttcaggaaccaggggaagaacattcaggaatacaagggccctagggaggctgatggcattgtggattacttgaagaagcaggttggccctgcgtccaaggagatcaagtcagcagaaggtgtggccgcccattttgatgacaagaagatctatatcgttggaatcttcaaagaattcagtggcactgaatttacaaacttcatggagcttgctgagaagctgagttctgattatgactttggacacactttgcacgcaaaccacctcccacgtggtgatgcatctgtggaggggccattgatcaggctgctgaagccttttgatgaccttgttgttgacagcaaggattttgatgttgctgctctggagaagtttattgatgctagcagcacccctagagttgtcacttttgacaataatcctgacaaccacccatacctcatgaagttcttccaaagctcagctcccaaggctatgctgtttttgaacttctccacgggaccattggattctttcaagtctgtttactatgctgccgctgaggagttcaaggacaaggaaatcaagttccttattggtgacattgaagccagccagggtgccttccagtactttggtctgaaagaggaccagacaccccttatcctcattcaggatggtgattccaagaagttcttgaaggatcacattgaggctgaccagattgtctcttggttgaaggagtactttgatggcaaattgacgccgttcaagaagtctgagcctattcctgaggtcaacaatgagcctgttaaggttgttgtggctgacaacatccacgatgtggtcttcaagtctggaaaaaatgttcttattgaattctatgccccctggtgtgggcactgcaagaagctggcgcccatcttggaagaggcagccaccactcttctaagtgacgaggaagttgtgattgctaagatggacgcgaccgccaatgacgtgcccagtgagttcgaggtccaaggctacccaaccatgtacttcgtgactcccagcgggaaggtcacctcctacgacagtggcaggacggcggatgacatcgtcgacttcatcaacaagagcaaggagaccgccagcgccgtccaggcgacggcgacggcatctgggaaggcagctgacgcagccgagaagaccgagcccgtcaaggacgagctgtaaacagccttggcgtggacgctatgggtaatgggacagaggaggggggacaaaagctggcgccaacgtactcgccaagcctccggctttagtttttgcgagggaagagggcaaagtaagagaatgggagggaggggtctgtggcgtgttttgctctggtgcggcatgcctgtgtatcccattgagattctgtacaattgcaaacagagagcggtacctttttagttaattatcagagatgactgtagaaagaaactgattgtggtgaggttgagtggacgaataaatggcgagtctgcctcattggatgcatcatgaaacgggcacttttgaggagggatggtaatggggaaatttccgtggagaatagcttttagcgtgtgtttggttagcgggttgatgcgggtttgaatgggttcaatcca

SEQ ID NO: 23118 - DNA, 2574 bp, Zea Mays
aagtctctacgcggtatatagaagtccgggccattaaagttcccacttattcaccttccctctttttcctcccgcttccgaccgctcctcttcttctactccttccattcacactccacatgccgacgctggcggcggcggcgccggtggcggcggtggagtcgtagccgcctgaatcagcggtcttgtagtgacgccggaaccaggggcgcgagggggaaggagatggcggcgccggcttccgcggcggccgggcgcggcggggccatgtcgtcggacaacgccaagggcctggtcctcgcggtgtcgtcgagcgccttcattggcgccagcttcatcgtcaagaagatggggctcaggagggccgccgactccggcgtccgcgcgggatatggcgggttttcttatttagtggagcctctttggtggataggcatgatttctagtaagttttctttccagtcttattaaataatgaccttttataatactaaactcctctagttcgtttgttgtttatatgtatgcaattcttttctacattggggttattggtgtttcgccccaaatatacagcatatcatgttccatttgaatatttccccattattattcttgcttggcttatcaatggttctcaccctgctttgctaacactgtctatgttgatagtccttatagaaaacaaacacacaaaaaaacatattgctgagaatttgagatacatatggccggtttgttttagggagaagtaaatatctcattcaagaaagcagctttgatagtttcataggtgcctgcagatatagaattatagattttagtttttttattgggccagtacaggcccatgaaaaacatcagtacaatttagatcttatcatctgaatggaacattcattgctaacaatttgaggctgttttgttgaacttaataggaagtggatggaatgacattatgtagtgtactaagtttgctaagtgatttatgtatgcacagaactgctgctacaaccttttttaggagaacatgttactgaagctttctgaatgaaagaaacttgaaatatgtacgtacatgtgttttgtacagtgattgtaggtgaaattgctaattttgctgcttatgcattcgctcctgctattcttgtcactcctcttggtgcactcagtataatcatcagcgctgcacttgcacatgccattctacaggagaaactgcacacatttggtatacttggttgtgttctctgtgttgttggatctatcacaattgtgctccatgccccacaagagcgtgacattgattctgtaaaggaagtttgggatcttgcaactgaaccagctttcctttgctatgcggctatagtagttgcagcagccttagtgcttatatattttgttgtccctcatcatggacaaacaaacataatggtgtacattggagtatgttctcttctgggatcactcacggttatgagtgtaagagctcttggaattgccttgaagctaacattgtcaggaacaaaccaattattctatcctcagacttgggcctttgcactgattgtagctacctgtgtgagcacccagattaactatctaaataaggcattggatacatttaatacagcagtagtctcaccaatatattatgtgatgtttacttcactaacaattatagccagtgtgataatgttcaaggattgggaccatcaaaatccaacacaaattgttacagagatgtgtggcttcatgactatcctatctgggacgtttcttcttcacaagacaaaagatatgactgatagtcctggacaatctttgttgacacgacggccaaagcatgctagtcagaatgcgtttgcaattgaagtgatgccactaaaatgtcaagattatatagatgacgagaccttgacgttatcacttcccaaggttgaaaatggttacctaaaggaagagtatcttcttagatacaaggactcgagtattgtctgatagataattcttcgccaacatttgacgggaagctcttgagaatcattctgcttccagacatgattgattgatgtagaactggagttggcagttttacctcaacctggccttggatagattgatattacagattgtaagttgtcaactgtggtttgtctacatctggatgatgttttgagggaaggagcatgccagaaggatgccacattgaggccaattaagtgctagtcatctaggaattgtggttccggaaaagaatttgaagtgtacttagatacaatggtgtcaccaactatactcttttcccccctcttttctctctcattttagaacgccatgtgatagctgcaatgtgatcttatctgattcataggacgacgccatatagaaatgtcaagcatcgttttttcctgtaattacatcaaattggccagttgtcattgtgtatacttagtctatgtaaagtatatcaattcatactttatgacaagggacccttaggataaactcttgatcattctaattcatatttctcacattgctaatattttctgagcatgtgcttcattgata

SEQ ID NO: 23119 - DNA, 1869 bp, Zea Mays
aagtctctacgcggtatatagaagtccgggccattaaagttcccacttattcaccttccctctttttcctcccgcttccgaccgctcctcttcttctactccttccattcacactccacatgccgacgctggcggcggcggcgccggtggcggcggtggagtcgtagccgcctgaatcagcggtcttgtagtgacgccggaaccaggggcgcgagggggaaggagatggcggcgccggcttccgcggcggccgggcgcggcggggccatgtcgtcggacaacgccaagggcctggtcctcgcggtgtcgtcgagcgccttcattggcgccagcttcatcgtcaagaagatggggctcaggagggccgccgactccggcgtccgcgcggtgattgtaggtgaaattgctaattttgctgcttatgcattcgctcctgctattcttgtcactcctcttggtgcactcagtataatcatcagcgctgcacttgcacatgccattctacaggagaaactgcacacatttggtatacttggttgtgttctctgtgttgttggatctatcacaattgtgctccatgccccacaagagcgtgacattgattctgtaaaggaagtttgggatcttgcaactgaaccagctttcctttgctatgcggctatagtagttgcagcagccttagtgcttatatattttgttgtccctcatcatggacaaacaaacataatggtgtacattggagtatgttctcttctgggatcactcacggttatgagtgtaagagctcttggaattgccttgaagctaacattgtcaggaacaaaccaattattctatcctcagacttgggcctttgcactgattgtagctacctgtgtgagcacccagattaactatctaaataaggcattggatacatttaatacagcagtagtctcaccaatatattatgtgatgtttacttcactaacaattatagccagtgtgataatgttcaaggattgggaccatcaaaatccaacacaaattgttacagagatgtgtggcttcatgactatcctatctgggacgtttcttcttcacaagacaaaagatatgactgatagtcctggacaatctttgttgacacgacggccaaagcatgctagtcagaatgcgtttgcaattgaagtgatgccactaaaatgtcaagattatatagatgacgagaccttgacgttatcacttcccaaggttgaaaatggttacctaaaggaagagtatcttcttagatacaaggactcgagtattgtctgatagataattcttcgccaacatttgacgggaagctcttgagaatcattctgcttccagacatgattgattgatgtagaactggagttggcagttttacctcaacctggccttggatagattgatattacagattgtaagttgtcaactgtggtttgtctacatctggatgatgttttgagggaaggagcatgccagaaggatgccacattgaggccaattaagtgctagtcatctaggaattgtggttccggaaaagaatttgaagtgtacttagatacaatggtgtcaccaactatactcttttcccccctcttttctctctcattttagaacgccatgtgatagctgcaatgtgatcttatctgattcataggacgacgccatatagaaatgtcaagcatcgttttttcctgtaattacatcaaattggccagttgtcattgtgtatacttagtctatgtaaagtatatcaattcatactttatgacaagggacccttaggataaactcttgatcattctaattcatatttctcacattgctaatattttctgagcatgtgcttcattgata

SEQ ID NO: 23120 - DNA, 1978 bp, Zea Mays
cgtccgtcggtggatgcccgctctggtgtttggatctccttccaggtcggccggtgtgtgccgtttgcgctggattggctggttggttcgcacgacggcgagacgggtcgagttgttgggctgtgtgccagccatgtggttgcttagctggctactgggaatccggttgaagctttgaaattgatttcttaatttttgggtccccttttgcgacgcggtttctggttggtgagagggatctgcagcagtagaaaaaaatgtgacgagctaagttgatttcggagaaaatatttatttccttggccgtggtagatttggtcacggcagaaattgaccaccatgagagcaatgttcactttgattggtggagaaaaaggttgcaatcattgacggcgaggcatgtcgagttgtcaacttggtgtctatgctgatgcaaaaaggatatggcgggttttcttatttagtggagcctctttggtggataggcatgatttctatgattgtaggtgaaattgctaattttgctgcttatgcattcgctcctgctattcttgtcactcctcttggtgcactcagtataatcatcagcgctgcacttgcacatgccattctacaggagaaactgcacacatttggtatacttggttgtgttctctgtgttgttggatctatcacaattgtgctccatgccccacaagagcgtgacattgattctgtaaaggaagtttgggatcttgcaactgaaccagctttcctttgctatgcggctatagtagttgcagcagccttagtgcttatatattttgttgtccctcatcatggacaaacaaacataatggtgtacattggagtatgttctcttctgggatcactcacggttatgagtgtaagagctcttggaattgccttgaagctaacattgtcaggaacaaaccaattattctatcctcagacttgggcctttgcactgattgtagctacctgtgtgagcacccagattaactatctaaataaggcattggatacatttaatacagcagtagtctcaccaatatattatgtgatgtttacttcactaacaattatagccagtgtgataatgttcaaggattgggaccatcaaaatccaacacaaattgttacagagatgtgtggcttcatgactatcctatctgggacgtttcttcttcacaagacaaaagatatgactgatagtcctggacaatctttgttgacacgacggccaaagcatgctagtcagaatgcgtttgcaattgaagtgatgccactaaaatgtcaagattatatagatgacgagaccttgacgttatcacttcccaaggttgaaaatggttacctaaaggaagagtatcttcttagatacaaggactcgagtattgtctgatagataattcttcgccaacatttgacgggaagctcttgagaatcattctgcttccagacatgattgattgatgtagaactggagttggcagttttacctcaacctggccttggatagattgatattacagattgtaagttgtcaactgtggtttgtctacatctggatgatgttttgagggaaggagcatgccagaaggatgccacattgaggccaattaagtgctagtcatctaggaattgtggttccggaaaagaatttgaagtgtacttagatacaatggtgtcaccaactatactcttttcccccctcttttctctctcattttagaacgccatgtgatagctgcaatgtgatcttatctgattcataggacgacgccatatagaaatgtcaagcatcgttttttcctgtaattacatcaaattggccagttgtcattgtgtatacttagtctatgtaaagtatatcaattcatactttatgacaagggacccttaggataaactcttgatcattctaattcatatttctcacattgctaatattttctgagcatgtgcttcattgata

SEQ ID NO: 23121 - DNA, 2032 bp, Zea Mays
gttttctttccagtcttattaaataatgaccttttataatactaaactcctctagttcgtttgttgtttatatgtatgcaattcttttctacattggggttattggtgtttcgccccaaatatacagcatatcatgttccatttgaatatttccccattattattcttgcttggcttatcaatggttctcaccctgctttgctaacactgtctatgttgatagtccttatagaaaacaaacacacaaaaaaacatattgctgagaatttgagatacatatggccggtttgttttagggagaagtaaatatctcattcaagaaagcagctttgatagtttcataggtgcctgcagatatagaattatagattttagtttttttattgggccagtacaggcccatgaaaaacatcagtacaatttagatcttatcatctgaatggaacattcattgctaacaatttgaggctgttttgttgaacttaataggaagtggatggaatgacattatgtagtgtactaagtttgctaagtgatttatgtatgcacagaactgctgctacaaccttttttaggagaacatgttactgaagctttctgaatgaaagaaacttgaaatatgtacgtacatgtgttttgtacagtgattgtaggtgaaattgctaattttgctgcttatgcattcgctcctgctattcttgtcactcctcttggtgcactcagtataatcatcagcgctgcacttgcacatgccattctacaggagaaactgcacacatttggtatacttggttgtgttctctgtgttgttggatctatcacaattgtgctccatgccccacaagagcgtgacattgattctgtaaaggaagtttgggatcttgcaactgaaccagctttcctttgctatgcggctatagtagttgcagcagccttagtgcttatatattttgttgtccctcatcatggacaaacaaacataatggtgtacattggagtatgttctcttctgggatcactcacggttatgagtgtaagagctcttggaattgccttgaagctaacattgtcaggaacaaaccaattattctatcctcagacttgggcctttgcactgattgtagctacctgtgtgagcacccagattaactatctaaataaggattgggaccatcaaaatccaacacaaattgttacagagatgtgtggcttcatgactatcctatctgggacgtttcttcttcacaagacaaaagatatgactgatagtcctggacaatctttgttgacacgacggccaaagcatgctagtcagaatgcgtttgcaattgaagtgatgccactaaaatgtcaagattatatagatgacgagaccttgacgttatcacttcccaaggttgaaaatggttacctaaaggaagagtatcttcttagatacaaggactcgagtattgtctgatagataattcttcgccaacatttgacgggaagctcttgagaatcattctgcttccagacatgattgattgatgtagaactggagttggcagttttacctcaacctggccttggatagattgatattacagattgtaagttgtcaactgtggtttgtctacatctggatgatgttttgagggaaggagcatgccagaaggatgccacattgaggccaattaagtgctagtcatctaggaattgtggttccggaaaagaatttgaagtgtacttagatacaatggtgtcaccaactatactcttttcccccctcttttctctctcattttagaacgccatgtgatagctgcaatgtgatcttatctgattcataggacgacgccatatagaaatgtcaagcatcgttttttcctgtaattacatcaaattggccagttgtcattgtgtatacttagtctatgtaaagtatatcaattcatactttatgacaagggacccttaggataaactcttgatcattctaattcatatttctcacattgctaatattttctgagcatgtgcttcattgata

SEQ ID NO: 23122 - DNA, 823 bp, Zea Mays
ccgagctgtataaatccggatgcactgttctgttgcagtgctcagggatacgaggaggggaaggaacaagatgagttccaagaaagcaacaaaccggggtttggtacttgtccttctgctcgttgttttgcctgcgctttcggtcggcacgcacgcaggttgatttccctattcagtctatcgttattttcattttctgtaaatttctttttccccttaaattgtattatgaactcaggaacttgtcaagatatataatcaacatgtagtactggaaagtatatgtgtagtattatttttcaggcgtgcagaagtggatgacttgattcattagctagtcttcgatctgtaatttgattttgcaggagaaagagagttgccagatgaaaaggatcacaagggccattccactgttgcttctggaaaggggggaacggcttcaggagatatggtgaagacgaatgactatgggcgctacgatccaactccggcgttctccaagcctcgctccaagcttatacccaactaattacactcacacttgctgcatctacatgcttactatatggatggcatgcatagaaatatagtcctgtacagaatataatgctcacttcgtttttttttgtcgcgttctagttcaaaaataaactaatcggcgataaatatttaagaacggaggtagtatctagtatctagccttgacgcctctactgaatgtacctctactgaatgtactcggcttcagttcttaagtttggtgtgttggatctctgtttcgtcttccttttattttctaacaacaccaggttaagaatcctta

SEQ ID NO: 23123 - DNA, 1330 bp, Zea Mays
tgcacgcaggcccatggatcttttattttatgagctaaaatggcttcgagccgagccaaggttaccatggagactctacttgttctgcagcaaggacaccgctgccttatcagtgaaccaggtgaattctccatcttgtagcacagccatctcaacaggcagcaggtctgacgaggtttgcttgtctgagagcgccttctgcaccgctgccgcctttccagctccagtcaccaccatcgcaacgtatgcggatgagttgattactggaaacgtgaatgtaattctctctggaggtggctttggagaatccttaatgtatgtgacccacctctctttctcgttaacaagagggtggccagggaagagagacgcaatgtggccatcaggtcccattcccagaagctggagatcaaacctgggaaatccagtcgccgctgacatagaaatcacaccgttcttgacaagctgcttcaggcacgcttcgtagtcgtctgccgctccttcagctgacaacgcatcgtttatagcataaacttgtccaggaggaatcggcacctacaaagttgaaagacagcaccaagttacccttacaaattacatagaacatgaaaactgctgagtggaatgactgcatgtttcatttaacttgcacagaattgatcctgttatggatccctctgggcctccacaaacatgaattagctgacaagattgtttagagctcaagcagcattttagtgttgacaaattttagcatataaaacttatcgttgaataaagcccaaaccaaaaattgtagtttttattattattaatggttcactaaactgttggccacactattggtcaacctgaaaatattagtctaattttttaatatcattctggaaaaaaaatattaaagcagtttcaagagtctgtactagacttagactgcatgtaaagagctgcagcgaaatcatcatcaacatcaacatagccttttagtcccaaataagttgggataggctagagttgaaacccaacaagaagtcaccaaaaggagaaagagagagaaatgggaggggggaaagcttttgagagaactaaaagagaaaagatcataaaagactacctacaaacaccaaagttcatgaaccagccatgtgattctaatgtaaactctaatattgctagagcacaagacagttgtatcatgaagccgactaagttttgtttaagttccaatacatgtttctttctgaaagaccataccatgacctatttcacatttgcatatgattctaaaacagaaatttaacacgaaacacgaagcaaaggtaaacaagta

SEQ ID NO: 23124 - DNA, 2264 bp, Zea Mays
ctcgtctcggctttgtatatagcccggaagcctgcttgcgcacaacaacaactctgcatgactccactagtccaccatccgccgcctccccttgcgggctgcaatggacggggtatttgtgctagagctttagaggcgcgcggcgggggtgcgagtgcgagtgcggccgccgacgcgcgggcgaaggaggcagcgggatggggctgctgtcgaaccgggtggagcggtcggagatcaggcccggcgaccacatctacacctggcgggccgtttacgcctactcccaccacggtacgctcctcaatcccctcctccgacggcgacaagctttcctgtcctcacgagctctagtagccaagtgccgccttcggccacccgatcggccgctccggttcgccgaagcgagtcgctatgtgcacaagtgaaagtgagttgttcaccggaattctggctcgcccgccctgcctcagtttggcttcatcgtgcgcgaatgccgcttcattgttcgcctcaattagctaagctaaatctgcgaggttttcgtcgtcctcctgtctgcagaaatttccctgcaaaaaccatgccgattcctatgcggttatgtatgccctccactattttactctttttgagatttttgatggcaccagtttggtggcagtggattactgcaactctgtaaccgacaaataagttgggggacacacacacacatgatgccatgtttcaactccatctaatctcaccacgcctggttaggcatggagatggggcttccagtgaggataccattctctgtacacaaacctttccagatggataggatgccacatgctttgtcactgtgtcctactattctgctttccatgcagaaccagaacaaacggtacatgttgctgctcacctactgtttaccaacgtttctgtctgtttctgtgatttgttgtttttagtgtggagcagccttattgttaactgagataacttgcaggaaagaaacaccgcaggctataaggttgacccatactttactgtgcctgataaatggctagtttagtcctagctgctgtaaaactccgaccaccaaagcatcctatgctaattaagttgtttcagtcacctttactagttgacgtaactttcttttatttaccacagtacttttactttgcatctctttcgtttcagataacagaggtttttgaccctcatttaggaagcttagacgacccttctacagtgtcacaactgtgctatagggacagtgtgtctccacagcatctatgttggaggaagcaaggtggtccattttacgcgaaagaaagaaaccgaaagttcagattcatcagacttcacctccagcttaatctcaggggttccgtcagagtgcccaacattccctgactgtggatttcagctgcccagcagtggcgtcgtcctcacttgcttggactgtttcgtccgcagtggctccctctactgcttcgagtatggggtgccatctgcggttttccttgcaaagcttcgtggggggacctgcaccactgccgaatcagacccaccagaggttgtcgtccatcgagccatgtgcttgctccagaagggctttggaaattacgatatcttcgagaagaactgtgaagactttgcactctactgcaagactgggcttctaccggtcgaggatcctggcattgggactagtgggcaagcttcttctgccatcggtgtgccgttggcagctcttctgtccaccccgttcaagcttctggctgctggcccgcttggaatggccaccgtcacagctgggatgtactgtgctggcagatacattaccgacataggagtaaggaaggacgtagcaaaagttgaggtggagaaattgtcatcacaccccggtttccaccttgtcgaagacgaaggatcagttaacaagcggtcagaaaagccgaagtccttgctccctatgaagaggaaacgaggaaggtgagtgtgaaacacagctttggggtgggtggttgggtggggcgaactacactgcccttcaattggtgccgaattgtggataatttgggatatagtatatgctccactgtaataagactggatggtatagatatctgtcttcagaatgtgctctaattgggttaggcgcacgcgcacccctcacatggtcaattgtaactcataaatttaatcatcaaatcactatataatgtagattttgttctatgttgtttccagtcttgtgctgcaattaataa

SEQ ID NO: 23125 - DNA, 1216 bp, Zea Mays
ctcgtctcggctttgtatatagcccggaagcctgcttgcgcacaacaacaactctgcatgactccactagtccaccatccgccgcctccccttgcgggctgcaatggacggggtatttgtgctagagctttagaggcgcgcggcgggggtgcgagtgcgagtgcggccgccgacgcgcgggcgaaggaggcagcgggatggggctgctgtcgaaccgggtggagcggtcggagatcaggcccggcgaccacatctacacctggcgggccgtttacgcctactcccaccacggcatctatgttggaggaagcaaggtggtccattttacgcgaaagaaagaaaccgaaagttcagattcatcagacttcacctccagcttaatctcaggggttccgtcagagtgcccaacattccctgactgtggatttcagctgcccagcagtggcgtcgtcctcacttgcttggactgtttcgtccgcagtggctccctctactgcttcgagtatggggtgccatctgcggttttccttgcaaagcttcgtggggggacctgcaccactgccgaatcagacccaccagaggttgtcgtccatcgagccatgtgcttgctccagaagggctttggaaattacgatatcttcgagaagaactgtgaagactttgcactctactgcaagactgggcttctaccggtcgaggatcctggcattgggactagtgggcaagcttcttctgccatcggtgtgccgttggcagctcttctgtccaccccgttcaagcttctggctgctggcccgcttggaatggccaccgtcacagctgggatgtactgtgctggcagatacattaccgacataggagtaaggaaggacgtagcaaaagttgaggtggagaaattgtcatcacaccccggtttccaccttgtcgaagacgaaggatcagttaacaagcggtcagaaaagccgaagtccttgctccctatgaagaggaaacgaggaagatgcttgttgtttcccatggaaattactctacgtccatggctacatgaatgcctgtccctttgtgttctgttctgcctttaatcattgatctggtagggtaggcgacgacacctacggcctacccctgtttttccattgttttttcaccgatctggatcaaaaggctcgacaagctacgtcctgagatctgggcgtggatttgagctacagaaaag

SEQ ID NO: 23126 - DNA, 1267 bp, Zea Mays
aaacctttgaccatttctgttggggctatttaaattcatacccaccaccttaaaaacccgtttctgttgccgttcgaagattgtggcctgggaggtttgacactaagatcttttgcttataaaagtctaaaacttgaattgccttttctttgagttaagtccttttcacctttcaatgattttattacaagtctgcgaggcaggggagttttcgggtgtgacggtgacattcagatctccgtcgcggctacctgcggctaccttcaactgttctactaaaactctaaagtttggagaaaatgggagctcttgactggaataaaattgttcatcaaaaccaagggtggcgccttattagctgcatctggctccatgctggcctaattcatttggttgtgaacatgctaagtttgctgtttattggaatccgtcttgagcagcaatttggatttgttcgcattggtgccatatacctactgtctggttttggtggcagcgttctgtctgcactcttcctacggaataactacatctctgttggtgcttctggagctttatttggcctgcttggatccatgctttctgagctactcatgaactggactatatactccaacaaggcagcagctataataacactcctgtttataattgcactcaacttggctattgggatactacctcatgctgacaactttgctcacattggtggattcgcaacgggtttcctcttgggttttgttctgttggcaaggcctcaatttggctggatggaacaccacgagctgccgcagactaaccaacctcccaagtacaaagcgtaccagtatattttgtgggttgtggcactagtcttgctgttagttgggtttgtgatttcacttgtgatgcttttcaaagggaagaacgggaacgacggctgccactggtgccactatctaaactgcgtgccaacatcaaagtggaagtgcaacacctagacacctcaggtttctgttactctggcgaaacatgtagtattcagattcagaagaccattttttttatgcgtgtttgtctgtagatataaacaagttctttgttctttactgggttgaagttatgtaaactgctttgttgagctttgtatgtttataactcgaggttgatgcctattcaaaatcgttgtttagaatgctcgtatcttatttttgtttatcaaggtatgctgcagctttgaattgttggaatcagctaatataacaaaacaattataactatcatatat

SEQ ID NO: 23127 - DNA, 2418 bp, Zea Mays
gactcttcttcgccggcggcaaccgccatggctcctcctcgcccccctctcccaaccgtactctccgtcctcctccttctcctcctcgcggccggcagcgcaggcggcgtggagatcctcgccaagtcccttttggagagctgcgttgccgactcgggcgcgggggggcgcctctcctgcgacagaaaggtagtggtcgacatggccgtccccagcggatccaacggcggtgaggcgtggctggtcgcgcaggtcgcgcacgttaacgacacaaagcaatcgaagaccataagaaatccccctgtcatcaccgtcaacaagggcgccgtgtttgcgctctacgccctcaactacatcagggatgttgcttacaaaccagaggaacagtatgttgagacacgcaaatgtgaaccagatgctggttctgatgttgttagagcttgtgaaagcctgtttgctgtccctgtggtcctaaccgccgtgtaccttcatcttgtggaaacgtttttgagaaaattttcaaaggaaaagctaatacggctcactgtctaagatttccaggtgactggttccatgtttttggaattggaacaaggtcacttgggttcaacatcagggtacaagttaagaaaggttcatctgtatcggaggttgttgttggtccagagaatagaactgttgtttctaaagacaactttctgagagtgaatctcattggtgattttggtggttataccagcatcccagcatttgaggacttctatcttgtgacccctaggaagagtgctggtagtggtgagccacaaaaccttggtgctgaatatagaaagtggatgctgttggagagagttcgttttacagacggtgtcgaatgtaacaagattggtgttggttatgaggctttccaaaaccaacctaacttttgtgcatcgccatttgagagctgtttgaacaatcagctatggacctttttggagtctgacaaaaaccggataagcatgagccgacagccccaatatgttgtgcagggaaggtttcagaggatcaatcaacatccagatgcaagtgttcattctttttctattggagtgacagaagttattaatagcaatttacggatagagctgagtgctgatgacatagaatacatgtatcagaggagtccagggaatataacagacattagtgttccagcatttgaagtcttaagtcaatatggtactgcaaaggtcacaactaagaatattggtacactggaggcttcgtataccttgacatttcactgctcaagtggcatcagttttatggaggagcagtactatatcctcaaaccgaatgaagagagtacccgtttattttacttgcacgcatctacagatcaagcagcaaagtatcaatgtacagctattctgaaggcgtcggattctagtgaactcgacagacaagaatgtgttttttctactacggctacagttcttgataatggaacacagattatcggttcaaatggctacaaattgggtttctttgacaccatcaaaggctatttggttagcttctgggattttctgattgatttaatcagtggcaaatcctgcaggctgaacaaatgtcggagcttttttgacttcagctgccatgcgcagtacagatgcataacctggctcgtcatgttggtgctgctactttttatgttacccgcaggcgcaattgtcctgtatcttcttcatcagaaaggcttcttcgacccagtatacgactggtgggatgacctgctgggggcggactaccgcgcgcaccggaggcacaagaaaggccgccgccaccaccatcaccaccacgaccaccatcaccaccggcaccaccaccaccacgggcactcgcacggccatgaccaccacccccacagtcaccaccacgcgcaccagaggagaaagatcgagcccagccaccaccacgtcctacacaggcagcagcccgggacagcggcagaaggccaccggcacaagcacgacccggcgctcggcgtgcagcacagggaggccgggcacttggggcacaagcgtcggcatggcaaagcggtggtcgcggaggacgccctggacctggagttcagggaacgaaggccatacgaggtcaggcatgccgggcacctgcaccgcgaccaccaccaccaccaccactcctgggaagtgtaggaatagttctgaccgtctgaactttaagacatctagcgtaagatgaagttggtgtaccgtgggcacgggacatgcccttttgcatgcatgcagtgagttagtgggtgtttaatttctagtaaactaatttgtatcgcttcattttatttcattttagtctttaatttgcttaatattgaaactaaaatttcatattcgacaaattagaaaataaaataaa

SEQ ID NO: 23128 - DNA, 2732 bp, Zea Mays
gccggcggcaaccgccatggctcctcctcgcccccctctcccaaccgtactctccgtcctcctccttctcctcctcgcggccggcagcgcaggcggcgtggagatcctcgccaagtcccttttggagagctgcgttgccgactcgggcgcgggggggcgcctctcctgcgacagaaaggtagtggtcgacatggccgtccccagcggatccaacggcggtgaggcgtggctggtcgcgcaggtcgcgcacgttaacgacacaaagcaatcgaagaccataagaaatccccctgtcatcaccgtcaacaagggcgccgtgtttgcgctctacgccctcaactacatcagggatgttgcttacaaaccagaggaacagtatgttgagacacgcaaatgtgaaccagatgctggttctgatgttgttagagcttgtgaaagcctgtttgctgtccctgtggtcctaaccgccgtgtaccttcatcttgtggaaacgtttttgagaaaattttcaaaggaaaagctaatacggctcactgtctaagatttccaggtgactggttccatgtttttggaattggaacaaggtcacttgggttcaacatcagggtacaagttaagaaaggttcatctgtatcggaggttgttgttggtccagagaatagaactgttgtttctaaagacaactttctgagagtgaatctcattggtgattttggtggttataccagcatcccagcatttgaggacttctatcttgtgacccctaggaagagtgctggtagtggtgagccacaaaaccttggtgctgaatatagaaagtggatgctgttggagagagttcgttttacagacggtgtcgaatgtaacaagattggtgttggttatgaggctttccaaaaccaacctaacttttgtgcatcgccatttgagagctgtttgaacaatcagctatggacctttttggagtctgacaaaaaccggataagcatgagccgacagccccaatatgttgtgcagggaaggtttcagaggatcaatcaacatccagatgcaagtgttcattctttttctattggagtgacagaagttattaatagcaatttacggatagagctgagtgctgatgacatagaatacatgtatcagaggtatatttgttggccacggccctactaatttgaaattagcaagtacagacagatttatgtttatcaggtgttcatactcattggtgttcatactcatttcaatttagctattacaaccatatttatatttgttgaccacggccctactcttaaaattagatgctatccaaataacaagtgtccctttaaatctatgccatgtttgacaaacagtagggaaacaaacattggtactacaggtttcttctcaagtcctactctttacatttttatgttctttattaatatataggagaatgtctaatatgttgtgcttccacatcaggagtccagggaatataacagacattagtgttccagcatttgaagtcttaagtcaatatggtactgcaaaggtcacaactaagaatattggtacactggaggcttcgtataccttgacatttcactgctcaagtggcatcagttttatggaggagcagtactatatcctcaaaccgaatgaagagagtacccgtttattttacttgcacgcatctacagatcaagcagcaaagtatcaatgtacagctattctgaaggcgtcggattctagtgaactcgacagacaagaatgtgttttttctactacggctacagttcttgataatggaacacagattatcggttcaaatggctacaaattgggtttctttgacaccatcaaaggctatttggttagcttctgggattttctgattgatttaatcagtggcaaatcctgcaggctgaacaaatgtcggagcttttttgacttcagctgccatgcgcagtacagatgcataacctggctcgtcatgttggtgctgctactttttatgttacccgcaggcgcaattgtcctgtatcttcttcatcagaaaggcttcttcgacccagtatacgactggtgggatgacctgctgggggcggactaccgcgcgcaccggaggcacaagaaaggccgccgccaccaccatcaccaccacgaccaccatcaccaccggcaccaccaccaccacgggcactcgcacggccatgaccaccacccccacagtcaccaccacgcgcaccagaggagaaagatcgagcccagccaccaccacgtcctacacaggcagcagcccgggacagcggcagaaggccaccggcacaagcacgacccggcgctcggcgtgcagcacagggaggccgggcacttggggcacaagcgtcggcatggcaaagcggtggtcgcggaggacgccctggacctggagttcagggaacgaaggccatacgaggtcaggcatgccgggcacctgcaccgcgaccaccaccaccaccaccactcctgggaagtgtaggaatagttctgaccgtctgaactttaagacatctagcgtaagatgaagttggtgtaccgtgggcacgggacatgcccttttgcatgcatgcagtgagttagtgggtgtttaatttctagtaaactaatttgtatcgcttcattttatttcattttagtctttaatttgcttaatattgaaactaaaatttcatattcgacaaattagaaaataaaataaa

SEQ ID NO: 23129 - DNA, 5096 bp, Zea Mays
atggctcctcctcgcccccctctcccaaccgtactctccgtcctcctccttctcctcctcgcggccggcagcgcaggcggcgtggagatcctcgccaagtcccttttggagagctgcgttgccgactcgggcgcgggggggcgcctctcctgcgacagaaaggtagtggtcgacatggccgtccccagcggatccaacggcggtgaggcgtggctggtcgcgcaggtcgcgcacgttaacgacacaaagcaatcgaagaccataagaaatccccctgtcatcaccgtcaacaagggcgccgtgtttgcgctctacgccctcaactacatcagggatgttgcttacaaaccagaggaacagtatgttgagacacgcaaatgtgaaccagatgctggttctgatgttgttagagcttgtgaaagcctgtttgctgtccctgtggtcctaaccgccgtgtaccttcatcttgtggaaacgtttttgagaaaattttcaaaggaaaagctaatacggctcactgtctaagatttccaggtgactggcatgatcttgaagaaccaaaccataaatgcagaaagtggaggcccccgcgtcgcccccgcttgggcggcgctaaccgtcgtctcctcctcttcctcccctctctacctcgccgccgtcggagctagccggcgggttgttcgcccggctcgtgaggaaggcggcggtggggcgtttcggcgtgtcgtggctcgcggcggcggtggcctgtgctcgcgcgcacgccaacggcggtggcattgctgtgctccaacgcgtggccgaccggtttggtaagcatggcggtggtggtgacgaacaacagggcgagagcggagctggcgtggctgcagtggcgggagcaggtgccccggagttagctgatggcttgctcgcggcggcggtgtggctcacgcgcctgctcttccgtcgagtagtggcatccccggcaatcgctcttgaggctggctcgcggcgccgctcgcgtgttcgctgcgtgcgcggcaacacacgcggggaggagtgggctatgtgggctttggtcggcggcggatctggcattgtcggcggatctaggccccatcggcctagatatggcccaccctcaactgatctacgccttggcgatggttgtcattgcggggtgcatgttggtgcgcaacggaggcggtgcgcccggcgacagctggtttcgatgtcgcgggtgccagggccagtggcggtagctcaagctggtttcagctctggcgagtgggcagtgtggcgcacaaggcaaggtgttccctggttccatgtgcccaaccggaagggatggcagccggcgcagctttgcggctgctgcggcagccggcacggtgcccctctggaggggtgtgtgcggaggcaagggcggtggcgacgacagaggctgcatgctttgacctagggtcctggactagcgatgagatggagggcatcttggacgaaagcttcggcgacagtgacgcctgtgtgcgccacttcactctgttgagggcgacgcattgctatgtcttccatgggcgaaagcccgatccatctggaatgtgacggtggcgtcctggatgtcactcccttcctaaaggcgtcacgtttgagtccgtcttggcctcgacgttgccttcggttgatgctttcgcttctcgacgtctggattgcgggtcgaggtgggattttttgaaacatgaagtcgaagctgccacattaggagatgtggctcgttaacgatgacatgaggcgaacctccttcttcgtggtttggattgttttggaggtcgagcaaaaaactggaggtgggtgttggatcaagatagttggtgaagaatcggagctgcctcgagtgtgggtgtgttgaggcttagcaacgatggcgtgtcacggtcttcctccttctgtgccaggttttaggtgtaggtgccttcgtgtttcttttgaccgtgtgcggcccgtctggtgaagttggagctgcccgtaccttgtgttgagctcggcaacggtgactctgtatgggctttgtgtgtggggttgccgctgcttatgttgtttgggcactctgtgtaagtttttggcccggtttttcttaaaactaggtcaattctaatcttcttcttaatggaaaggcagagctcctgtcattacattcaaaaaaaattaggcatgatcttatttattttttaaagtaggggaatacttgtttcaaactaatatactcttctacatctttggggtatcctcgattaattgttcaggtctgatttgaataaacataatgtaatatgtgtgtgtgtgcaagaataatacaacttatgataaagttagtgtggtgcaacaataagctaaacaattatcctaatagtaaacatgtgtattgatattccttttttttacgaataggttccatgtttttggaattggaacaaggtcacttgggttcaacatcagggtacaagttaagaaaggttcatctgtatcggtaggatttgaaattctgcataagagttccaactagtatcacgtgaggactagggcataaatcatcagattgctcatgccagtttcttgcttggttaagcatacattcccatgatctgtgctgagaaagttccacaaccttactatgttatttgtttattttgagatcgttcttctttctagaaactaaattatgaattttggtgtttacttatcaaaccaaagtttgttttaaaggggttttcctgccaatctgcagcagattttttgttatgtcagtatgtcactcacttcagaagtgtttttatatctttccccaattgcactgtaggaggttgttgttggtccagagaatagaactgttgtttctaaagacaactttctgagagtgaatctcattggtgattttggtggttataccagcatcccagcatttgaggacttctatcttgtgacccctaggaagagtgctggtagtggtgagccacaaaaccttggtgctgaatatagaaagtggatgctgttggagagagttcgttttacagacggtgtcgaatgtaacaagattggtgttggttatgaggctttccaaaaccaacctaacttttgtgcatcgccatttgagagctgtttgaacaatcagctatggacctttttggagtctgacaaaaaccggataagcatgagccgacagccccaatatgttgtgcagggaaggtttcagaggatcaatcaacatccagatgcaagtgttcattctttttctattggagtgacagaagttattaatagcaatttacggatagagctgagtgctgatgacatagaatacatgtatcagaggtatatttgttggccacggccctactaatttgaaattagcaagtacagacagatttatgtttatcaggtgttcatactcattggtgttcatactcatttcaatttagctattacaaccatatttatatttgttgaccacggccctactcttaaaattagatgctatccaaataacaagtgtccctttaaatctatgccatgtttgacaaacagtagggaaacaaacattggtactacaggtttcttctcaagtcctactctttacatttttatgttctttattaatatataggagaatgtctaatatgttgtgcttccacatcaggagtccagggaatataacagacattagtgttccagcatttgaagtcttaagtcaatatggtactgcaaaggtcacaactaagaatattggtacactggaggcttcgtataccttgacagtatgcatctgtcagaaactttacaccttgcttcacttgccaagtagaatgtgaacttctgtgtcttctatgtagtccgagatcaaagtaacatatgtgctgatttgcaactccgactttgattttgttgaaatttaactagtggtttgctccttttgtagtttcactgctcaagtggcatcagttttatggaggagcagtactatatcctcaaaccgaatgaagagagtacccgtttattttacttgcacgcatctacagatcaagcagcaaagtatcaatgtacagctattctgaaggcgtcggattctagtgaactcgacagacaagaatgtgttttttctactacggctacagttcttgataatggaacacagattatcggttcaaatggctacaaattgggtttctttgacaccatcaaaggctatttggttagcttctgggattttctgattgatttaatcagtggcaaatcctgcaggctgaacaaatgtcggagcttttttgacttcagctgccatgcgcagtacagatgcataacctggctcgtcatgttggtgctgctactttttatgttacccgcaggcgcaattgtcctgtatcttcttcatcagaaaggcttcttcgacccagtatacgactggtgggatgacctgctgggggcggactaccgcgcgcaccggaggcacaagaaaggccgccgccaccaccatcaccaccacgaccaccatcaccaccggcaccaccaccaccacgggcactcgcacggccatgaccaccacccccacagtcaccaccacgcgcaccagaggagaaagatcgagcccagccaccaccacgtcctacacaggcagcagcccgggacagcggcagaaggccaccggcacaagcacgacccggcgctcggcgtgcagcacagggaggccgggcacttggggcacaagcgtcggcatggcaaagcggtggtcgcggaggacgccctggacctggagttcagggaacgaaggccatacgaggtcaggcatgccgggcacctgcaccgcgaccaccaccaccaccaccactcctgggaagtgtaggaatagttctgaccgtctgaactttaagacatctagcgtaagatgaagttggtgtaccgtgggcacgggacatgcccttttgcatgcatgcagtgagttagtgggtgtttaatttctagtaaactaatttgtatcgcttcattttatttcattttagtctttaatttgcttaatattgaaactaaaatttcatattcgacaaattagaaaataaaataaa

SEQ ID NO: 23130 - DNA, 4773 bp, Zea Mays
atggctcctcctcgcccccctctcccaaccgtactctccgtcctcctccttctcctcctcgcggccggcagcgcaggcggcgtggagatcctcgccaagtcccttttggagagctgcgttgccgactcgggcgcgggggggcgcctctcctgcgacagaaaggtagtggtcgacatggccgtccccagcggatccaacggcggtgaggcgtggctggtcgcgcaggtcgcgcacgttaacgacacaaagcaatcgaagaccataagaaatccccctgtcatcaccgtcaacaagggcgccgtgtttgcgctctacgccctcaactacatcagggatgttgcttacaaaccagaggaacagtatgttgagacacgcaaatgtgaaccagatgctggttctgatgttgttagagcttgtgaaagcctgtttgctgtccctgtggtcctaaccgccgtgtaccttcatcttgtggaaacgtttttgagaaaattttcaaaggaaaagctaatacggctcactgtctaagatttccaggtgactggtacgtattggtgatgtccctatttttttttattttgtatcaataattccttgacgcaatgtactgagttaactgaaataaaggttcatgtcttgactatgacttaatgacctaactgtaaatttctgaacatgactagtgactaacattatatgttatgtcaatcaggcatgatcttgaagaaccaaaccataaatgcagaaagtggaggcccccgcgtcgcccccgcttgggcggcgctaaccgtcgtctcctcctcttcctcccctctctacctcgccgccgtcggagctagccggcgggttgttcgcccggctcgtgaggaaggcggcggtggggcgtttcggcgtgtcgtggctcgcggcggcggtggcctgtgctcgcgcgcacgccaacggcggtggcattgctgtgctccaacgcgtggccgaccggtttggtaagcatggcggtggtggtgacgaacaacagggcgagagcggagctggcgtggctgcagtggcgggagcaggtgccccggagttagctgatggcttgctcgcggcggcggtgtggctcacgcgcctgctcttccgtcgagtagtggcatccccggcaatcgctcttgaggctggctcgcggcgccgctcgcgtgttcgctgcgtgcgcggcaacacacgcggggaggagtgggctatgtgggctttggtcggcggcggatctggcattgtcggcggatctaggccccatcggcctagatatggcccaccctcaactgatctacgccttggcgatggttgtcattgcggggtgcatgttggtgcgcaacggaggcggtgcgcccggcgacagctggtttcgatgtcgcgggtgccagggccagtggcggtagctcaagctggtttcagctctggcgagtgggcagtgtggcgcacaaggcaaggtgttccctggttccatgtgcccaaccggaagggatggcagccggcgcagctttgcggctgctgcggcagccggcacggtgcccctctggaggggtgtgtgcggaggcaagggcggtggcgacgacagaggctgcatgctttgacctagggtcctggactagcgatgagatggagggcatcttggacgaaagcttcggcgacagtgacgcctgtgtgcgccacttcactctgttgagggcgacgcattgctatgtcttccatgggcgaaagcccgatccatctggaatgtgacggtggcgtcctggatgtcactcccttcctaaaggcgtcacgtttgagtccgtcttggcctcgacgttgccttcggttgatgctttcgcttctcgacgtctggattgcgggtcgaggtgggattttttgaaacatgaagtcgaagctgccacattaggagatgtggctcgttaacgatgacatgaggcgaacctccttcttcgtggtttggattgttttggaggtcgagcaaaaaactggaggtgggtgttggatcaagatagttggtgaagaatcggagctgcctcgagtgtgggtgtgttgaggcttagcaacgatggcgtgtcacggtcttcctccttctgtgccaggttttaggtgtaggtgccttcgtgtttcttttgaccgtgtgcggcccgtctggtgaagttggagctgcccgtaccttgtgttgagctcggcaacggtgactctgtatgggctttgtgtgtggggttgccgctgcttatgttgtttgggcactctgtgtaagtttttggcccggtttttcttaaaactaggtcaattctaatcttcttcttaatggaaaggcagagctcctgtcattacattcaaaaaaaattaggcatgatcttatttattttttaaagtaggggaatacttgtttcaaactaatatactcttctacatctttggggtatcctcgattaattgttcaggtctgatttgaataaacataatgtaatatgtgtgtgtgtgcaagaataatacaacttatgataaagttagtgtggtgcaacaataagctaaacaattatcctaatagtaaacatgtgtattgatattccttttttttacgaataggttccatgtttttggaattggaacaaggtcacttgggttcaacatcagggtacaagttaagaaaggttcatctgtatcggaggttgttgttggtccagagaatagaactgttgtttctaaagacaactttctgagagtgaatctcattggtgattttggtggttataccagcatcccagcatttgaggacttctatcttgtgacccctaggaagagtgctggtagtggtgagccacaaaaccttggtgctgaatatagaaagtggatgctgttggagagagttcgttttacagacggtgtcgaatgtaacaagattggtgttggttatgaggctttccaaaaccaacctaacttttgtgcatcgccatttgagagctgtttgaacaatcagctatggacctttttggagtctgacaaaaaccggataagcatgagccgacagccccaatatgttgtgcagggaaggtttcagaggatcaatcaacatccagatgcaagtgttcattctttttctattggagtgacagaagttattaatagcaatttacggatagagctgagtgctgatgacatagaatacatgtatcagaggtatatttgttggccacggccctactaatttgaaattagcaagtacagacagatttatgtttatcaggtgttcatactcattggtgttcatactcatttcaatttagctattacaaccatatttatatttgttgaccacggccctactcttaaaattagatgctatccaaataacaagtgtccctttaaatctatgccatgtttgacaaacagtagggaaacaaacattggtactacaggtttcttctcaagtcctactctttacatttttatgttctttattaatatataggagaatgtctaatatgttgtgcttccacatcaggagtccagggaatataacagacattagtgttccagcatttgaagtcttaagtcaatatggtactgcaaaggtcacaactaagaatattggtacactggaggcttcgtataccttgacatttcactgctcaagtggcatcagttttatggaggagcagtactatatcctcaaaccgaatgaagagagtacccgtttattttacttgcacgcatctacagatcaagcagcaaagtatcaatgtacagctattctgaaggcgtcggattctagtgaactcgacagacaagaatgtgttttttctactacggctacagttcttgataatggaacacagattatcggttcaaatggctacaaattgggtttctttgacaccatcaaaggctatttggttagcttctgggattttctgattgatttaatcagtggcaaatcctgcaggctgaacaaatgtcggagcttttttgacttcagctgccatgcgcagtacagatgcataacctggctcgtcatgttggtgctgctactttttatgttacccgcaggcgcaattgtcctgtatcttcttcatcagaaaggcttcttcgacccagtatacgactggtgggatgacctgctgggggcggactaccgcgcgcaccggaggcacaagaaaggccgccgccaccaccatcaccaccacgaccaccatcaccaccggcaccaccaccaccacgggcactcgcacggccatgaccaccacccccacagtcaccaccacgcgcaccagaggagaaagatcgagcccagccaccaccacgtcctacacaggcagcagcccgggacagcggcagaaggccaccggcacaagcacgacccggcgctcggcgtgcagcacagggaggccgggcacttggggcacaagcgtcggcatggcaaagcggtggtcgcggaggacgccctggacctggagttcagggaacgaaggccatacgaggtcaggcatgccgggcacctgcaccgcgaccaccaccaccaccaccactcctgggaagtgtaggaatagttctgaccgtctgaactttaagacatctagcgtaagatgaagttggtgtaccgtgggcacgggacatgcccttttgcatgcatgcagtgagttagtgggtgtttaatttctagtaaactaatttgtatcgcttcattttatttcattttagtctttaatttgcttaatattgaaactaaaatttcatattcgacaaattagaaaataaaataaa

SEQ ID NO: 23131 - DNA, 4280 bp, Zea Mays
atggctcctcctcgcccccctctcccaaccgtactctccgtcctcctccttctcctcctcgcggccggcagcgcaggcggcgtggagatcctcgccaagtcccttttggagagctgcgttgccgactcgggcgcgggggggcgcctctcctgcgacagaaaggtagtggtcgacatggccgtccccagcggatccaacggcggtgaggcgtggctggtcgcgcaggtcgcgcacgttaacgacacaaagcaatcgaagaccataagaaatccccctgtcatcaccgtcaacaagggcgccgtgtttgcgctctacgccctcaactacatcagggatgttgcttacaaaccagaggaacagtatgttgagacacgcaaatgtgaaccagatgctggttctgatgttgttagagcttgtgaaagcctgtttgctgtccctgtggtcctaaccgccgtgtaccttcatcttgtggaaacgtttttgagaaaattttcaaaggaaaagctaatacggctcactgtctaagatttccaggtgactggcatgatcttgaagaaccaaaccataaatgcagaaagtggaggcccccgcgtcgcccccgcttgggcggcgctaaccgtcgtctcctcctcttcctcccctctctacctcgccgccgtcggagctagccggcgggttgttcgcccggctcgtgaggaaggcggcggtggggcgtttcggcgtgtcgtggctcgcggcggcggtggcctgtgctcgcgcgcacgccaacggcggtggcattgctgtgctccaacgcgtggccgaccggtttggtaagcatggcggtggtggtgacgaacaacagggcgagagcggagctggcgtggctgcagtggcgggagcaggtgccccggagttagctgatggcttgctcgcggcggcggtgtggctcacgcgcctgctcttccgtcgagtagtggcatccccggcaatcgctcttgaggctggctcgcggcgccgctcgcgtgttcgctgcgtgcgcggcaacacacgcggggaggagtgggctatgtgggctttggtcggcggcggatctggcattgtcggcggatctaggccccatcggcctagatatggcccaccctcaactgatctacgccttggcgatggttgtcattgcggggtgcatgttggtgcgcaacggaggcggtgcgcccggcgacagctggtttcgatgtcgcgggtgccagggccagtggcggtagctcaagctggtttcagctctggcgagtgggcagtgtggcgcacaaggcaaggtgttccctggttccatgtgcccaaccggaagggatggcagccggcgcagctttgcggctgctgcggcagccggcacggtgcccctctggaggggtgtgtgcggaggcaagggcggtggcgacgacagaggctgcatgctttgacctagggtcctggactagcgatgagatggagggcatcttggacgaaagcttcggcgacagtgacgcctgtgtgcgccacttcactctgttgagggcgacgcattgctatgtcttccatgggcgaaagcccgatccatctggaatgtgacggtggcgtcctggatgtcactcccttcctaaaggcgtcacgtttgagtccgtcttggcctcgacgttgccttcggttgatgctttcgcttctcgacgtctggattgcgggtcgaggtgggattttttgaaacatgaagtcgaagctgccacattaggagatgtggctcgttaacgatgacatgaggcgaacctccttcttcgtggtttggattgttttggaggtcgagcaaaaaactggaggtgggtgttggatcaagatagttggtgaagaatcggagctgcctcgagtgtgggtgtgttgaggcttagcaacgatggcgtgtcacggtcttcctccttctgtgccaggttttaggtgtaggtgccttcgtgtttcttttgaccgtgtgcggcccgtctggtgaagttggagctgcccgtaccttgtgttgagctcggcaacggtgactctgtatgggctttgtgtgtggggttgccgctgcttatgttgtttgggcactctgtgtaagtttttggcccggtttttcttaaaactaggtcaattctaatcttcttcttaatggaaaggcagagctcctgtcattacattcaaaaaaaattaggcatgatcttatttattttttaaagtaggggaatacttgtttcaaactaatatactcttctacatctttggggtatcctcgattaattgttcaggtctgatttgaataaacataatgtaatatgtgtgtgtgtgcaagaataatacaacttatgataaagttagtgtggtgcaacaataagctaaacaattatcctaatagtaaacatgtgtattgatattccttttttttacgaataggttccatgtttttggaattggaacaaggtcacttgggttcaacatcagggtacaagttaagaaaggttcatctgtatcggaggttgttgttggtccagagaatagaactgttgtttctaaagacaactttctgagagtgaatctcattggtgattttggtggttataccagcatcccagcatttgaggacttctatcttgtgacccctaggaagagtgctggtagtggtgagccacaaaaccttggtgctgaatatagaaagtggatgctgttggagagagttcgttttacagacggtgtcgaatgtaacaagattggtgttggttatgaggctttccaaaaccaacctaacttttgtgcatcgccatttgagagctgtttgaacaatcagctatggacctttttggagtctgacaaaaaccggataagcatgagccgacagccccaatatgttgtgcagggaaggtttcagaggatcaatcaacatccagatgcaagtgttcattctttttctattggagtgacagaagttattaatagcaatttacggatagagctgagtgctgatgacatagaatacatgtatcagaggagtccagggaatataacagacattagtgttccagcatttgaagtcttaagtcaatatggtactgcaaaggtcacaactaagaatattggtacactggaggcttcgtataccttgacatttcactgctcaagtggcatcagttttatggaggagcagtactatatcctcaaaccgaatgaagagagtacccgtttattttacttgcacgcatctacagatcaagcagcaaagtatcaatgtacagctattctgaaggcgtcggattctagtgaactcgacagacaagaatgtgttttttctactacggctacagttcttgataatggaacacagattatcggttcaaatggctacaaattgggtttctttgacaccatcaaaggctatttggttagcttctgggattttctgattgatttaatcagtggcaaatcctgcaggctgaacaaatgtcggagcttttttgacttcagctgccatgcgcagtacagatgcataacctggctcgtcatgttggtgctgctactttttatgttacccgcaggcgcaattgtcctgtatcttcttcatcagaaaggcttcttcgacccagtatacgactggtgggatgacctgctgggggcggactaccgcgcgcaccggaggcacaagaaaggccgccgccaccaccatcaccaccacgaccaccatcaccaccggcaccaccaccaccacgggcactcgcacggccatgaccaccacccccacagtcaccaccacgcgcaccagaggagaaagatcgagcccagccaccaccacgtcctacacaggcagcagcccgggacagcggcagaaggccaccggcacaagcacgacccggcgctcggcgtgcagcacagggaggccgggcacttggggcacaagcgtcggcatggcaaagcggtggtcgcggaggacgccctggacctggagttcagggaacgaaggccatacgaggtcaggcatgccgggcacctgcaccgcgaccaccaccaccaccaccactcctgggaagtgtaggaatagttctgaccgtctgaactttaagacatctagcgtaagatgaagttggtgtaccgtgggcacgggacatgcccttttgcatgcatgcagtgagttagtgggtgtttaatttctagtaaactaatttgtatcgcttcattttatttcattttagtctttaatttgcttaatattgaaactaaaatttcatattcgacaaattagaaaataaaataaa

SEQ ID NO: 23132 - DNA, 4320 bp, Zea Mays
atggctcctcctcgcccccctctcccaaccgtactctccgtcctcctccttctcctcctcgcggccggcagcgcaggcggcgtggagatcctcgccaagtcccttttggagagctgcgttgccgactcgggcgcgggggggcgcctctcctgcgacagaaaggtagtggtcgacatggccgtccccagcggatccaacggcggtgaggcgtggctggtcgcgcaggtcgcgcacgttaacgacacaaagcaatcgaagaccataagaaatccccctgtcatcaccgtcaacaagggcgccgtgtttgcgctctacgccctcaactacatcagggatgttgcttacaaaccagaggaacagtatgttgagacacgcaaatgtgaaccagatgctggttctgatgttgttagagcttgtgaaaggttacggtatgagaatggttctataattgagcactcagagcctgtttgctgtccctgtggtcctaaccgccgtgtaccttcatcttgtggaaacgtttttgagaaaattttcaaaggaaaagctaatacggctcactgtctaagatttccaggtgactggcatgatcttgaagaaccaaaccataaatgcagaaagtggaggcccccgcgtcgcccccgcttgggcggcgctaaccgtcgtctcctcctcttcctcccctctctacctcgccgccgtcggagctagccggcgggttgttcgcccggctcgtgaggaaggcggcggtggggcgtttcggcgtgtcgtggctcgcggcggcggtggcctgtgctcgcgcgcacgccaacggcggtggcattgctgtgctccaacgcgtggccgaccggtttggtaagcatggcggtggtggtgacgaacaacagggcgagagcggagctggcgtggctgcagtggcgggagcaggtgccccggagttagctgatggcttgctcgcggcggcggtgtggctcacgcgcctgctcttccgtcgagtagtggcatccccggcaatcgctcttgaggctggctcgcggcgccgctcgcgtgttcgctgcgtgcgcggcaacacacgcggggaggagtgggctatgtgggctttggtcggcggcggatctggcattgtcggcggatctaggccccatcggcctagatatggcccaccctcaactgatctacgccttggcgatggttgtcattgcggggtgcatgttggtgcgcaacggaggcggtgcgcccggcgacagctggtttcgatgtcgcgggtgccagggccagtggcggtagctcaagctggtttcagctctggcgagtgggcagtgtggcgcacaaggcaaggtgttccctggttccatgtgcccaaccggaagggatggcagccggcgcagctttgcggctgctgcggcagccggcacggtgcccctctggaggggtgtgtgcggaggcaagggcggtggcgacgacagaggctgcatgctttgacctagggtcctggactagcgatgagatggagggcatcttggacgaaagcttcggcgacagtgacgcctgtgtgcgccacttcactctgttgagggcgacgcattgctatgtcttccatgggcgaaagcccgatccatctggaatgtgacggtggcgtcctggatgtcactcccttcctaaaggcgtcacgtttgagtccgtcttggcctcgacgttgccttcggttgatgctttcgcttctcgacgtctggattgcgggtcgaggtgggattttttgaaacatgaagtcgaagctgccacattaggagatgtggctcgttaacgatgacatgaggcgaacctccttcttcgtggtttggattgttttggaggtcgagcaaaaaactggaggtgggtgttggatcaagatagttggtgaagaatcggagctgcctcgagtgtgggtgtgttgaggcttagcaacgatggcgtgtcacggtcttcctccttctgtgccaggttttaggtgtaggtgccttcgtgtttcttttgaccgtgtgcggcccgtctggtgaagttggagctgcccgtaccttgtgttgagctcggcaacggtgactctgtatgggctttgtgtgtggggttgccgctgcttatgttgtttgggcactctgtgtaagtttttggcccggtttttcttaaaactaggtcaattctaatcttcttcttaatggaaaggcagagctcctgtcattacattcaaaaaaaattaggcatgatcttatttattttttaaagtaggggaatacttgtttcaaactaatatactcttctacatctttggggtatcctcgattaattgttcaggtctgatttgaataaacataatgtaatatgtgtgtgtgtgcaagaataatacaacttatgataaagttagtgtggtgcaacaataagctaaacaattatcctaatagtaaacatgtgtattgatattccttttttttacgaataggttccatgtttttggaattggaacaaggtcacttgggttcaacatcagggtacaagttaagaaaggttcatctgtatcggaggttgttgttggtccagagaatagaactgttgtttctaaagacaactttctgagagtgaatctcattggtgattttggtggttataccagcatcccagcatttgaggacttctatcttgtgacccctaggaagagtgctggtagtggtgagccacaaaaccttggtgctgaatatagaaagtggatgctgttggagagagttcgttttacagacggtgtcgaatgtaacaagattggtgttggttatgaggctttccaaaaccaacctaacttttgtgcatcgccatttgagagctgtttgaacaatcagctatggacctttttggagtctgacaaaaaccggataagcatgagccgacagccccaatatgttgtgcagggaaggtttcagaggatcaatcaacatccagatgcaagtgttcattctttttctattggagtgacagaagttattaatagcaatttacggatagagctgagtgctgatgacatagaatacatgtatcagaggagtccagggaatataacagacattagtgttccagcatttgaagtcttaagtcaatatggtactgcaaaggtcacaactaagaatattggtacactggaggcttcgtataccttgacatttcactgctcaagtggcatcagttttatggaggagcagtactatatcctcaaaccgaatgaagagagtacccgtttattttacttgcacgcatctacagatcaagcagcaaagtatcaatgtacagctattctgaaggcgtcggattctagtgaactcgacagacaagaatgtgttttttctactacggctacagttcttgataatggaacacagattatcggttcaaatggctacaaattgggtttctttgacaccatcaaaggctatttggttagcttctgggattttctgattgatttaatcagtggcaaatcctgcaggctgaacaaatgtcggagcttttttgacttcagctgccatgcgcagtacagatgcataacctggctcgtcatgttggtgctgctactttttatgttacccgcaggcgcaattgtcctgtatcttcttcatcagaaaggcttcttcgacccagtatacgactggtgggatgacctgctgggggcggactaccgcgcgcaccggaggcacaagaaaggccgccgccaccaccatcaccaccacgaccaccatcaccaccggcaccaccaccaccacgggcactcgcacggccatgaccaccacccccacagtcaccaccacgcgcaccagaggagaaagatcgagcccagccaccaccacgtcctacacaggcagcagcccgggacagcggcagaaggccaccggcacaagcacgacccggcgctcggcgtgcagcacagggaggccgggcacttggggcacaagcgtcggcatggcaaagcggtggtcgcggaggacgccctggacctggagttcagggaacgaaggccatacgaggtcaggcatgccgggcacctgcaccgcgaccaccaccaccaccaccactcctgggaagtgtaggaatagttctgaccgtctgaactttaagacatctagcgtaagatgaagttggtgtaccgtgggcacgggacatgcccttttgcatgcatgcagtgagttagtgggtgtttaatttctagtaaactaatttgtatcgcttcattttatttcattttagtctttaatttgcttaatattgaaactaaaatttcatattcgacaaattagaaaataaaataaa

SEQ ID NO: 23133 - DNA, 2431 bp, Zea Mays
atggctcctcctcgcccccctctcccaaccgtactctccgtcctcctccttctcctcctcgcggccggcagcgcaggcggcgtggagatcctcgccaagtcccttttggagagctgcgttgccgactcgggcgcgggggggcgcctctcctgcgacagaaaggtagtggtcgacatggccgtccccagcggatccaacggcggtgaggcgtggctggtcgcgcaggtcgcgcacgttaacgacacaaagcaatcgaagaccataagaaatccccctgtcatcaccgtcaacaagggcgccgtgtttgcgctctacgccctcaactacatcagggatgttgcttacaaaccagaggaacagtatgttgagacacgcaaatgtgaaccagatgctggttctgatgttgttagagcttgtgaaaggttacggtatgagaatggttctataattgagcactcagagcctgtttgctgtccctgtggtcctaaccgccgtgtaccttcatcttgtggaaacgtttttgagaaaattttcaaaggaaaagctaatacggctcactgtctaagatttccaggtgactggttccatgtttttggaattggaacaaggtcacttgggttcaacatcagggtacaagttaagaaaggttcatctgtatcggaggttgttgttggtccagagaatagaactgttgtttctaaagacaactttctgagagtgaatctcattggtgattttggtggttataccagcatcccagcatttgaggacttctatcttgtgacccctaggaagagtgctggtagtggtgagccacaaaaccttggtgctgaatatagaaagtggatgctgttggagagagttcgttttacagacggtgtcgaatgtaacaagattggtgttggttatgaggctttccaaaaccaacctaacttttgtgcatcgccatttgagagctgtttgaacaatcagctatggacctttttggagtctgacaaaaaccggataagcatgagccgacagccccaatatgttgtgcagggaaggtttcagaggatcaatcaacatccagatgcaagtgttcattctttttctattggagtgacagaagttattaatagcaatttacggatagagctgagtgctgatgacatagaatacatgtatcagaggagtccagggaatataacagacattagtgttccagcatttgaagtcttaagtcaatatggtactgcaaaggtcacaactaagaatattggtacactggaggcttcgtataccttgacatttcactgctcaagtggcatcagttttatggaggagcagtactatatcctcaaaccgaatgaagagagtacccgtttattttacttgcacgcatctacagatcaagcagcaaagtatcaatgtacagctattctgaaggcgtcggattctagtgaactcgacagacaagaatgtgttttttctactacggctacagttcttgataatggaacacagattatcggttcaaatggctacaaattgggtttctttgacaccatcaaaggctatttggttagcttctgggattttctgattgatttaatcagtggcaaatcctgcaggctgaacaaatgtcggagcttttttgacttcagctgccatgcgcagtacagatgcataacctggctcgtcatgttggtgctgctactttttatgttacccgcaggcgcaattgtcctgtatcttcttcatcagaaaggcttcttcgacccagtatacgactggtgggatgacctgctgggggcggactaccgcgcgcaccggaggcacaagaaaggccgccgccaccaccatcaccaccacgaccaccatcaccaccggcaccaccaccaccacgggcactcgcacggccatgaccaccacccccacagtcaccaccacgcgcaccagaggagaaagatcgagcccagccaccaccacgtcctacacaggcagcagcccgggacagcggcagaaggccaccggcacaagcacgacccggcgctcggcgtgcagcacagggaggccgggcacttggggcacaagcgtcggcatggcaaagcggtggtcgcggaggacgccctggacctggagttcagggaacgaaggccatacgaggtcaggcatgccgggcacctgcaccgcgaccaccaccaccaccaccactcctgggaagtgtaggaatagttctgaccgtctgaactttaagacatctagcgtaagatgaagttggtgtaccgtgggcacgggacatgcccttttgcatgcatgcagtgagttagtgggtgtttaatttctagtaaactaatttgtatcgcttcattttatttcattttagtctttaatttgcttaatattgaaactaaaatttcatattcgacaaattagaaaataaaataaa

SEQ ID NO: 23134 - DNA, 4237 bp, Zea Mays
gtacgtattggtgatgtccctatttttttttattttgtatcaataattccttgacgcaatgtactgagttaactgaaataaaggttcatgtcttgactatgacttaatgacctaactgtaaatttctgaacatgactagtgactaacattatatgttatgtcaatcaggcatgatcttgaagaaccaaaccataaatgcagaaagtggaggcccccgcgtcgcccccgcttgggcggcgctaaccgtcgtctcctcctcttcctcccctctctacctcgccgccgtcggagctagccggcgggttgttcgcccggctcgtgaggaaggcggcggtggggcgtttcggcgtgtcgtggctcgcggcggcggtggcctgtgctcgcgcgcacgccaacggcggtggcattgctgtgctccaacgcgtggccgaccggtttggtaagcatggcggtggtggtgacgaacaacagggcgagagcggagctggcgtggctgcagtggcgggagcaggtgccccggagttagctgatggcttgctcgcggcggcggtgtggctcacgcgcctgctcttccgtcgagtagtggcatccccggcaatcgctcttgaggctggctcgcggcgccgctcgcgtgttcgctgcgtgcgcggcaacacacgcggggaggagtgggctatgtgggctttggtcggcggcggatctggcattgtcggcggatctaggccccatcggcctagatatggcccaccctcaactgatctacgccttggcgatggttgtcattgcggggtgcatgttggtgcgcaacggaggcggtgcgcccggcgacagctggtttcgatgtcgcgggtgccagggccagtggcggtagctcaagctggtttcagctctggcgagtgggcagtgtggcgcacaaggcaaggtgttccctggttccatgtgcccaaccggaagggatggcagccggcgcagctttgcggctgctgcggcagccggcacggtgcccctctggaggggtgtgtgcggaggcaagggcggtggcgacgacagaggctgcatgctttgacctagggtcctggactagcgatgagatggagggcatcttggacgaaagcttcggcgacagtgacgcctgtgtgcgccacttcactctgttgagggcgacgcattgctatgtcttccatgggcgaaagcccgatccatctggaatgtgacggtggcgtcctggatgtcactcccttcctaaaggcgtcacgtttgagtccgtcttggcctcgacgttgccttcggttgatgctttcgcttctcgacgtctggattgcgggtcgaggtgggattttttgaaacatgaagtcgaagctgccacattaggagatgtggctcgttaacgatgacatgaggcgaacctccttcttcgtggtttggattgttttggaggtcgagcaaaaaactggaggtgggtgttggatcaagatagttggtgaagaatcggagctgcctcgagtgtgggtgtgttgaggcttagcaacgatggcgtgtcacggtcttcctccttctgtgccaggttttaggtgtaggtgccttcgtgtttcttttgaccgtgtgcggcccgtctggtgaagttggagctgcccgtaccttgtgttgagctcggcaacggtgactctgtatgggctttgtgtgtggggttgccgctgcttatgttgtttgggcactctgtgtaagtttttggcccggtttttcttaaaactaggtcaattctaatcttcttcttaatggaaaggcagagctcctgtcattacattcaaaaaaaattaggcatgatcttatttattttttaaagtaggggaatacttgtttcaaactaatatactcttctacatctttggggtatcctcgattaattgttcaggtctgatttgaataaacataatgtaatatgtgtgtgtgtgcaagaataatacaacttatgataaagttagtgtggtgcaacaataagctaaacaattatcctaatagtaaacatgtgtattgatattccttttttttacgaataggttccatgtttttggaattggaacaaggtcacttgggttcaacatcagggtacaagttaagaaaggttcatctgtatcggtaggatttgaaattctgcataagagttccaactagtatcacgtgaggactagggcataaatcatcagattgctcatgccagtttcttgcttggttaagcatacattcccatgatctgtgctgagaaagttccacaaccttactatgttatttgtttattttgagatcgttcttctttctagaaactaaattatgaattttggtgtttacttatcaaaccaaagtttgttttaaaggggttttcctgccaatctgcagcagattttttgttatgtcagtatgtcactcacttcagaagtgtttttatatctttccccaattgcactgtaggaggttgttgttggtccagagaatagaactgttgtttctaaagacaactttctgagagtgaatctcattggtgattttggtggttataccagcatcccagcatttgaggacttctatcttgtgacccctaggaagagtgctggtagtggtgagccacaaaaccttggtgctgaatatagaaagtggatgctgttggagagagttcgttttacagacggtgtcgaatgtaacaagattggtgttggttatgaggctttccaaaaccaacctaacttttgtgcatcgccatttgagagctgtttgaacaatcagctatggacctttttggagtctgacaaaaaccggataagcatgagccgacagccccaatatgttgtgcagggaaggtttcagaggatcaatcaacatccagatgcaagtgttcattctttttctattggagtgacagaagttattaatagcaatttacggatagagctgagtgctgatgacatagaatacatgtatcagaggagtccagggaatataacagacattagtgttccagcatttgaagtcttaagtcaatatggtactgcaaaggtcacaactaagaatattggtacactggaggcttcgtataccttgacatttcactgctcaagtggcatcagttttatggaggagcagtactatatcctcaaaccgaatgaagagagtacccgtttattttacttgcacgcatctacagatcaagcagcaaagtatcaatgtacagctattctgaaggcgtcggattctagtgaactcgacagacaagaatgtgttttttctactacggctacagttcttgataatggaacacagattatcggttcaaatggctacaaattgggtttctttgacaccatcaaaggctatttggttagcttctgggattttctgattgatttaatcagtggcaaatcctgcaggctgaacaaatgtcggagcttttttgacttcagctgccatgcgcagtacagatgcataacctggctcgtcatgttggtgctgctactttttatgttacccgcaggcgcaattgtcctgtatcttcttcatcagaaaggcttcttcgacccagtatacgactggtgggatgacctgctgggggcggactaccgcgcgcaccggaggcacaagaaaggccgccgccaccaccatcaccaccacgaccaccatcaccaccggcaccaccaccaccacgggcactcgcacggccatgaccaccacccccacagtcaccaccacgcgcaccagaggagaaagatcgagcccagccaccaccacgtcctacacaggcagcagcccgggacagcggcagaaggccaccggcacaagcacgacccggcgctcggcgtgcagcacagggaggccgggcacttggggcacaagcgtcggcatggcaaagcggtggtcgcggaggacgccctggacctggagttcagggaacgaaggccatacgaggtcaggcatgccgggcacctgcaccgcgaccaccaccaccaccaccactcctgggaagtgtaggaatagttctgaccgtctgaactttaagacatctagcgtaagatgaagttggtgtaccgtgggcacgggacatgcccttttgcatgcatgcagtgagttagtgggtgtttaatttctagtaaactaatttgtatcgcttcattttatttcattttagtctttaatttgcttaatattgaaactaaaatttcatattcgacaaattagaaaataaaataaa

SEQ ID NO: 23135 - DNA, 1141 bp, Zea Mays
caatgttgcaaatatacgttcaatatgtaatcagagcagtactatatcctcaaaccgaatgaagagagtacccgtttattttacttgcacgcatctacagatcaagcagcaaagtatcaatgtacagctattctgaaggcgtcggattctagtgaactcgacagacaagaatgtgttttttctactacggctacagttcttgataatggaacacagattatcggttcaaatggctacaaattgggtttctttgacaccatcaaaggctatttggttagcttctgggattttctgattgatttaatcagtggcaaatcctgcaggctgaacaaatgtcggagcttttttgacttcagctgccatgcgcagtacagatgcataacctggctcgtcatgttggtgctgctactttttatgttacccgcaggcgcaattgtcctgtatcttcttcatcagaaaggcttcttcgacccagtatacgactggtgggatgacctgctgggggcggactaccgcgcgcaccggaggcacaagaaaggccgccgccaccaccatcaccaccacgaccaccatcaccaccggcaccaccaccaccacgggcactcgcacggccatgaccaccacccccacagtcaccaccacgcgcaccagaggagaaagatcgagcccagccaccaccacgtcctacacaggcagcagcccgggacagcggcagaaggccaccggcacaagcacgacccggcgctcggcgtgcagcacagggaggccgggcacttggggcacaagcgtcggcatggcaaagcggtggtcgcggaggacgccctggacctggagttcagggaacgaaggccatacgaggtcaggcatgccgggcacctgcaccgcgaccaccaccaccaccaccactcctgggaagtgtaggaatagttctgaccgtctgaactttaagacatctagcgtaagatgaagttggtgtaccgtgggcacgggacatgcccttttgcatgcatgcagtgagttagtgggtgtttaatttctagtaaactaatttgtatcgcttcattttatttcattttagtctttaatttgcttaatattgaaactaaaatttcatattcgacaaattagaaaataaaataaa

SEQ ID NO: 23136 - DNA, 2374 bp, Zea Mays
aatcgtttaaagtctgggatcacggcgggttaaagaaaatattagtttattttctctacgatcccctctcacttcaatcccaacgtgatcctaataagtgttgagaactgtttgatgataagggaaagcccttttgaagtgggttgttcagctcaaagacttcagccaacaggtcaccgcttcagagatcggaatcagaacacctgccgctcttcagtttgttgacgcaactcctctcctatcttctatctccctcgctccctcctcggcgtcgcgttggcaccgagccctcccgccatggcaaggccgctgcaggaagcgatcgataccttcatcagcatcacgggggcggacgaggccgtcgccgtacgcaagctcgaggaacatggtggtgaccttaatcgagcaataaattcgcatttcaatgatggagacagcatattgaatgggatcagtcaaaacaccatgcccactagtcatgatgatatgatggacctggatggaccccttgataatacatttcaaagatctttgttcccagagaattttcgtgacccttttgctctaatggatccaaattttcagcaccaattttttgacagggttggctccactgatggtgtcactcgtggaccgctagtttcacaccctagagaggtgagggagattcctatagaagttaaggatagtgatcctcaaacaagtccatctggccaggcccctgttattgaggatgttactggacatgagtcttcaaatggccttgaagttcatgaaactatcataattgatgatgaggacagcggattgttatctgcgccatctgctccacatgctagtgttcctagcaatacatcttctgagcccactgctcctccactggttcatgttaatgactatgatgatgacatagaagaggaaatgattagggcagcaattgaagcttcaaagaaggattctgaaggactggcaaatatagcagagcaaggagaccagcatcaagagggagtgaatttgggggaacattcttctgataaagcagtcatgagaaccacagatggaatagttgagagtactagcttcaggaaaggctggaacatctaggcaaccaatagatgaagagagcttccaagaggagactgaagatgtagaagaacaaccgctagttagacgtcgttctcggcgtgccccctctgagaacaccgagctagcacaaatgccgcacccaggagctagccctgttctgaacaatcaccagtctagtggaggtgatttcccatctgagtggggtggcatttcttctgaggaacatgatgaagctgttatgcttgaggctgcaatgttcggcggagtttttggaagaccaatgcatcctttctccatgccttctcacagaagctctacttattatccccaaataactcattcttcatcaccagcattagctgaacagcggttattaagagagcagcaggacgatgagtaccttgcgtcactacaagctgatcaagaaaaagagttgaaggccttacaggatgctgagctccatcgcctagaagaaacaactacaagagaagttgctcttaagaaacagaagcaagagcaggaggaaaggcgtaaaaagcaacttgaggaagaggagctagagtccagtctcgcttccaagcaagcatcattaccatcagaaccgcctccagacgcagagggtgccgtgacagttgtagtccgcatgcctgatggcagtcgacaggggcgttgctttctcaaaactgataaacttaagttcctatttgatttcttagacattgggaggatttgcaagccagggacctacagattggtgaggacatacccgaggcgcacgtttacgagcagtgagggggacgtatcgttcagtgatcttggcttaacaagcaagcaggaagccctatttctagaacagatcacagagtagaggataagtgtttaggcagcatggttatagacaccacagctggagccggagaattttttttacattttatacttgcagcttttgctagtaaaaactcggtctgtgaaaatggttgggttggtcgaagaaaggcgtcacgttacctatacaatgtggacagctacgcatggccgttcattcgcacgagtctcagagtggctctgtacatactgtcggttctgtgaatcaaagcaatgttgcgtatatataagcaaactgcgcagcaacgggagatgatgcgaaacggccgtcagagtttgctgctttcgcatcactggtcactggtgtctcagagacagaactggctgaacgtgtattgaaaaaactgagaaaaatgaaccaaacgaatgcgaatgtagacactggagttgacggtctttt

SEQ ID NO: 23137 - DNA, 2345 bp, Zea Mays
ggcgggttaaagaaaatattagtttattttctctacgatcccctctcacttcaatcccaacgtgatcctaataagtgttgagaactgtttgatgataagggaaagcccttttgaagtgggttgttcagctcaaagacttcagccaacaggtcaccgcttcagagatcggaatcagaacacctgccgctcttcagtttgttgacgcaactcctctcctatcttctatctccctcgctccctcctcggcgtcgcgttggcaccgagccctcccgccatggcaaggccgctgcaggaagcgatcgataccttcatcagcatcacgggggcggacgaggccgtcgccgtacgcaagctcgaggaacatggtggtgaccttaatcgagcaataaattcgcatttcaatgatggagacagcatattgaatgggatcagtcaaaacaccatgcccactagtcatgatgatatgatggacctggatggaccccttgataatacatttcaaagatctttgttcccagagaattttcgtgacccttttgctctaatggatccaaattttcagcaccaattttttgacagggttggctccactgatggtgtcactcgtggaccgctagtttcacaccctagagaggtgagggagattcctatagaagttaaggatagtgatcctcaaacaagtccatctggccaggcccctgttattgaggatgttactggacatgagtcttcaaatggccttgaagttcatgaaactatcataattgatgatgaggacagcggattgttatctgcgccatctgctccacatgctagtgttcctagcaatacatcttctgagcccactgctcctccactggttcatgttaatgactatgatgatgacatagaagaggaaatgattagggcagcaattgaagcttcaaagaaggattctgaaggactggcaaatatagcagagcaaggagaccagcatcaagagggagtgaatttgggggaacattcttctgataaagcagtcatgagaaccacagatggaatagttgagagcttcaggaaaggctggaacatctaggcaaccaatagatgaagagagcttccaagaggagactgaagatgtagaagaacaaccgctagttagacgtcgttctcggcgtgccccctctgagaacaccgagctagcacaaatgccgcacccaggagctagccctgttctgaacaatcaccagtctagtggaggtgatttcccatctgagtggggtggcatttcttctgaggaacatgatgaagctgttatgcttgaggctgcaatgttcggcggagtttttggaagaccaatgcatcctttctccatgccttctcacagaagctctacttattatccccaaataactcattcttcatcaccagcattagctgaacagcggttattaagagagcagcaggacgatgagtaccttgcgtcactacaagctgatcaagaaaaagagttgaaggccttacaggatgctgagctccatcgcctagaagaaacaactacaagagaagttgctcttaagaaacagaagcaagagcaggaggaaaggcgtaaaaagcaacttgaggaagaggagctagagtccagtctcgcttccaagcaagcatcattaccatcagaaccgcctccagacgcagagggtgccgtgacagttgtagtccgcatgcctgatggcagtcgacaggggcgttgctttctcaaaactgataaacttaagttcctatttgatttcttagacattgggaggatttgcaagccagggacctacagattggtgaggacatacccgaggcgcacgtttacgagcagtgagggggacgtatcgttcagtgatcttggcttaacaagcaagcaggaagccctatttctagaacagatcacagagtagaggataagtgtttaggcagcatggttatagacaccacagctggagccggagaattttttttacattttatacttgcagcttttgctagtaaaaactcggtctgtgaaaatggttgggttggtcgaagaaaggcgtcacgttacctatacaatgtggacagctacgcatggccgttcattcgcacgagtctcagagtggctctgtacatactgtcggttctgtgaatcaaagcaatgttgcgtatatataagcaaactgcgcagcaacgggagatgatgcgaaacggccgtcagagtttgctgctttcgcatcactggtcactggtgtctcagagacagaactggctgaacgtgtattgaaaaaactgagaaaaatgaaccaaacgaatgcgaatgtagacactggagttgacggtctttt

SEQ ID NO: 23138 - DNA, 2226 bp, Zea Mays
gcccttttgaagtgggttgttcagctcaaagacttcagccaacaggtcaccgcttcagagatcggaatcagaacacctgccgctcttcagtttgttgacgcaactcctctcctatcttctatctccctcgctccctcctcggcgtcgcgttggcaccgagccctcccgccatggcaaggccgctgcaggaagcgatcgataccttcatcagcatcacgggggcggacgaggccgtcgccgtacgcaagctcgaggaacatggtggtgaccttaatcgagcaataaattcgcatttcaatgatggagacagcatattgaatgggatcagtcaaaacaccatgcccactagtcatgatgatatgatggacctggatggaccccttgataatacatttcaaagatctttgttcccagagaattttcgtgacccttttgctctaatggatccaaattttcagcaccaattttttgacagggttggctccactgatggtgtcactcgtggaccgctagtttcacaccctagagaggtgagggagattcctatagaagttaaggatagtgatcctcaaacaagtccatctggccaggcccctgttattgaggatgttactggacatgagtcttcaaatggccttgaagttcatgaaactatcataattgatgatgaggacagcggattgttatctgcgccatctgctccacatgctagtgttcctagcaatacatcttctgagcccactgctcctccactggttcatgttaatgactatgatgatgacatagaagaggaaatgattagggcagcaattgaagcttcaaagaaggattctgaaggactggcaaatatagcagagcaaggagaccagcatcaagagggagtgaatttgggggaacattcttctgataaagcagtcatgagaaccacagatggaatagttgagagtactagcttcaggaaaggctggaacatctaggcaaccaatagatgaagagagcttccaagaggagactgaagatgtagaagaacaaccgctagttagacgtcgttctcggcgtgccccctctgagaacaccgagctagcacaaatgccgcacccaggagctagccctgttctgaacaatcaccagtctagtggaggtgatttcccatctgaggaacatgatgaagctgttatgcttgaggctgcaatgttcggcggagtttttggaagaccaatgcatcctttctccatgccttctcacagaagctctacttattatccccaaataactcattcttcatcaccagcattagctgaacagcggttattaagagagcagcaggacgatgagtaccttgcgtcactacaagctgatcaagaaaaagagttgaaggccttacaggatgctgagctccatcgcctagaagaaacaactacaagagaagttgctcttaagaaacagaagcaagagcaggaggaaaggcgtaaaaagcaacttgaggaagaggagctagagtccagtctcgcttccaagcaagcatcattaccatcagaaccgcctccagacgcagagggtgccgtgacagttgtagtccgcatgcctgatggcagtcgacaggggcgttgctttctcaaaactgataaacttaagttcctatttgatttcttagacattgggaggatttgcaagccagggacctacagattggtgaggacatacccgaggcgcacgtttacgagcagtgagggggacgtatcgttcagtgatcttggcttaacaagcaagcaggaagccctatttctagaacagatcacagagtagaggataagtgtttaggcagcatggttatagacaccacagctggagccggagaattttttttacattttatacttgcagcttttgctagtaaaaactcggtctgtgaaaatggttgggttggtcgaagaaaggcgtcacgttacctatacaatgtggacagctacgcatggccgttcattcgcacgagtctcagagtggctctgtacatactgtcggttctgtgaatcaaagcaatgttgcgtatatataagcaaactgcgcagcaacgggagatgatgcgaaacggccgtcagagtttgctgctttcgcatcactggtcactggtgtctcagagacagaactggctgaacgtgtattgaaaaaactgagaaaaatgaaccaaacgaatgcgaatgtagacactggagttgacggtctttt

SEQ ID NO: 23139 - DNA, 3114 bp, Zea Mays
gttagccttaataccctaaccttcttactgctccagcgaaggcacacagccgccgctgtttcttcatcttactcgtgctcggcacgcaggcgacggcgacggcggcggcgttcaggctcgggctctcagcgacggtatcagtggtctcccgcctctcgccagtcgcgtcgcgccctcgcctccgatcctctgcacaccgtccggtgaccttgtgttgtaagtttttccagcactgcttgctcacccatttctcaattagaaaacctcaaattctgtccctgagcaccaaatcaagaccataccaatttagtgagtccggacagatggcaatggccgcagttctggccaatggtgattcacagggtcgtcctcagaggaactatcaagttgttgttgctggcactcgtgacatgggcattgggaaggatggggtcttgccatggaagcttcctggtgatcttaaattctttaaagagcttacactaattacatctgatcctgtcaaaaagaatgcagttataatgggaaggaaaacatgggagagcattccagttaagtcaaggccattgcctggtcgtttgaatgtcatacttactcgatctggtagttttgattttgcaacagtagagaatgttgttatctgtggaagtatggagtctgccttagaactgctagcatcaactccatattgcttatcaattgagaaagtgtttgttataggaggcgggcaggtactgagagaatatcttaaaggacctgcatgtgaggctatccatctaactgacattcagtcgagcattgagtgtgacactttcatccctccggttgacttctcagtgttccagccatgagaatttctcttttctccccaagatggtatatgaccgccatgaggagtaccaatatctcaatcttgttgaagatattataaggtctggtgctcagaaaaacgacaggacaggaactggaacattgtcaaaatttgggtgtcagatgcggttcaacttaaggaaaaattttcctctgctgacaacaaagagggtattttggcgtggtgttgtcgaagaactcctttggttcatcagtggctcaacaaatgcaaaggttttgcaagagaagggtattcatatctgggatggcaatgcttcaagagagtatctcaacaggtatctatctattggatataagctgcaaacaagctatgtctctgttcttgatatctaagaagggcaggcttgtgcagtagtgagagcaaggcactaggtcgtgggttcgaactagcctctccacatttgtgagggaaaagcttgcctcggtttatcccttccctagacccccccactcatgtgggagcctttggccctggatctacctttttttctgttcttgatatctaatccacctggccatcttttctagtgttggcttggcacacagggaggaaggtgatttaggtccaatttatggatttcagtggcgtcactttggtgctgaatacactgacatgcatgctgactatacgggaaaaggttttgatcagctaatggatgtgattgacaagatcaagaatgatcctgacgaccgtcgaataattttgtcggcgtggaatccttcagatctcaagaagatggctcttcctccttgccacatgtttgcacaattctatgtggaaaatggggagctatcttgccagatgtatcaacgctctgcagacatggggcttggtgttccattcaacatcgcatcatattctctcctgacatacatgattgctcaagtttgtgatctttctcctggagattttgtccatgttataggggatgcccatgtctatagaaaccatgttcgagcactggaggagcaaattcagaagatgcctaaaccatttccaattttgaagataaatccttcaaaaaaggatatagattcttttatggcatcagacttcaagctggttggctatgacccccaccagaagatagagatgaaaatggcagtgtaatggtggcttggctggagccccccatcctatggactcggtggatgtaatcagtaggactggtactacataaaaattaaccggacaccgcactagcttgtttttggtgatggtgctgaatgttcagtgggagacgttttctctgatttatcagttgcgatttgcgtactatggtcgcttaagtcaactctacaaaatcggctcccttttatctggagccagttgattactcgattgcgagtgtgagggatgatctaggcataccctgttgcaagggcctactgggtgtgtgccggcccccatgaggctgtgacgattgcgccagtccagtacctcgtgagaattatgtaaccgaagttgccgtgtacctgggagaactcccgtactgtttggtgtttgattgcctatttcactttgcagtttggtcacaagataacgacttgctggtagggttttgagaacacattctgttgcgtttttcttgtgctttctggggggcagaaagcctagcgccgtgcttgccgaagtcgggctagcgcttgcacttgcagcggcggtgtacgatttggttggagcgtgaagtctcaagtgatcctgcaactgtcctgtcagttaaactcaaagatgttggaaattgtagtacgatgcgacccctgcgagttttgtagagttgaccctctttcatttcattgtttttttaattcaaatcaagtttcgttaggcctggattcctggttcctcttggctggagccatgagcctttgccatcgctcctagcactgtggatattcggagcttatatagcaaccatcgacttctgccttgccaatccagacacgttccatggatggcttggccgcttgggggagtggggattgagcaggcacaggctgggttgggcgccctgccgcttgttatagagtataagcagttactctattgcttccggtctacagggcttcaagggaggtggcttttaagcacgttcccgttccttcggttcctgggcgaagggtcactacctttgcctgtgtctcctgttaggttgagaacatgtataaatacattgctttattcaatgaagaaagacgcgatttttcatttctcagttttcc

SEQ ID NO: 23140 - DNA, 2674 bp, Zea Mays
cttataccccaaatcgaagcgttacccgtccgtgcttcagtgcgctgaagcgttgtaagtttttccagcactgcttgctcacccatttctcaattagaaaacctcaaattctgtccctgagcaccaaatcaagaccataccaatttagtgagtccggacagatggcaatggccgcagttctggccaatggtgattcacagggtcgtcctcagaggaactatcaagttgttgttgctggcactcgtgacatgggcattgggaaggatggggtcttgccatggaagcttcctgtagagaatgttgttatctgtggaagtatggagtctgccttagaactgctagcatcaactccatattgcttatcaattgagaaagtgtttgttataggaggcgggcaggtactgagagaatatcttaaaggacctgcatgtgaggctatccatctaactgacattcagtcgagcattgagtgtgacactttcatccctccggttgacttctcagtgttccagccatggtattcatctttcccggtgatagagagcaacattaggcattcgtttgtgtcttttgttcgtgttagaaagtcagtggcagaaactcatgagtcaaatggcaaggaatcaaccgaggttgataccaagaatgacaaatttgaaacagagaatttctcttttctccccaagatggtatatgaccgccatgaggagtaccaatatctcaatcttgttgaagatattataaggtctggtgctcagaaaaacgacaggacaggaactggaacattgtcaaaatttgggtgtcagatgcggttcaacttaaggaaaaattttcctctgctgacaacaaagagggtattttggcgtggtgttgtcgaagaactcctttggttcatcagtggctcaacaaatgcaaaggttttgcaagagaagggtattcatatctgggatggcaatgcttcaagagagtatctcaacagtgttggcttggcacacagggaggaaggtgatttaggtccaatttatggatttcagtggcgtcactttggtgctgaatacactgacatgcatgctgactatacgggaaaaggttttgatcagctaatggatgtgattgacaagatcaagaatgatcctgacgaccgtcgaataattttgtcggcgtggaatccttcagatctcaagaagatggctcttcctccttgccacatgtttgcacaattctatgtggaaaatggggagctatcttgccagatgtatcaacgctctgcagacatggggcttggtgttccattcaacatcgcatcatattctctcctgacatacatgattgctcaagtttgtgatctttctcctggagattttgtccatgttataggggatgcccatgtctatagaaaccatgttcgagcactggaggagcaaattcagaagatgcctaaaccatttccaattttgaagataaatccttcaaaaaaggatatagattcttttatggcatcagacttcaagctggttggctatgacccccaccagaagatagagatgaaaatggcagtgtaatggtggcttggctggagccccccatcctatggactcggtggatgtaatcagtaggactggtactacataaaaattaaccggacaccgcactagcttgtttttggtgatggtgctgaatgttcagtgggagacgttttctctgatttatcagttgcgatttgcgtactatggtcgcttaagtcaactctacaaaatcggctcccttttatctggagccagttgattactcgattgcgagtgtgagggatgatctaggcataccctgttgcaagggcctactgggtgtgtgccggcccccatgaggctgtgacgattgcgccagtccagtacctcgtgagaattatgtaaccgaagttgccgtgtacctgggagaactcccgtactgtttggtgtttgattgcctatttcactttgcagtttggtcacaagataacgacttgctggtagggttttgagaacacattctgttgcgtttttcttgtgctttctggggggcagaaagcctagcgccgtgcttgccgaagtcgggctagcgcttgcacttgcagcggcggtgtacgatttggttggagcgtgaagtctcaagtgatcctgcaactgtcctgtcagttaaactcaaagatgttggaaattgtagtacgatgcgacccctgcgagttttgtagagttgaccctctttcatttcattgtttttttaattcaaatcaagtttcgttaggcctggattcctggttcctcttggctggagccatgagcctttgccatcgctcctagcactgtggatattcggagcttatatagcaaccatcgacttctgccttgccaatccagacacgttccatggatggcttggccgcttgggggagtggggattgagcaggcacaggctgggttgggcgccctgccgcttgttatagagtataagcagttactctattgcttccggtctacagggcttcaagggaggtggcttttaagcacgttcccgttccttcggttcctgggcgaagggtcactacctttgcctgtgtctcctgttaggttgagaacatgtataaatacattgctttattcaatgaagaaagacgcgatttttcatttctcagttttcc

SEQ ID NO: 23141 - DNA, 3536 bp, Zea Mays
gctagtgctagtgccagtgccagtccgtttgagcatttgtaattgtaacaatggtccaagactccttgttgctagctatatatacacacgcgtgcagaagtgcatatgcactctcgtgcacaagactagcagagagaacataatccaaagatgggctggagaccacacgttgtctctgcgtcatcatccgcactagtgcttcagttcctcgtgctgctgctgcccctgcccctgcccctgctgtccgccgatgcatcgtcaagccaaacgacgacgacgatctacgtcgtgtacatgggcgagaagaagcacgacgatccttccgtcgtcatggcgtcgcaccatgccgcgctgacctccgttcttgggagcaaggatgaagccctccgttcgatagtctacagctacaagcacggattctctggtttcgcggcgaagctcacccagccccaagcggaggagcttacaaaataccctggagtcgtgagcgtgaagccaaacgcgtaccaccacgtgcacacgacccggagctgggattttcttggcatgagctacggcgaatcgccgtcgttgtcgtcgtcgtcgcggctcctcaggaaggccaagtatggcgaagatgtcatcgtcggcgtcatagactcaggcatctggccggaatccccgagcttcgacgacagcgggtacggccccgtgccgaaacggtggaaaggcgtgtgccagaccggccaggcgttcaacgcgagcaactgcaaccggaaggtcatcggcgcgcggtggtacggcgccgacgtcagcgaggaggacctcaaggccgagtacaggtcggcgcgggacgccaacggccacggcacgcacacggcctctacgatcgccggctcgccggtgcggggcgcgagccacgctggcggcggcctagccgctggcatagcgcgcggaggggcaccgcgcgcgcggctggcgatatacaaggtctgccacgacgtcggcggcggcacgagctgcggcgacgcgtcgatcctcgcggccctcgacgccgccattggggatggcgtcgacgtgctatccttgtcgctgggaggaggcagtgacgaggtctacaggacgttgcacgtcgtggcggccgggatcaccgtggtgttctccgcagggaacgatggcccagtgccgcagtccgtcaccaacgccctgccgtggctcgtcacggtggcggccaccaccgtggatcgcaccttcccgacagtcgtcacgctcggcgacggagagacgaagctggtggtatgtatgactcgtgatttaagagtgtgtttggtttaacttttagctttaattttttcgtcctaaaatcaaaagtcaaacaaaaagctggatctagaaaatatttttttctaaaaactgatttttttcgtagtacaaaattgaaagcatcactaaacctacttttagtagcttttggatagaactgtgaaaacatatatcaaagatcttttaacggattttgtaaaactgatgtgagctgtgatctattaaacctacgtaggtccgaggaggccctcgctcatttctcttttgtaagtaatcgagtctagatttttactataaagtccactgctcagcgccactcaaatgtctttggtgtagcatttttgtgtccattcttgcaattatgtccccactctgattttgttctgggtctgcacatggttgttgaggtatttaatttgagagacaatataattaaaatataaaacgaaaggtacatctgttttaactgcatacaaataaagttataactcacgagagataatgttttttagtttatcaaagtgggtgaataagagaaataaaaaaaatacacgcgaaaagagacgtacgcacgtgtattttgacgagaatacgcgatggacaataaaagtaaagaaaatcgcaaataattaataaaaggcgcacagaataagtatattacatgcatgttgtaaagcagataaattaaagaatatttacgtgtgatgacgagcaaaaacatgagtctcttgcatgcaggggcaatcattgtattaccgcaaccgatcggcggcggcatcgacgagcaacgacgacttcgcttggcgccatttgatggctttcactggctgcgacgacgcggagaagctgcggtcggaaaacatcaccgggaaaatcatggtatgccgagcgccggagttcaagtccaactatcctcccacggcgcagtttagctgggccagccgagccgccatcgccggcggggccaagggcgtcatcttcgagcagtacagtaccgacgtcctcgacggccaggcctcctgccaaggccacctgccctgcgtcgtcgtggacaaagaaaccatatacacgatcctaaatagcgacagcaatgtggccaggatttcgccggcggcgaccatggtcgggccccaggtcgcctcaccgaggatcgcgacgttctcgtcgaggggccccagcgcagagttcccctccgtgctcaagcccgacatagctgcccctggagtgagcatcttggcagccaagcgtgactcgtacgtgctcctgtctgggacatccatggcatgccctcatgtctccgcagtcgtcgccttgctcaagtcggttcacccggactggtcacctgccatgatcaagtctgccattgttaccacagcgtcggtgaccgatcgattcggcctgccaatccaagccaactcggtgcaaaggaaaccggccgacgccttcgacatgggcggcggcctcatagcgccggacagggccatggaccccggcctagtgtacgacatccagccggaggagtacaaaagcttggacgaccgcgtcgaccgcctcaacctcccgtccatcgccgtgcccaacctcatgtacgactccgtcacggtctcgcgcaccgtcaccaacgtcgggccggtggaggcgacgtaccgggccgtggtcgaggcgccggccggcgtggcgatggacgtggcgccgccggtgatcgccttcgagagaggcggcgtcaggaacgccacgttcaaggtgacgttcgtggcgaagcagagagtgcagggcggctacgcgtttgggagcctgacgtggctggacgacgccaagcggcactcggtaaggatccccgtcgccgttcggaccgtcgtccgggacttcgtcgccgatgtgtctcgatgatgaacactgaacgatgtgtctgtcaaagaagaacaccgtctcgatgatcgtccatatatgcgacactgtgtcactgtgtgtgaacactgaacaacgtgtcaaaactgaacttatgttgccaatttatttgcaagcaacaaggcgctcccagctgatcttgtgcctttatgcagtttatacagttcaaataaactatgaggctcagcctagaattcattacaaagcataattattgagcgagagacccgatcgatgatagttttgtctgtaattcatacatgggcactctcctatttgcttgcatgcttcgttgcaaatacaaacaagttttatgtggatttgtg

SEQ ID NO: 23142 - DNA, 2737 bp, Zea Mays
gtaattgtaacaatggtccaagactccttgttgctagctatatatacacacgcgtgcagaagtgcatatgcactctcgtgcacaagactagcagagagaacataatccaaagatgggctggagaccacacgttgtctctgcgtcatcatccgcactagtgcttcagttcctcgtgctgctgctgcccctgcccctgcccctgctgtccgccgatgcatcgtcaagccaaacgacgacgacgatctacgtcgtgtacatgggcgagaagaagcacgacgatccttccgtcgtcatggcgtcgcaccatgccgcgctgacctccgttcttgggaggtagcaaggatgaagccctccgttcgatagtctacagctacaagcacggattctctggtttcgcggcgaagctcacccagccccaagcggaggagcttacaaaataccctggagtcgtgagcgtgaagccaaacgcgtaccaccacgtgcacacgacccggagctgggattttcttggcatgagctacggcgaatcgccgtcgttgtcgtcgtcgtcgcggctcctcaggaaggccaagtatggcgaagatgtcatcgtcggcgtcatagactcaggcatctggccggaatccccgagcttcgacgacagcgggtacggccccgtgccgaaacggtggaaaggcgtgtgccagaccggccaggcgttcaacgcgagcaactgcaaccggaaggtcatcggcgcgcggtggtacggcgccgacgtcagcgaggaggacctcaaggccgagtacaggtcggcgcgggacgccaacggccacggcacgcacacggcctctacgatcgccggctcgccggtgcggggcgcgagccacgctggcggcggcctagccgctggcatagcgcgcggaggggcaccgcgcgcgcggctggcgatatacaaggtctgccacgacgtcggcggcggcacgagctgcggcgacgcgtcgatcctcgcggccctcgacgccgccattggggatggcgtcgacgtgctatccttgtcgctgggaggaggcagtgacgaggtctacaggacgttgcacgtcgtggcggccgggatcaccgtggtgttctccgcagggaacgatggcccagtgccgcagtccgtcaccaacgccctgccgtggctcgtcacggtggcggccaccaccgtggatcgcaccttcccgacagtcgtcacgctcggcgacggagagacgaagctggtggggcaatcattgtattaccgcaaccgatcggcggcggcatcgacgagcaacgacgacttcgcttggcgccatttgatggctttcactggctgcgacgacgcggagaagctgcggtcggaaaacatcaccgggaaaatcatggtatgccgagcgccggagttcaagtccaactatcctcccacggcgcagtttagctgggccagccgagccgccatcgccggcggggccaagggcgtcatcttcgagcagtacagtaccgacgtcctcgacggccaggcctcctgccaaggccacctgccctgcgtcgtcgtggacaaagaaaccatatacacgatcctaaatagcgacagcaatgtggccaggatttcgccggcggcgaccatggtcgggccccaggtcgcctcaccgaggatcgcgacgttctcgtcgaggggccccagcgcagagttcccctccgtgctcaagcccgacatagctgcccctggagtgagcatcttggcagccaagcgtgactcgtacgtgctcctgtctgggacatccatggcatgccctcatgtctccgcagtcgtcgccttgctcaagtcggttcacccggactggtcacctgccatgatcaagtctgccattgttaccacagcgtcggtgaccgatcgattcggcctgccaatccaagccaactcggtgcaaaggaaaccggccgacgccttcgacatgggcggcggcctcatagcgccggacagggccatggaccccggcctagtgtacgacatccagccggaggagtacaaaagcttggacgaccgcgtcgaccgcctcaacctcccgtccatcgccgtgcccaacctcatgtacgactccgtcacggtctcgcgcaccgtcaccaacgtcgggccggtggaggcgacgtaccgggccgtggtcgaggcgccggccggcgtggcgatggacgtggcgccgccggtgatcgccttcgagagaggcggcgtcaggaacgccacgttcaaggtgacgttcgtggcgaagcagagagtgcagggcggctacgcgtttgggagcctgacgtggctggacgacgccaagcggcactcggtaaggatccccgtcgccgttcggaccgtcgtccgggacttcgtcgccgatgtgtctcgatgatgaacactgaacgatgtgtctgtcaaagaagaacaccgtctcgatgatcgtccatatatgcgacactgtgtcactgtgtgtgaacactgaacaacgtgtcaaaactgaacttatgttgccaatttatttgcaagcaacaaggcgctcccagctgatcttgtgcctttatgcagtttatacagttcaaataaactatgaggctcagcctagaattcattacaaagcataattattgagcgagagacccgatcgatgatagttttgtctgtaattcatacatgggcactctcctatttgcttgcatgcttcgttgcaaatacaaacaagttttatgtggatttgtg

SEQ ID NO: 23143 - DNA, 2191 bp, Zea Mays
gtaattgtaacaatggtccaagactccttgttgctagctatatatacacacgcgtgcagaagtgcatatgcactctcgtgcacaagactagcagagagaacataatccaaagatgggctggagaccacacgttgtctctgcgtcatcatccgcactagtgcttcagttcctcgtgctgctgctgcccctgcccctgcccctgctgtccgccgatgcatcgtcaagccaaacgacgacgacgatctacgtcgtgtacatgggcgagaagaagcacgacgatccttccgtcgtcatggcgtcgcaccatgccgcgctgacctccgttcttgggaggtagcaaggatgaagccctccgttcgatagtctacagctacaagcacggattctctggtttcgcggcgaagctcacccagccccaagcggaggagcttacaaaataccctggagtcgtgagcgtgaagccaaacgcgtaccaccacgtgcacacgacccggagctgggattttcttggcatgagctacggcgaatcgccgtcgttgtcgtcgtcgtcgcggctcctcaggaaggccaagtatggcgaagatgtcatcgtcggcgtcatagactcaggcatctggccggaatccccgagcttcgacgacagcgggtacggccccgtgccgaaacggtggaaaggcgtgtgccagaccggccaggcgttcaacgcgagcaactgcaaccgatcggcggcggcatcgacgagcaacgacgacttcgcttggcgccatttgatggctttcactggctgcgacgacgcggagaagctgcggtcggaaaacatcaccgggaaaatcatggtatgccgagcgccggagttcaagtccaactatcctcccacggcgcagtttagctgggccagccgagccgccatcgccggcggggccaagggcgtcatcttcgagcagtacagtaccgacgtcctcgacggccaggcctcctgccaaggccacctgccctgcgtcgtcgtggacaaagaaaccatatacacgatcctaaatagcgacagcaatgtggccaggatttcgccggcggcgaccatggtcgggccccaggtcgcctcaccgaggatcgcgacgttctcgtcgaggggccccagcgcagagttcccctccgtgctcaagcccgacatagctgcccctggagtgagcatcttggcagccaagcgtgactcgtacgtgctcctgtctgggacatccatggcatgccctcatgtctccgcagtcgtcgccttgctcaagtcggttcacccggactggtcacctgccatgatcaagtctgccattgttaccacagcgtcggtgaccgatcgattcggcctgccaatccaagccaactcggtgcaaaggaaaccggccgacgccttcgacatgggcggcggcctcatagcgccggacagggccatggaccccggcctagtgtacgacatccagccggaggagtacaaaagcttggacgaccgcgtcgaccgcctcaacctcccgtccatcgccgtgcccaacctcatgtacgactccgtcacggtctcgcgcaccgtcaccaacgtcgggccggtggaggcgacgtaccgggccgtggtcgaggcgccggccggcgtggcgatggacgtggcgccgccggtgatcgccttcgagagaggcggcgtcaggaacgccacgttcaaggtgacgttcgtggcgaagcagagagtgcagggcggctacgcgtttgggagcctgacgtggctggacgacgccaagcggcactcggtaaggatccccgtcgccgttcggaccgtcgtccgggacttcgtcgccgatgtgtctcgatgatgaacactgaacgatgtgtctgtcaaagaagaacaccgtctcgatgatcgtccatatatgcgacactgtgtcactgtgtgtgaacactgaacaacgtgtcaaaactgaacttatgttgccaatttatttgcaagcaacaaggcgctcccagctgatcttgtgcctttatgcagtttatacagttcaaataaactatgaggctcagcctagaattcattacaaagcataattattgagcgagagacccgatcgatgatagttttgtctgtaattcatacatgggcactctcctatttgcttgcatgcttcgttgcaaatacaaacaagttttatgtggatttgtg

SEQ ID NO: 23144 - DNA, 971 bp, Zea Mays
gtccccgtctccgccgcgtttccggaggctgtggccgtgaccactgaaatacaagaggagattcttcgcgagatgggagtagatccaagttttggtattggttgcctaggaaaggtgaatgttgtttacaaaaatgacaaggacttgatgattaaattctatcaatttgttgccaaagaagaaatggctattgatgaagctgagcttgaacccagagaattggctgaaaaactacatgctcaacaaataatgcaagaaaagcaactgaacatgctagttgaaatgaggaaatatagccgagagagccaatctgtcatacttgggactttgcacaaagaattggaagaagctaattttgacatcaatgcatcgatcttgagcccagagcaaatgcaagagattgttcaaaagtgatatatttccaacaaatgagatcagtacctgccttgtctacctttgtggtgcttgtgtctacctttgtataaattgctaaaaatagcaagcactcctgtctatatgagaagtgtagctgttacaagtaaccctgtagaacatattgatcgtgcaaagatagttcacagggatgtaaaacattctgaattttacaaacataatactttttgtggatgctactttcttagcttgaatatggtcatgtaaaccactacagacaatactgtttacagagtgaagtttaaaatataacatgtgataggagagctgttggagacaaccttatccttttgggagttcaaatattgatgcacactagaagcaatcttgaaacaggaagaagacatgtaataaaatattcttcataaattttcttagatttgttcagtcttgcatgatagattgtgttatggcagctgtgtaatgtctattgtaatgagttgtatttgtgtaatgggcttaggcccaactacttatataaatatctctctcaaccttggttagggttagggttttag

SEQ ID NO: 23145 - DNA, 970 bp, Zea Mays
cgttgggtggcggttcttgaaatgaggctgtggccgtgaccactgaaatacaagaggagattcttcgcgagatgggagtagatccaagttttggtattggttgcctaggaaaggtgaatgttgtttacaaaaatgacaaggacttgatgattaaattctatcaatttgttgccaaagaagaaatggctattgatgaagctgagcttgaacccagagaattggctgaaaaactacatgctcaacaaataatgcaagaaaagcaactgaacatgctagttgaaatgaggaaatatagccgagagagccaatctgtcatacttgggactttgcacaaagaattggaagaagctaattttgacatcaatgcatcgatcttgagcccagagcaaatgcaagagattgttcaaaagtgatatatttccaacaaatgagatcagtacctgccttgtctacctttgtggtgcttgtgtctacctttgtataaattgctaaaaatagcaagcactcctgtctatatgagaagtgtagctgttacaagtaaccctgtagaacatattgatcgtgcaaagatagttcacagggatgtaaaacattctgaattttacaaacataatactttttgtggatgctactttcttagcttgaatatggtcatgtaaaccactacagacaatactgtttacagagtgaagtttaaaatataacatgtgataggagagctgttggagacaaccttatccttttgggagttcaaatattgatgcacactagaagcaatcttgaaacaggaagaagacatgtaataaaatattcttcataaattttcttagatttgttcagtcttgcatgatagattgtgttatggcagctgtgtaatgtctattgtaatgagttgtatttgtgtaatgggcttaggcccaactacttatataaatatctctctcaaccttggttagggttagggttttag

SEQ ID NO: 23146 - DNA, 964 bp, Zea Mays
cataaagaaagaactgcaatggaacacgtgagctattggccatattatcatatctacagctactgatatcatgagatccaagttttggtattggttgcctaggaaaggtgaatgttgtttacaaaaatgacaaggacttgatgattaaattctatcaatttgttgccaaagaagaaatggctattgatgaagctgagcttgaacccagagaattggctgaaaaactacatgctcaacaaataatgcaagaaaagcaactgaacatgctagttgaaatgaggaaatatagccgagagagccaatctgtcatacttgggactttgcacaaagaattggaagaagctaattttgacatcaatgcatcgatcttgagcccagagcaaatgcaagagattgttcaaaagtgatatatttccaacaaatgagatcagtacctgccttgtctacctttgtggtgcttgtgtctacctttgtataaattgctaaaaatagcaagcactcctgtctatatgagaagtgtagctgttacaagtaaccctgtagaacatattgatcgtgcaaagatagttcacagggatgtaaaacattctgaattttacaaacataatactttttgtggatgctactttcttagcttgaatatggtcatgtaaaccactacagacaatactgtttacagagtgaagtttaaaatataacatgtgataggagagctgttggagacaaccttatccttttgggagttcaaatattgatgcacactagaagcaatcttgaaacaggaagaagacatgtaataaaatattcttcataaattttcttagatttgttcagtcttgcatgatagattgtgttatggcagctgtgtaatgtctattgtaatgagttgtatttgtgtaatgggcttaggcccaactacttatataaatatctctctcaaccttggttagggttagggttttag

SEQ ID NO: 23147 - DNA, 924 bp, Zea Mays
caagaccaaatatcgcgaggcaaagggaacaacatatccaagttttggtattggttgcctaggaaaggtgaatgttgtttacaaaaatgacaaggacttgatgattaaattctatcaatttgttgccaaagaagaaatggctattgatgaagctgagcttgaacccagagaattggctgaaaaactacatgctcaacaaataatgcaagaaaagcaactgaacatgctagttgaaatgaggaaatatagccgagagagccaatctgtcatacttgggactttgcacaaagaattggaagaagctaattttgacatcaatgcatcgatcttgagcccagagcaaatgcaagagattgttcaaaagtgatatatttccaacaaatgagatcagtacctgccttgtctacctttgtggtgcttgtgtctacctttgtataaattgctaaaaatagcaagcactcctgtctatatgagaagtgtagctgttacaagtaaccctgtagaacatattgatcgtgcaaagatagttcacagggatgtaaaacattctgaattttacaaacataatactttttgtggatgctactttcttagcttgaatatggtcatgtaaaccactacagacaatactgtttacagagtgaagtttaaaatataacatgtgataggagagctgttggagacaaccttatccttttgggagttcaaatattgatgcacactagaagcaatcttgaaacaggaagaagacatgtaataaaatattcttcataaattttcttagatttgttcagtcttgcatgatagattgtgttatggcagctgtgtaatgtctattgtaatgagttgtatttgtgtaatgggcttaggcccaactacttatataaatatctctctcaaccttggttagggttagggttttag

SEQ ID NO: 23148 - DNA, 318 bp, Zea Mays
ctctcgagcgccataccagtttggaaggagaccggaaccctaaggctagtgtcgagaggcgacattgctggcatacgctctacgacgacaagggcctcgacgttgggctgaggagttcggcaaggttgcgcgctgggcgcctggggtcttcccctgcgtgtacggagactcgagaggaggacttcatcgccatacgttgaagaccggaccggactgccgcggtgcgaggactgctcgcccctgtgtcggaccatgacaagcaagcaaccgaggatcctggtactcagcaggtggaaaatactgagcaggaactcgttg

SEQ ID NO: 23149 - DNA, 307 bp, Zea Mays
gagcgccataccagtttggaaggagaccggaaccctaaggctagtgtcgagaggcgacattgctggcatacgctctacgacgacaagggcctcgacgttgggctgaggagttcggcaaggttgcgcgctgggcgcctggggtcttcccctgcgtgtacggagactcgagaggaggacttcatcgccatacgttgaagaccggaccggactgccgcggtgcgaggactgctcgcccctgtgtcggaccatggtgaagagcaggtagcccaggaggaggactactacgaggagtacaaggaagtctagg

SEQ ID NO: 23150 - DNA, 698 bp, Zea Mays
ccagttctctcaaccttccccagtttggaagggacacgagcggatcagaacgaccgcgccctccgtcgccaccaccatccgctctgtcgccgctctgctgccgctccatcgtcgtccacactaatgccatccgctctaccgccgctccatcgtcgtccttcctcgatgcaatcgcgagcgatacgtgaggcgacagtgccctccaccaccgccatcgtctcagatttgtcgtcctccaccgccatctctgccctcagtttgctgtcctccaccgtcgtcttccgtggcacgatgtacagtacaatgttgtctccaagacctagtacatggtcttctccaagatccagtacaaggtcgtctcctccaagatccgaaccccaatgctagtgagagtggaggcagcacatgaaaccaacatggagaagaaaaatgaaatggcattccacatgaagcttgtgaaaaaagagttaaactcgtaatttattctagtgccgaagttcctaaccaagagacttgtattccatttttatattatattgtctatctatatgtgtgaatagaggcaaccttatatgatgtgatgatggatgaattagcttcgatggatattatatggtattcaaattaaactttacatgaatcatatgtggtgcattatttttggattttagtgatgttcattgtgtttctgattttcc

SEQ ID NO: 23151 - DNA, 579 bp, Zea Mays
agtttggaagggacacgagcggatcagaacgaccgcgccctccgtcgccaccaccatccgctctgtcgccgctctgctgccgctccatcgtcgtccacactaatgccatccgctctaccgccgctccatcgtcgtccttcctcgatgcaatcgcgagcgatacgtgaggcgacagtgccctccaccaccgccatcgtctcagatttgtcgtcctccaccgccatctctgccctcagtttgctgtcctccaccgtcgtcttccgtggcacgatagtggaggcagcacatgaaaccaacatggagaagaaaaatgaaatggcattccacatgaagcttgtgaaaaaagagttaaactcgtaatttattctagtgccgaagttcctaaccaagagacttgtattccatttttatattatattgtctatctatatgtgtgaatagaggcaaccttatatgatgtgatgatggatgaattagcttcgatggatattatatggtattcaaattaaactttacatgaatcatatgtggtgcattatttttggattttagtgatgttcattgtgtttctgattttcc

SEQ ID NO: 23152 - DNA, 755 bp, Zea Mays
agtttggaagggacacgagcggatcagaacgaccgcgccctccgtcgccaccaccatccgctctgtcgccgctctgctgccgctccatcgtcgtccacactaatgccatccgctctaccgccgctccatcgtcgtccttcctcgatgcaatcgcgagcgatacgtgaggcgacagtgccctccaccaccgccatcgtctcagatttgtcgtcctccaccgccatctctgccctcagtttgctgtcctccaccgtcgtcttccgtggcacgatgtacagtacaatgttgtctccaagacctagtacatggtcttctccaagatccagtacaaggtcgtctcctccaagatccgaaccccaatgctagtgaggaaggcagactcctctattgttggtgactttttagctactgtgcatgcaaataggaaaacattcagatttttttagcgagtggaggcagcacatgaaaccaacatggagaagaaaaatgaaatggcattccacatgaagcttgtgaaaaaagagttaaactcgtaatttattctagtgccgaagttcctaaccaagagacttgtattccatttttatattatattgtctatctatatgtgtgaatagaggcaaccttatatgatgtgatgatggatgaattagcttcgatggatattatatggtattcaaattaaactttacatgaatcatatgtggtgcattatttttggattttagtgatgttcattgtgtttctgattttcc

SEQ ID NO: 23153 - DNA, 347 bp, Zea Mays
tgcatgaactctgatgcacctagcgagttccagagtcctgagtggaggcagcacatgaaaccaacatggagaagaaaaatgaaatggcattccacatgaagcttgtgaaaaaagagttaaactcgtaatttattctagtgccgaagttcctaaccaagagacttgtattccatttttatattatattgtctatctatatgtgtgaatagaggcaaccttatatgatgtgatgatggatgaattagcttcgatggatattatatggtattcaaattaaactttacatgaatcatatgtggtgcattatttttggattttagtgatgttcattgtgtttctgattttcc

SEQ ID NO: 23154 - DNA, 3066 bp, Zea Mays
ctctctcacacacacttgcctaatccagccacccgactcctatcggttaccggcgacctcaccggcggctaaaaggatttgacttgcggccgccgccgcgcgtcttcgaccgtgctctcccaccccaatctccgggttgattactaccagagactaactcgaatcgtcgatgagcgctcgatcgatcccgtgacggagcggctcggttgctccaaagctccgttctacgccatgctcgccgccgccgccgccatggcggtgaccgtccctcgggcggcttctcattgttttccagcaaatacggccaggaaatgtaggacttgctggagctgtcgtgcggcaagagtcgaggctgggcactcccgattggaggtgagaaaagtcacctatcgacctcctggaactgaacagaacttgttgaatgaaattaacctctctcttcaggaaaaaagttttggtttgatatttggacggagtgggagtggaaagacaacccttttgcagctgttggctggtctatcagaacctacctctgggtctatttgcattcagaagtatgatgatactgggaatcctattggcttgcctgaactgctaacttctcaacgagttggaattgtatttcagtttcctgagaggtatttcttagcggatactgtacttgaagaagttacttttggatggcctaggcaaaaggcagacctcctattaaaagaacagctcgctttaaatcttcaaaatgcttttaactcggttggtctgacaaccatctcattagatgaaaatccgcaagctctaagtggtggatttaagaggcgacttgctttggcaattcaactggttcaaactcctgatctgttgctgcttgatgagccacttgctggtctagattggaaggctcgagctgatgttgtgaatctcctaaaggacctgaagaaacatcatactatactggttgtaagtcacgatctaagggaactatatccactagtggatcgctcatggcgaatggaaatggggggaagtttgaaggaggaagctttgcctgtctaaacatgtgcttgtcagtatagctgtcagacagcatgtacatattggtcatccaaatctagtcacatcaactacttttacaaacttagattatgtcggctgggaaatttcttcaagatacaatggagtcagagatggttgtgaacagtcatttggtaatgcgtggtaacttccgagcacgaaaaaatgctagaaaaaatcagcagagatcgtgaatgttagcacggagctttgactactgctggaacggggaacagtctgacgcagacattgttgagctaccatgaacgttgaacattccattgaagtttaggttcaggaatcaggatccagcgatagctccttgttgcaaacatgaggattgcagaaggcctgtacactttgaaaggtggggggtcaagtttcaaaatggtgcggatgatggtttggaaatggtttcctttgttgaagtttcccactggagagattcagagaacatcatttacttgcactatcgatagtctgcatcattcacaatttgctgttccttacgaactcatttgtctggattctggaagaatatgttgtgcacatgagtagattcttgtttcctccaaagatctttgacctgctgttatcaccacttctggcatgcgaggagcaatctcagtcatgcagttatgtatatgaatgtgcacctctgtttgaaacgtccacgtcaccgtaccggcagaagggaggtatgtttggctggttcggggggctctgaacgctatgcaagtgatgctattgctatccaagatcctgtaaaaggagccaaagaatcttgcaaacaggacacctcttctgaccagggctgttgccggtccattcgaaacttctgctaggaaggctccaggaagctgatgcagagttggaaagatctggttgatcgggtcgctctccgcctctccctgctggatagattgctgctgctgtttttttttcccacacgaaaggaccttgctacctgttggtctatactttttatcattttccttgtgctgctttccttttggtctgctgagactttgggcatgtcagcatcagctgtcagatcggtacaggtaacctgcacctcgtgacttctgaaagaaattaccgacggtgggtactacccagtgcccatcaagctatcttgttgccggtttttgtggtctacttaggaccctttgatgataaacatacaagttggggggttcattttgaatagtactgtttcctgcaaagatctgacggcggttatatatgatgctttgtgcagttttatcaagcagatcatgtaccctgtcttaacgattaaggaaatgaaaaacaaatctttggataccttgaatattggtgaagtggatagatgtttcagagacgggattacctcatgtagagacgaatatctgaacacccgagaatggtatgaacaaatacgttgcgccaaggaactgcaactaagattactgcttaccattgactttgttcagttgataaattgtcaaggctttatggtaaaatctgtgttagaagaaacttgaaacaaatctcaaggagaaaggactgaactcagtcgggtagcatgtatgaatctatctaccagaataattgttttttttgccacatgtgggtctgatagcaattttgtttgttgtaatagcaaatatctaattcgctctgatctactctcattctccaataacacttaacacttcaaacttaaaaaaaaaaccggataaaaataaaaacgtggcctattcattgcattcacctggtaatccatctttaatacaatgtaagtaatattatttgcagaaaatcagcgatgtatgaaactaaggccccgtttgagattagtccctccattttagtcccatttaggccatgtttggtttcaattagtcttaggactaaactttagttctaagactaaattttagtccctacttgtttggttatagggactaaatagattctaaagttattaaatacattgtccaaagactcaaa

SEQ ID NO: 23155 - DNA, 3458 bp, Zea Mays
ctctctcacacacacttgcctaatccagccacccgactcctatcggttaccggcgacctcaccggcggctaaaaggatttgacttgcggccgccgccgcgcgtcttcgaccgtgctctcccaccccaatctccgggttgattactaccagagactaactcgaatcgtcgatgagcgctcgatcgatcccgtgacggagcggctcggttgctccaaagctccgttctacgccatgctcgccgccgccgccgccatggcggtgaccgtccctcgggcggcttctcattgttttccagcaaatacggccaggaaatgtaggacttgctggagctgtcgtgcggcaagagtcgaggctgggcactcccgattggaggtgagaaaagtcacctatcgacctcctggaactgaacagaacttgttgaatgaaattaacctctctcttcaggaaaaaagttttggtttgatatttggacggagtgggagtggaaagacaacccttttgcagctgttggctggtctatcagaacctacctctgggtctatttgcattcagaagtatgatgatactgggaatcctattggcttgcctgaactgctaacttctcaacgagttggaattgtatttcagtttcctgagaggtatttcttagcggatactgtacttgaagaagttacttttggatggcctaggcaaaaggcagacctcctattaaaagaacagctcgctttaaatcttcaaaatgcttttaactcggttggtctgacaaccatctcattagatgaaaatccgcaagctctaagtggtggatttaagaggcgacttgctttggcaattcaactggttcaaactcctgatctgttgctgcttgatgagccacttgctggtctagattggaaggctcgagctgatgttgtgaatctcctaaaggacctgaagaaacatcatactatactggttgtaagtcacgatctaagggaactatatccactagtggatcgctcatggcgaatggaaatggggggaagtttgaaggaggaagctttgcctgtctaaacatgtgcttgtcagtatagctgtcagacagcatgtacatattggtcatccaaatctagtcacatcaactacttttacaaacttagattatgtcggctgggaaatttcttcaagatacaatggagtcagagatggttgtgaacagtcatttggtaatgcgtggtaacttccgagcacgaaaaaatgctagaaaaaatcagcagagatcgtgaatgttagcacggagctttgactactgctggaacggggaacagtctgacgcagacattgttgagctaccatgaacgttgaacattccattgaagtttaggttcaggaatcaggatccagcgatagctccttgttgcaaacatgaggattgcagaaggcctgtacactttgaaaggtggggggtcaagtttcaaaatggtgcggatgatggtttggaaatggtttcctttgttgaagtttcccactggagagattcagagaacatcatttacttgcactatcgatagtctgcatcattcacaatttgctgttccttacgaactcatttgtctggattctggaagaatatgttgtgcacatgagtagattcttgtttcctccaaagatctttgacctgctgttatcaccacttctggcatgcgaggagcaatctcagtcatgcagttatgtatatgaatgtgcacctctgtttgaaacggtgagcaaattctctcccccttttgtgtccagtcattcattttgtgattagcacgatactctgcttcagcttcagcttgacgccagtcttcttatcttatgtactcactccgctcttttttatttgtcgcggtttagttcaaaaatgaactagtgggtgacaaatattcgagaacggaggtagtatatacaatattcacaaggcgtgctgtaaatatgtatccacttttacaaacgaagtaacctactgagagttacttgtgccacatagctacctacatcaatgtgtgcatgttcaaagcacgaaacttttctttgtcttctagactcctgttgtcgctttcagcttgctcatcttttttttccaaccattgtaaaccccacgtgttcaagtccacgtcaccgtaccggcagaagggaggtatgtttggctggttcggggggctctgaacgctatgcaagtgatgctattgctatccaagatcctgtaaaaggagccaaagaatcttgcaaacaggacacctcttctgaccagggctgttgccggtccattcgaaacttctgctaggaaggctccaggaagctgatgcagagttggaaagatctggttgatcgggtcgctctccgcctctccctgctggatagattgctgctgctgtttttttttcccacacgaaaggaccttgctacctgttggtctatactttttatcattttccttgtgctgctttccttttggtctgctgagactttgggcatgtcagcatcagctgtcagatcggtacaggtaacctgcacctcgtgacttctgaaagaaattaccgacggtgggtactacccagtgcccatcaagctatcttgttgccggtttttgtggtctacttaggaccctttgatgataaacatacaagttggggggttcattttgaatagtactgtttcctgcaaagatctgacggcggttatatatgatgctttgtgcagttttatcaagcagatcatgtaccctgtcttaacgattaaggaaatgaaaaacaaatctttggataccttgaatattggtgaagtggatagatgtttcagagacgggattacctcatgtagagacgaatatctgaacacccgagaatggtatgaacaaatacgttgcgccaaggaactgcaactaagattactgcttaccattgactttgttcagttgataaattgtcaaggctttatggtaaaatctgtgttagaagaaacttgaaacaaatctcaaggagaaaggactgaactcagtcgggtagcatgtatgaatctatctaccagaataattgttttttttgccacatgtgggtctgatagcaattttgtttgttgtaatagcaaatatctaattcgctctgatctactctcattctccaataacacttaacacttcaaacttaaaaaaaaaaccggataaaaataaaaacgtggcctattcattgcattcacctggtaatccatctttaatacaatgtaagtaatattatttgcagaaaatcagcgatgtatgaaactaaggccccgtttgagattagtccctccattttagtcccatttaggccatgtttggtttcaattagtcttaggactaaactttagttctaagactaaattttagtccctacttgtttggttatagggactaaatagattctaaagttattaaatacattgtccaaagactcaaa

SEQ ID NO: 23156 - DNA, 2388 bp, Zea Mays
ctctctcacacacacttgcctaatccagccacccgactcctatcggttaccggcgacctcaccggcggctaaaaggatttgacttgcggccgccgccgcgcgtcttcgaccgtgctctcccaccccaatctccgggttgattactaccagagactaactcgaatcgtcgatgagcgctcgatcgatcccgtgacggagcggctcggttgctccaaagctccgttctacgccatgctcgccgccgccgccgccatggcggtgaccgtccctcgggcggcttctcattgttttccagcaaatacggccaggaaatgtaggacttgctggagctgtcgtgcggcaagagtcgaggctgggcactcccgattggaggtgagaaaagtcacctatcgacctcctggaactgaacagaacttgttgaatgaaattaacctctctcttcaggaaaaaagttttggtttgatatttggacggagtgggagtggaaagacaacccttttgcagctgttggctggtctatcagaacctacctctgggtctatttgcattcagaagtatgatgatactgggaatcctattggcttgcctgaactgctaacttctcaacgagttggaattgtatttcagtttcctgagaggtatttcttagcggatactgtacttgaagaagttacttttggatggcctaggcaaaaggcagacctcctattaaaagaacagctcgctttaaatcttcaaaatgcttttaactcggttcaaactcctgatctgttgctgcttgatgagccacttgctggtctagattggaaggctcgagctgatgttgtgaatctcctaaaggacctgaagaaacatcatactatactggttgtaagtcacgatctaagggaactatatccactagtggatcgctcatggcgaatggaaatggggggaagtttgaaggaggaagctttgcctgtctaaacatgtgcttgtcagtatagctgtcagacagcatgtacatattggtcatccaaatctagtcacatcaactacttttacaaacttagattatgtcggctgggaaatttcttcaagatacaatggagtcagagatggttgtgaacagtcatttggtaatgcgtggtaacttccgagcacgaaaaaatgctagaaaaaatcagcagagatcgtgaatgttagcacggagctttgactactgctggaacggggaacagtctgacgcagacattgttgagctaccatgaacgttgaacattccattgaagtttaggttcaggaatcaggatccagcgatagctccttgttgcaaacatgaggattgcagaaggcctgtacactttgaaaggtggggggtcaagtttcaaaatggtgcggatgatggtttggaaatggtttcctttgttgaagtttcccactggagagattcagagaacatcatttacttgcactatcgatagtctgcatcattcacaatttgctgttccttacgaactcatttgtctggattctggaagaatatgttgtgcacatgagtagattcttgtttcctccaaagatctttgacctgctgttatcaccacttctggcatgcgaggagcaatctcagtcatgcagttatgtatatgaatgtgcacctctgtttgaaacgttttatcaagcagatcatgtaccctgtcttaacgattaaggaaatgaaaaacaaatctttggataccttgaatattggtgaagtggatagatgtttcagagacgggattacctcatgtagagacgaatatctgaacacccgagaatggtatgaacaaatacgttgcgccaaggaactgcaactaagattactgcttaccattgactttgttcagttgataaattgtcaaggctttatggtaaaatctgtgttagaagaaacttgaaacaaatctcaaggagaaaggactgaactcagtcgggtagcatgtatgaatctatctaccagaataattgttttttttgccacatgtgggtctgatagcaattttgtttgttgtaatagcaaatatctaattcgctctgatctactctcattctccaataacacttaacacttcaaacttaaaaaaaaaaccggataaaaataaaaacgtggcctattcattgcattcacctggtaatccatctttaatacaatgtaagtaatattatttgcagaaaatcagcgatgtatgaaactaaggccccgtttgagattagtccctccattttagtcccatttaggccatgtttggtttcaattagtcttaggactaaactttagttctaagactaaattttagtccctacttgtttggttatagggactaaatagattctaaagttattaaatacattgtccaaagactcaaa

SEQ ID NO: 23157 - DNA, 2152 bp, Zea Mays
gtttagagttggggtgctaccaattcgtaggaaccagtgacgcattcaggtgagaaaagtcacctatcgacctcctggaactgaacagaacttgttgaatgaaattaacctctctcttcaggaaaaaagttttggtttgatatttggacggagtgggagtggaaagacaacccttttgcagctgttggctggtctatcagaacctacctctgggtctatttgcattcagaagtatgatgatactgggaatcctattggcttgcctgaactgctaacttctcaacgagttggaattgtatttcagtttcctgagaggtatttcttagcggatactgtacttgaagaagttacttttggatggcctaggcaaaaggcagacctcctattaaaagaacagctcgctttaaatcttcaaaatgcttttaactcggttggtctgacaaccatctcattagatgaaaatccgcaagctctaagtggtggatttaagaggcgacttgctttggcaattcaactggttcaaactcctgatctgttgctgcttgatgagccacttgctggtctagattggaaggctcgagctgatgttgtgaatctcctaaaggacctgaagaaacatcatactatactggttgtaagtcacgatctaagggaactatatccactagtggatcgctcatggcgaatggaaatggggggaagtttgaaggaggaagctttgcctgtctaaacatgtgcttgtcagtatagctgtcagacagcatgtacatattggtcatccaaatctagtcacatcaactacttttacaaacttagattatgtcggctgggaaatttcttcaagatacaatggagtcagagatggttgtgaacagtcatttggtaatgcgtggtaacttccgagcacgaaaaaatgctagaaaaaatcagcagagatcgtgaatgttagcacggagctttgactactgctggaacggggaacagtctgacgcagacattgttgagctaccatgaacgttgaacattccattgaagtttaggttcaggaatcaggatccagcgatagctccttgttgcaaacatgaggattgcagaaggcctgtacactttgaaaggtggggggtcaagtttcaaaatggtgcggatgatggtttggaaatggtttcctttgttgaagtttcccactggagagattcagagaacatcatttacttgcactatcgatagtctgcatcattcacaatttgctgttccttacgaactcatttgtctggattctggaagaatatgttgtgcacatgagtagattcttgtttcctccaaagatctttgacctgctgttatcaccacttctggcatgcgaggagcaatctcagtcatgcagttatgtatatgaatgtgcacctctgtttgaaacgttttatcaagcagatcatgtaccctgtcttaacgattaaggaaatgaaaaacaaatctttggataccttgaatattggtgaagtggatagatgtttcagagacgggattacctcatgtagagacgaatatctgaacacccgagaatggtatgaacaaatacgttgcgccaaggaactgcaactaagattactgcttaccattgactttgttcagttgataaattgtcaaggctttatggtaaaatctgtgttagaagaaacttgaaacaaatctcaaggagaaaggactgaactcagtcgggtagcatgtatgaatctatctaccagaataattgttttttttgccacatgtgggtctgatagcaattttgtttgttgtaatagcaaatatctaattcgctctgatctactctcattctccaataacacttaacacttcaaacttaaaaaaaaaaccggataaaaataaaaacgtggcctattcattgcattcacctggtaatccatctttaatacaatgtaagtaatattatttgcagaaaatcagcgatgtatgaaactaaggccccgtttgagattagtccctccattttagtcccatttaggccatgtttggtttcaattagtcttaggactaaactttagttctaagactaaattttagtccctacttgtttggttatagggactaaatagattctaaagttattaaatacattgtccaaagactcaaa

SEQ ID NO: 23158 - DNA, 1385 bp, Zea Mays
actcggatctcttttcccagcgcacgggcggcccacgaacggatcggcgactcctctccatccgtctcctctctcgccggcgttctgccgcactgcaaattcgaattcgaacccgaatcctccctcccccctcctctcggcgagaggaggctttgtgagggccgccaggatcgacaggatgcagaagaagcctgatgacgccatggaggaggaggcggcggcggctcctgggccggagatagggttctggttggcagcacggcggcgactcgccccagaagaccccttcttcgctgccggggacctcgagcgcgagctcctggccaagcaccttgccctggatctttctgaagatgaccgcaaccagcttgagaagatggaagtagccagcacgtgtgttttgtccaattgctggttgtggtgctcatctagattgcctggaggagtttgaggaccactatgtcactcgacatactgcttcatgctctgtatgctcgcgagtttatccaacttcaaggttgctgagcatccatgtttctgagacgcacgactcgtatttccaagcaaaagttgcccgtggttttccaatgtacgagtgtttggtggagggttgtggtatgaaattgaagagttacaagagccggcagcagcatctcatcgataagcatcagtttcccaaatcatttgagttcttcaaaaaggcacgggactcccagcgtcagcggcagaagtcccagaggaggcagactgctcacaagggtgaagagacaagggataattcgatggacgtcgacggaaaaggtgcaaggcaaacaaaccggaggtaccggctgaagcaacatgatcatagcgaaccgaaagagaacaagcagcagcataaggaggcccaggaggacgaaatggaggtcgagcagaagattgatgagctcacctctgctgtatcgaggttgagcacagcagattctacgccctcaagcgtcacctttggccaccgtcgctctcgtggccttacgtttgttcccaggtcaatcaggcagaataagcaggcggccctcccagctggaagcaacaaatgactaaccactgtcatttggccttttggtagttccagaatctggcttggagctattaactttgtatgaaaaaatgatcttggatgttaaatgtaccacgggaagctcatgtttccactgatatccttggatgactcagtgggcaaacgttttcttggctatatataatggtgttatactgctttgcagaaacgcaacgcagtgggcccacaaaactctgtatgctgtattgaaaatgtttgcataggtttcgtagactgttctccgcggttactcataaaattcttcaactatatattacttttacacccc

SEQ ID NO: 23159 - DNA, 1146 bp, Zea Mays
accacccaaacccaagcagagaagcagagacacatttggctcactcactcacactcactcgctcatagattgtcctgtccgtccatcatctctagctagcagcttccagtgagagcggcaagcgacaccacaaccagacaacacaccaccaccgagctgtgagaataagttcgcagacaggatgggcaagctgtggacgatcctcactcacctccactccctagcaggccctttgtcagttcagttccgatcggtgatgctgagaactgagaaccgtctgctgctcttcgttccctttttgcaggccaacggtgatgctgctgtaccctctgtacgcgtccgtgcgggcgatggagagcccgtccaagctggacgacgagcagtggctcgcctactggatcctctactccttcgtcacgctcatggagatgctcctcgagtccctcatatactggatccccatctggtacgagctcaagctgctgttcatcgcgtggctcgtgctccccaacttcaggggcgccgccttcatctacgacaagttcgtgcgcgagcagctccggaagcacggcctcaccgccgccggctccgtcaagtcgtcgtcgccgtcgtccaaggacaaggacaagcccaagaacaagttcctcgccttcgtcacgcccaagaaggatcatgaagcttactgaagtgggttgcagtgatcccattcctggaccatgtcccggcaacctgtagtgcactccactagatttctgttgtgtttgttctcgacttgaaatagagcccgttcgatgtgtgtgtggccattctgtatgtgtgagcatcaactctaacatggaatggagacaagtgccaactttcggtgctgatgatgatgtgaatgtgtgaaatttatgtctgccttttctctcttctctctctctgtgaaaacggccgtgttttcgttgtttgggccggaatcttatgattaagtgcaaatttgaagagagtcattaaaacatcaattttaatatagttttcaaaaggcctgtctccatgggccaaacatcaaaccccagacccggcctcgttgccaatttgagataccagttgtactttgtaatatgcatatgtaccaatgcgtacagtgagtatatcagctgtgca

SEQ ID NO: 23160 - DNA, 1523 bp, Zea Mays
acaccgtacctccggcgcctccgactccggtcctccggcctgcgcaggctagctagctctatttaggtccaccgtgcccccgccgcgcaggcaggggagatccaagggtccgagcagaaggccgccggcggcgagccagccagccagctaaagcgatccatatatacatatatactatcgagcaacacgtaaggaaggaaggaagaaagaagccaagcccaccagggccagggaagagagcatagctaaggaaggaaggaaggaagatgatgagcaaggaggcagtggtgaacgcgttcctgggctgcttcatgcacgtggggctggcgctggtgctcgccgtctacctccccgtggcctttgtgtgccgcctcctccaccgcctcctcgtccgccccttcgccaggggcgaggacctccgcggcaaggtcatcctcgtcaccggcgcgtcctccggcatcggcgagtgaatcacttggtggccaacgccgggatctggtccagctgcttctttgaagagatcaccaacataaccgccttccataatgttattgatctcaacttctggggtgccgtgtacccgacctacttcgcgctgccgtacctcaaggccagccggggcaacatcgtggtgaccgcctccgtcgccggcagggtgccgacagccaggatgagcttctacaacgcaagcaaaggcgccgtgatacgtttctacgagacgctgagggctgagctggggtcccacgtgcacgtcaccatcctcacgcccggctacgtcgtctccaacctcaccaagggcaagggcctccagaaggacggccatgtcggcatcgacgaggaggcccgcgacatcaacgtggggccgatgccggtgggcaagacggagtcgctggccgaggtggtggtggcgagcgtgcgccgtcgggactactacgtcacgtggcccggctggtactggcccttccacatggtcatgtgcgccgcgcccgagctggtggactggttctcccgcaccttctacgtctccaagtccggcgaccaggacggcggcggcggcgcgctcagcaagaagatcctggaggccgtcggcgggaagaagttcctctacccccagaccatacgctcacagaccgccatggcacccaataactgacaacctacatatatatatatatatatatatatatatatgtcatttatgagaatgcacggtcgatctgttgttggattagaacagtacgtgatgatcgaacgtacgggccggcacgggtgaaattgtttattcgtttcgtttcggggttttttcttcttcatttcctctgccttttctccacttccgattttacaaatggtcaatgtgtatgaagtaattaatacgaatgttcattcgtggttggcttgcattgtacgccccgtgatattggggcatgcatgggtgcaaattgcaaagttgatgtacctatataggttttgtttgaatttaacatctcaagttagaactcacgaaagttgacatacaattg

SEQ ID NO: 23161 - DNA, 984 bp, Zea Mays
cgaaaccggcctgggatctcaacttctggggtgccgtgtacccgacctacttcgcgctgccgtacctcaaggccagccggggcaacatcgtggtgaccgcctccgtcgccggcagggtgccgacagccaggatgagcttctacaacgcaagcaaaggcgccgtgatacgtttctacgagacgctgagggctgagctggggtcccacgtgcacgtcaccatcctcacgcccggctacgtcgtctccaacctcaccaagggcaagggcctccagaaggacggccatgtcggcatcgacgaggaggcccgcgacatcaacgtggggccgatgccggtgggcaagacggagtcgctggccgaggtggtggtggcgagcgtgcgccgtcgggactactacgtcacgtggcccggctggtactggcccttccacatggtcatgtgcgccgcgcccgagctggtggactggttctcccgcaccttctacgtctccaagtccggcgaccaggacggcggcggcggcgcgctcagcaagaagatcctggaggccgtcggcgggaagaagttcctctacccccagaccatacgctcacagaccgccatggcacccaataactgacaacctacatatatatatatatatatatatatatatatgtcatttatgagaatgcacggtcgatctgttgttggattagaacagtacgtgatgatcgaacgtacgggccggcacgggtgaaattgtttattcgtttcgtttcggggttttttcttcttcatttcctctgccttttctccacttccgattttacaaatggtcaatgtgtatgaagtaattaatacgaatgttcattcgtggttggcttgcattgtacgccccgtgatattggggcatgcatgggtgcaaattgcaaagttgatgtacctatataggttttgtttgaatttaacatctcaagttagaactcacgaaagttgacatacaattg

SEQ ID NO: 23162 - DNA, 2395 bp, Zea Mays
acgagaaaaacaaaaatatttacagattggctcactcattgcgtggcggtctgcctcgtccccttcctcccgtttcttcccttgcctccccctccccgtcgcgctgttcaacgttcaaacccttgcagctccctctcccttggtcgcgcagtcgccattcacgaccccgaccccgacccccgtccccctcccttaaatcccacctctccccgtctacgcctcattcgctccagctcgcatcccacagccaagccagttagcccgggagatctccaagaaaccatcttggaatccgagaacgcccagcattcttggtcggccaaggattcgaattccgacgaacggcttctacggccgaaaaaagtccgataatttccgcggggagctcaggaggtgtctcggtctcgggaaccggaggaggaggccgtgggggattgacgagggggcaagatggtgaggctgccgtacacaacggcgctgaccacgctgttcagctacggcctgctcttcgccttcggccagctcagggatttcttccgcaagttcgtcgactggttcaaggccaagaacgtcaaggcctgattcggcgtttggcttcgtgcaggggtacgcgccgatctgcctgggcctggaggatttctatgtgcgacgcctgtacttgcggatccaggattgctttggtaggccgatcgcaagtgcgccagattcatggtttgatgttgttgagcggacctcaaaggacaataacaagacactacagcgtacctcgaataccaccagatgcctcaacttgggctcctacaactaccttggctttgctgcagcagatgagtattgcacaccacgtgttattgagtctctcaagaaatactcagcaagtacctgcagtgttcgtgtcgatggcggtacgaccaagcttcacaatgagctggaggagttggctgcgcgttttgttggaaagcctgctgctatcctatttggcatgggttatgttacaaactctgccatcattccatgcctaattggaaagggtggactgataattagtgactctctgaatcataactcaattgttaatggcgcaagaggatccggtgcaactgttagggttttccagcataattcccctgctcatttggaagaggtcctgagagagcagatagctggtggtcaaccacggacacacaggccatggaagaagatcattgtcattgttgagggtatctatagcatggaaggggagctgtgtaaactccctgagattatagctgtcgccaagaaatacaaggcctacacatatctggatgaggcccatagcattggtgctgttgggcagtctggccgcggtgtttgtgagctccttggggttgacccagctgatgtagatataatgatgggtacttttaccaagtcttttggatcatgtggtggatatattgccgcatcaaaggagataattcagcaccttaagcatagttgtccggcccatctgtatgctacttccatgtcgccaccagcagtccaacaagttatttctgctattaaagttatccttggggaggatggctccaacagaggtgcccaaaaacttgctcgcatccgcgagaatagtaatttctttaggtcagagctcaagaagatgggttttgaggttcttggtgacaatgactctcctgtcatgcccataatgctctacaatccggctaagattcctgcattctctagggagtgccttagacaaaaggttgctgttgttactgttgcgtttcctgcgacacctcttcttcttgctagggcacgcatatgcatttctgcttcacatactagggaggacctgatgaaagcccttgatgttatcagcagagttggcgaccttgtgggcatcaaatacttccctgcagaaccaccaaagattgctggagctgatcatgataagctggagtaggaatcaacccttagttgccccatgagtgattgaagttgttagaatcccttggagttgtcaacaaatcattatggaaagaagcacatattgagccatttcatttggatcttgtcaatacacaagagtccaggatccgtcatattaagctgactactgtttgttgattgtacaactattcttccaattgtgtatagctggttgaaattcagttgttctgttgttaatccattcccaatatgtaatacaattagaggcaatataaacttcgagtagaacattactgagtttcccttgcagatcactgacgactattggtctcttgctttcatgtatttttttaccttttgatatgggattagtagatgtctctacactttatatgaagatacgaattattttttattcagtgaatgttatatgtgaccactgacaatgtttttggggagaagt

SEQ ID NO: 23163 - DNA, 1790 bp, Zea Mays
cacacccgaatttattgatgcatgaagaaattctctgcattatatcttgaaaacaggctgtgcaggattgctttggtaggccgatcgcaagtgcgccagattcatggtttgatgttgttgagcggacctcaaaggacaataacaagacactacagcgtacctcgaataccaccagatgcctcaacttgggctcctacaactaccttggctttgctgcagcagatgagtattgcacaccacgtgttattgagtctctcaagaaatactcagcaagtacctgcagtgttcgtgtcgatggcggtacgaccaagcttcacaatgagctggaggagttggctgcgcgttttgttggaaagcctgctgctatcctatttggcatgggttatgttacaaactctgccatcattccatgcctaattggaaagggtggactgataattagtgactctctgaatcataactcaattgttaatggcgcaagaggatccggtgcaactgttagggttttccagcataattcccctgctcatttggaagaggtcctgagagagcagatagctggtggtcaaccacggacacacaggccatggaagaagatcattgtcattgttgagggtatctatagcatggaaggggagctgtgtaaactccctgagattatagctgtcgccaagaaatacaaggcctacacatatctggatgaggcccatagcattggtgctgttgggcagtctggccgcggtgtttgtgagctccttggggttgacccagctgatgtagatataatgatgggtacttttaccaagtcttttggatcatgtggtggatatattgccgcatcaaaggagataattcagcaccttaagcatagttgtccggcccatctgtatgctacttccatgtcgccaccagcagtccaacaagttatttctgctattaaagttatccttggggaggatggctccaacagaggtgcccaaaaacttgctcgcatccgcgagaatagtaatttctttaggtcagagctcaagaagatgggttttgaggttcttggtgacaatgactctcctgtcatgcccataatgctctacaatccggctaagattcctgcattctctagggagtgccttagacaaaaggttgctgttgttactgttgcgtttcctgcgacacctcttcttcttgctagggcacgcatatgcatttctgcttcacatactagggaggacctgatgaaagcccttgatgttatcagcagagttggcgaccttgtgggcatcaaatacttccctgcagaaccaccaaagattgctggagctgatcatgataagctggagtaggaatcaacccttagttgccccatgagtgattgaagttgttagaatcccttggagttgtcaacaaatcattatggaaagaagcacatattgagccatttcatttggatcttgtcaatacacaagagtccaggatccgtcatattaagctgactactgtttgttgattgtacaactattcttccaattgtgtatagctggttgaaattcagttgttctgttgttaatccattcccaatatgtaatacaattagaggcaatataaacttcgagtagaacattactgagtttcccttgcagatcactgacgactattggtctcttgctttcatgtatttttttaccttttgatatgggattagtagatgtctctacactttatatgaagatacgaattattttttattcagtgaatgttatatgtgaccactgacaatgtttttggggagaagt

SEQ ID NO: 23164 - DNA, 2384 bp, Zea Mays
aacgtaacaacctcggcttctacgactaggagtcgaagtcgactgacgactcacgactggcgtagcgtaggaggcggcggttccaagcgaccatccaataatcgccaccctcacgcgagaaatccccggcaacttttggggaactacacgtgtatggagttttattagtattccaggggcgtcacaatggcatactttcctgatgaagtagtagggtatatccttggttatgtaacgtcgcatcaggaccgcaacgcggtgtccttggtctgccgggcatggtacgacattgagcgtcatggccgccattcagtgcttgtaagaaactgttatgcggtgtgcccagagcgtgtacacatgcggtttcccaacatgcgtgcactgagcttgaagggcaaaccgcactttgctgaattcaaccttgtcccggcgggttggggtgccactgcaaatccatgggtggatgcgtgcgcccgtgcatgcccaggtcttgaggagctccggctgaagtttatggttgtgactgatgaatgcctcaagttgctttctctatcctttaccaactttaaatcacttgtccttgtttgttgtgaggggttcagtactaccgggcttgctaatattgccaccaattgcaggtttcttaaggaactagacttacaaaagagttgtgtgaaacatcaagaccatcagtggattaattgttttcccaagtcttcaacatcactagaatgcttgaatttttcctgcttgactggggaggtgaatgctgttgcactggaggaacttgttgcaaggagtccaaatcttaaaagtttaaggctgaatcttgcagttccatttgatgttttgtccagaatcctttctcgcacacctaagctagaggatttaggcacaggatcctttttacaaggcaatgaccctgctgcatatgccagtttatgtagagctcttgagaactgcacttcactgaagagtatatctggtttttgggatgctccaggcttttatgttcaaggaattttgtcaaattgcaagatcagaaatcttacatgcttgaatctcagctatgctacattgattcagagtacccagcttatcggtattattcgtcattgtaagaagctccatgtcttatgggggtaaggcttgccttggttattgtttccccagatcccactcatgtggaaccgccaaaattgggtttgttttgtgtttgtcttcacaagaaaaggtgttagatcacattggtgatgagggcttgaaggctgtgtccttttcttgtcctgatcttcaggagttgagggtatatccaagtgttgttgcaccaagaggtactgtgacggaggaagggttggtagccctatcttcgtgtcggaagttacagcatgtgctcttctcttgtgttcgaatgacaaacacggcgctgatgacaatagcaaggtactgcccacggctaacgtccttcagactatgcattcgcaagcccaggtcagcagacgccgtcacaggacagccactggacgaaggctttggggcgatagtgcggtcctgcagaggcctgaggcgtcttgccatgtccggcctcctcacggacagcgtgttcctgtacatcggcatgtacgcggagaagctggagatgctctcggtaacgttcgcgggggacaccgacgacggcatggtctatgtgctcaatggctgcaggaacctcaagaagctggtaatcaaggagagccccttcggtgacgccgctctcctcgcgggcgcgcacaggtacgagtcaatgcgcagtctctggatgtcgtcctgccagatcaccctgggtggctgcaaggcccttgcggccaccatgccaaacatcaatgtcgaggtcatcggtggggcgagctttggtgcgatggatggtggtgtcagcggtgcgaggaaggtggacatgctctacctctaccgtactctggctggacctagatgcgatacgccagggttcgtctcgatattgtgagctgtatctatggctactgttggtggcgttcagggaaacccgatgttcttaaccgtgcctgctgcgggctgtggctgtgctactgtctggtagtgtttcggaaacatgatgtttatttgcgtaaggtagtgtttggttctggaaccattttaagccttgttcagatattcatatacctcatggattggaagtgattagaaaaaaatatgaataattttgacttactatgtattgaaactcacttaatcccctctaatccatatgaaattgagatgaaaccgaacagacccttaatccatatgaaattgagatgaaaccgaacagacccttagatgaaatggctctgttttctagatcctaagaacagaatggcttagatgaa

SEQ ID NO: 23165 - DNA, 2453 bp, Zea Mays
aacgtaacaacctcggcttctacgactaggagtcgaagtcgactgacgactcacgactggcgtagcgtaggaggcggcggttccaagcgaccatccaataatcgccaccctcacgcgagaaatccccgaacacatacgatttctgccagtctgaagttttggactttatgtgagctgttgccaattcaactgcttctgctacacgatccattaactgctttccgatccgtgttctgtgatgtttgccctcttcctcagggccaatttggcaatttgtcagaacacacacaggcaacttttggggaactacacgtgtatggagttttattagtattccaggggcgtcacaatggcatactttcctgatgaagtagtagggtatatccttggttatgtaacgtcgcatcaggaccgcaacgcggtgtccttggtctgccgggcatggtacgacattgagcgtcatggccgccattcagtgcttgtaagaaactgttatgcggtgtgcccagagcgtgtacacatgcggtttcccaacatgcgtgcactgagcttgaagggcaaaccgcactttgctgaattcaaccttgtcccggcgggttggggtgccactgcaaatccatgggtggatgcgtgcgcccgtgcatgcccaggtcttgaggagctccggctgaagtttatggttgtgactgatgaatgcctcaagttgctttctctatcctttaccaactttaaatcacttgtccttgtttgttgtgaggggttcagtactaccgggcttgctaatattgccaccaattgcaggtttcttaaggaactagacttacaaaagagttgtgtgaaacatcaagaccatcagtggattaattgttttcccaagtcttcaacatcactagaatgcttgaatttttcctgcttgactggggaggtgaatgctgttgcactggaggaacttgttgcaaggagtccaaatcttaaaagtttaaggctgaatcttgcagttccatttgatgttttgtccagaatcctttctcgcacacctaagctagaggatttaggcacaggatcctttttacaaggcaatgaccctgctgcatatgccagtttatgtagagctcttgagaactgcacttcactgaagagtatatctggtttttgggatgctccaggcttttatgttcaaggaattttgtcaaattgcaagatcagaaatcttacatgcttgaatctcagctatgctacattgattcagagtacccagcttatcggtattattcgtcattgtaagaagctccatgtcttatgggtgttagatcacattggtgatgagggcttgaaggctgtgtccttttcttgtcctgatcttcaggagttgagggtatatccaagtgttgttgcaccaagaggtactgtgacggaggaagggttggtagccctatcttcgtgtcggaagttacagcatgtgctcttctcttgtgttcgaatgacaaacacggcgctgatgacaatagcaaggtactgcccacggctaacgtccttcagactatgcattcgcaagcccaggtcagcagacgccgtcacaggacagccactggacgaaggctttggggcgatagtgcggtcctgcagaggcctgaggcgtcttgccatgtccggcctcctcacggacagcgtgttcctgtacatcggcatgtacgcggagaagctggagatgctctcggtaacgttcgcgggggacaccgacgacggcatggtctatgtgctcaatggctgcaggaacctcaagaagctggtaatcaaggagagccccttcggtgacgccgctctcctcgcgggcgcgcacaggtacgagtcaatgcgcagtctctggatgtcgtcctgccagatcaccctgggtggctgcaaggcccttgcggccaccatgccaaacatcaatgtcgaggtcatcggtggggcgagctttggtgcgatggatggtggtgtcagcggtgcgaggaaggtggacatgctctacctctaccgtactctggctggacctagatgcgatacgccagggttcgtctcgatattgtgagctgtatctatggctactgttggtggcgttcagggaaacccgatgttcttaaccgtgcctgctgcgggctgtggctgtgctactgtctggtagtgtttcggaaacatgatgtttatttgcgtaaggtagtgtttggttctggaaccattttaagccttgttcagatattcatatacctcatggattggaagtgattagaaaaaaatatgaataattttgacttactatgtattgaaactcacttaatcccctctaatccatatgaaattgagatgaaaccgaacagacccttaatccatatgaaattgagatgaaaccgaacagacccttagatgaaatggctctgttttctagatcctaagaacagaatggcttagatgaa

SEQ ID NO: 23166 - DNA, 2483 bp, Zea Mays
aacgtaacaacctcggcttctacgactaggagtcgaagtcgactgacgactcacgactggcgtagcgtaggaggcggcggttccaagcgaccatccaataatcgccaccctcacgcgagaaatccccggcaacttttggggaactacacgtgtatggagttttattagtattccaggggcgtcacaatggcatactttcctgatgaagtagtagggtatatccttggttatgtaacgtcgcatcaggaccgcaacgcggtgtccttggtctgccgggcatggtacgacattgagcgtcatggccgccattcagtgcttgtaagaaactgttatgcggtgtgcccagagcgtgtacacatgcggtttcccaacatgcgtgcactgagcttgaagggcaaaccgcactttgctgaattcaaccttgtcccggcgggttggggtgccactgcaaatccatgggtggatgcgtgcgcccgtgcatgcccaggtcttgaggagctccggctgaagtttatggttgtgactgatgaatgcctcaagttgctttctctatcctttaccaactttaaatcacttgtccttgtttgttgtgaggggttcagtactaccgggcttgctaatattgccaccaattgcaggtttcttaaggaactagacttacaaaagagttgtgtgaaacatcaagaccatcagtggattaattgttttcccaagtcttcaacatcactagaatgcttgaatttttcctgcttgactggggaggtgaatgctgttgcactggaggaacttgttgcaaggagtccaaatcttaaaagtttaaggctgaatcttgcagttccatttgatgttttgtccagaatcctttctcgcacacctaagctagaggatttaggcacaggatcctttttacaaggcaatgaccctgctgcatatgccagtttatgtagagctcttgagaactgcacttcactgaagagtatatctggtttttgggatgctccaggcttttatgttcaaggaattttgtcaaattgcaagatcagaaatcttacatgcttgaatctcagctatgctacattgattcagagtacccagcttatcggtattattcgtcattgtaagaagctccatgtcttatgggggtaaggcttgccttggttattgtttccccagatcccactcatgtggaaccgccaaaattgggtttgttttgtgtttgtcttcacaagaaaaggttgctccctcaactgtatgttaatggtatccttaggggtatgagttgtaaccctgcattgatgatacccttaggattacagttgatatgatacaaccagtgttagatcacattggtgatgagggcttgaaggctgtgtccttttcttgtcctgatcttcaggagttgagggtatatccaagtgttgttgcaccaagaggtactgtgacggaggaagggttggtagccctatcttcgtgtcggaagttacagcatgtgctcttctcttgtgttcgaatgacaaacacggcgctgatgacaatagcaaggtactgcccacggctaacgtccttcagactatgcattcgcaagcccaggtcagcagacgccgtcacaggacagccactggacgaaggctttggggcgatagtgcggtcctgcagaggcctgaggcgtcttgccatgtccggcctcctcacggacagcgtgttcctgtacatcggcatgtacgcggagaagctggagatgctctcggtaacgttcgcgggggacaccgacgacggcatggtctatgtgctcaatggctgcaggaacctcaagaagctggtaatcaaggagagccccttcggtgacgccgctctcctcgcgggcgcgcacaggtacgagtcaatgcgcagtctctggatgtcgtcctgccagatcaccctgggtggctgcaaggcccttgcggccaccatgccaaacatcaatgtcgaggtcatcggtggggcgagctttggtgcgatggatggtggtgtcagcggtgcgaggaaggtggacatgctctacctctaccgtactctggctggacctagatgcgatacgccagggttcgtctcgatattgtgagctgtatctatggctactgttggtggcgttcagggaaacccgatgttcttaaccgtgcctgctgcgggctgtggctgtgctactgtctggtagtgtttcggaaacatgatgtttatttgcgtaaggtagtgtttggttctggaaccattttaagccttgttcagatattcatatacctcatggattggaagtgattagaaaaaaatatgaataattttgacttactatgtattgaaactcacttaatcccctctaatccatatgaaattgagatgaaaccgaacagacccttaatccatatgaaattgagatgaaaccgaacagacccttagatgaaatggctctgttttctagatcctaagaacagaatggcttagatgaa

SEQ ID NO: 23167 - DNA, 2860 bp, Zea Mays
ttccatctcgtcgcccccttctccgatccgatcggtctctgatcgctgcgtttcctggttcctcaaggtttattggggaatttttttagcgagttacctctttcccctcttgtgggctctgcggggaaatttagggtttagtattggggttgatcggacgatctagtgtggttaggccaacgattctccctgctgtggctcatgattttccaatttcgtgtaaatccggttcggtgtggtgccttgtttttttttctgttttctttattagggctcggattctgagtcacgaaatgaatgatcatctgatcttgtagttttgggggacttcgtctctcgtaggagggattctttggctgaggtagtgaggttgccctcggattggtccaaaaacgaaaaagttagccctcttcctcaggtccaatttggcatttttttcagaacacatacgatttctgccagtctgaagttttggactttatgtgagctgttgccaattcaactgcttctgctacacgatccattaactgctttccgatccgtgttctgtgatgtttgccctcttcctcagggccaatttggcaatttgtcagaacacacacaggcaacttttggggaactacacgtgtatggagttttattagtattccaggggcgtcacaatggcatactttcctgatgaagtagtagggtatatccttggttatgtaacgtcgcatcaggaccgcaacgcggtgtccttggtctgccgggcatggtacgacattgagcgtcatggccgccattcagtgcttgtaagaaactgttatgcggtgtgcccagagcgtgtacacatgcggtttcccaacatgcgtgcactgagcttgaagggcaaaccgcactttgctgaattcaaccttgtcccggcgggttggggtgccactgcaaatccatgggtggatgcgtgcgcccgtgcatgcccaggtcttgaggagctccggctgaagtttatggttgtgactgatgaatgcctcaagttgctttctctatcctttaccaactttaaatcacttgtccttgtttgttgtgaggggttcagtactaccgggcttgctaatattgccaccaattgcaggtttcttaaggaactagacttacaaaagagttgtgtgaaacatcaagaccatcagtggattaattgttttcccaagtcttcaacatcactagaatgcttgaatttttcctgcttgactggggaggtgaatgctgttgcactggaggaacttgttgcaaggagtccaaatcttaaaagtttaaggctgaatcttgcagttccatttgatgttttgtccagaatcctttctcgcacacctaagctagaggatttaggcacaggatcctttttacaaggcaatgaccctgctgcatatgccagtttatgtagagctcttgagaactgcacttcactgaagagtatatctggtttttgggatgctccaggcttttatgttcaaggaattttgtcaaattgcaagatcagaaatcttacatgcttgaatctcagctatgctacattgattcagagtacccagcttatcggtattattcgtcattgtaagaagctccatgtcttatgggggtaaggcttgccttggttattgtttccccagatcccactcatgtggaaccgccaaaattgggtttgttttgtgtttgtcttcacaagaaaaggtgttagatcacattggtgatgagggcttgaaggctgtgtccttttcttgtcctgatcttcaggagttgagggtatatccaagtgttgttgcaccaagaggtactgtgacggaggaagggttggtagccctatcttcgtgtcggaagttacagcatgtgctcttctcttgtgttcgaatgacaaacacggcgctgatgacaatagcaaggtactgcccacggctaacgtccttcagactatgcattcgcaagcccaggtcagcagacgccgtcacaggacagccactggacgaaggctttggggcgatagtgcggtcctgcagaggcctgaggcgtcttgccatgtccggcctcctcacggacagcgtgttcctgtacatcggcatgtacgcggagaagctggagatgctctcggtaacgttcgcgggggacaccgacgacggcatggtctatgtgctcaatggctgcaggaacctcaagaagctggtaatcaaggagagccccttcggtgacgccgctctcctcgcgggcgcgcacaggtacgagtcaatgcgcagtctctggatgtcgtcctgccagatcaccctgggtggctgcaaggcccttgcggccaccatgccaaacatcaatgtcgaggtcatcggtggggcgagctttggtgcgatggatggtggtgtcagcggtgcgaggaaggtggacatgctctacctctaccgtactctggctggacctagatgcgatacgccagggttcgtctcgatattgtgagctgtatctatggctactgttggtggcgttcagggaaacccgatgttcttaaccgtgcctgctgcgggctgtggctgtgctactgtctggtagtgtttcggaaacatgatgtttatttgcgtaaggtagtgtttggttctggaaccattttaagccttgttcagatattcatatacctcatggattggaagtgattagaaaaaaatatgaataattttgacttactatgtattgaaactcacttaatcccctctaatccatatgaaattgagatgaaaccgaacagacccttaatccatatgaaattgagatgaaaccgaacagacccttagatgaaatggctctgttttctagatcctaagaacagaatggcttagatgaa

SEQ ID NO: 23168 - DNA, 2322 bp, Zea Mays
cttctttatatgcctttttcttgttaatagataatataattaacacatagttaataatattaaaatcatggaatatatatttaatagtattcgtgttaactcttgtcgattagtagaactttacaaccaaggtctgctttgtgcaaactggcccgtagaggagtaccaaattggcgttcattgctgcaaatgttcgttacttaatgcctctagctgataatataaaattctgtccatgttgtttgtttgtgagcaggcaacttttggggaactacacgtgtatggagttttattagtattccaggggcgtcacaatggcatactttcctgatgaagtagtagggtatatccttggttatgtaacgtcgcatcaggaccgcaacgcggtgtccttggtctgccgggcatggtacgacattgagcgtcatggccgccattcagtgcttgtaagaaactgttatgcggtgtgcccagagcgtgtacacatgcggtttcccaacatgcgtgcactgagcttgaagggcaaaccgcactttgctgaattcaaccttgtcccggcgggttggggtgccactgcaaatccatgggtggatgcgtgcgcccgtgcatgcccaggtcttgaggagctccggctgaagtttatggttgtgactgatgaatgcctcaagttgctttctctatcctttaccaactttaaatcacttgtccttgtttgttgtgaggggttcagtactaccgggcttgctaatattgccaccaattgcaggtttcttaaggaactagacttacaaaagagttgtgtgaaacatcaagaccatcagtggattaattgttttcccaagtcttcaacatcactagaatgcttgaatttttcctgcttgactggggaggtgaatgctgttgcactggaggaacttgttgcaaggagtccaaatcttaaaagtttaaggctgaatcttgcagttccatttgatgttttgtccagaatcctttctcgcacacctaagctagaggatttaggcacaggatcctttttacaaggcaatgaccctgctgcatatgccagtttatgtagagctcttgagaactgcacttcactgaagagtatatctggtttttgggatgctccaggcttttatgttcaaggaattttgtcaaattgcaagatcagaaatcttacatgcttgaatctcagctatgctacattgattcagagtacccagcttatcggtattattcgtcattgtaagaagctccatgtcttatgggggtaaggcttgccttggttattgtttccccagatcccactcatgtggaaccgccaaaattgggtttgttttgtgtttgtcttcacaagaaaaggtgttagatcacattggtgatgagggcttgaaggctgtgtccttttcttgtcctgatcttcaggagttgagggtatatccaagtgttgttgcaccaagaggtactgtgacggaggaagggttggtagccctatcttcgtgtcggaagttacagcatgtgctcttctcttgtgttcgaatgacaaacacggcgctgatgacaatagcaagctggagatgctctcggtaacgttcgcgggggacaccgacgacggcatggtctatgtgctcaatggctgcaggaacctcaagaagctggtaatcaaggagagccccttcggtgacgccgctctcctcgcgggcgcgcacaggtacgagtcaatgcgcagtctctggatgtcgtcctgccagatcaccctgggtggctgcaaggcccttgcggccaccatgccaaacatcaatgtcgaggtcatcggtggggcgagctttggtgcgatggatggtggtgtcagcggtgcgaggaaggtggacatgctctacctctaccgtactctggctggacctagatgcgatacgccagggttcgtctcgatattgtgagctgtatctatggctactgttggtggcgttcagggaaacccgatgttcttaaccgtgcctgctgcgggctgtggctgtgctactgtctggtagtgtttcggaaacatgatgtttatttgcgtaaggtagtgtttggttctggaaccattttaagccttgttcagatattcatatacctcatggattggaagtgattagaaaaaaatatgaataattttgacttactatgtattgaaactcacttaatcccctctaatccatatgaaattgagatgaaaccgaacagacccttaatccatatgaaattgagatgaaaccgaacagacccttagatgaaatggctctgttttctagatcctaagaacagaatggcttagatgaa

SEQ ID NO: 23169 - DNA, 2418 bp, Zea Mays
cttctttatatgcctttttcttgttaatagataatataattaacacatagttaataatattaaaatcatggaatatatatttaatagtattcgtgttaactcttgtcgattagtagaactttacaaccaaggtctgctttgtgcaaactggcccgtagaggagtaccaaattggcgttcattgctgcaaatgttcgttacttaatgcctctagctgataatataaaattctgtccatgttgtttgtttgtgagcaggcaacttttggggaactacacgtgtatggagttttattagtattccaggggcgtcacaatggcatactttcctgatgaagtagtagggtatatccttggttatgtaacgtcgcatcaggaccgcaacgcggtgtccttggtctgccgggcatggtacgacattgagcgtcatggccgccattcagtgcttgtaagaaactgttatgcggtgtgcccagagcgtgtacacatgcggtttcccaacatgcgtgcactgagcttgaagggcaaaccgcactttgctgaattcaaccttgtcccggcgggttggggtgccactgcaaatccatgggtggatgcgtgcgcccgtgcatgcccaggtcttgaggagctccggctgaagtttatggttgtgactgatgaatgcctcaagttgctttctctatcctttaccaactttaaatcacttgtccttgtttgttgtgaggggttcagtactaccgggcttgctaatattgccaccaattgcaggtttcttaaggaactagacttacaaaagagttgtgtgaaacatcaagaccatcagtggattaattgttttcccaagtcttcaacatcactagaatgcttgaatttttcctgcttgactggggaggtgaatgctgttgcactggaggaacttgttgcaaggagtccaaatcttaaaagtttaaggctgaatcttgcagttccatttgatgttttgtccagaatcctttctcgcacacctaagctagaggatttaggcacaggatcctttttacaaggcaatgaccctgctgcatatgccagtttatgtagagctcttgagaactgcacttcactgaagagtatatctggtttttgggatgctccaggcttttatgttcaaggaattttgtcaaattgcaagatcagaaatcttacatgcttgaatctcagctatgctacattgattcagagtacccagcttatcggtattattcgtcattgtaagaagctccatgtcttatgggtgttagatcacattggtgatgagggcttgaaggctgtgtccttttcttgtcctgatcttcaggagttgagggtatatccaagtgttgttgcaccaagaggtactgtgacggaggaagggttggtagccctatcttcgtgtcggaagttacagcatgtgctcttctcttgtgttcgaatgacaaacacggcgctgatgacaatagcaaggtactgcccacggctaacgtccttcagactatgcattcgcaagcccaggtcagcagacgccgtcacaggacagccactggacgaaggctttggggcgatagtgcggtcctgcagaggcctgaggcgtcttgccatgtccggcctcctcacggacagcgtgttcctgtacatcggcatgtacgcggagaagctggagatgctctcggtaacgttcgcgggggacaccgacgacggcatggtctatgtgctcaatggctgcaggaacctcaagaagctggtaatcaaggagagccccttcggtgacgccgctctcctcgcgggcgcgcacaggtacgagtcaatgcgcagtctctggatgtcgtcctgccagatcaccctgggtggctgcaaggcccttgcggccaccatgccaaacatcaatgtcgaggtcatcggtggggcgagctttggtgcgatggatggtggtgtcagcggtgcgaggaaggtggacatgctctacctctaccgtactctggctggacctagatgcgatacgccagggttcgtctcgatattgtgagctgtatctatggctactgttggtggcgttcagggaaacccgatgttcttaaccgtgcctgctgcgggctgtggctgtgctactgtctggtagtgtttcggaaacatgatgtttatttgcgtaaggtagtgtttggttctggaaccattttaagccttgttcagatattcatatacctcatggattggaagtgattagaaaaaaatatgaataattttgacttactatgtattgaaactcacttaatcccctctaatccatatgaaattgagatgaaaccgaacagacccttaatccatatgaaattgagatgaaaccgaacagacccttagatgaaatggctctgttttctagatcctaagaacagaatggcttagatgaa

SEQ ID NO: 23170 - DNA, 56 bp, Zea Mays
cgataagtttagtcttagggggtgtttgaatgcactaaaactaatagttagttagc

SEQ ID NO: 23171 - DNA, 531 bp, Zea Mays
atggagatgaacgggagtacggatggaaggaattggacctcggcgaaggtttcgttgaaggagatgcggtggccatccttctcagtgtccaccagcacaccatcgcaatcgaacaacagcgccgccggaaaggcaccggccggcgcggccctgtcgccagccgctgccacgcgcactaccgatgctctccgcccactgacggcgcggatgcagcagacaacgccgcttgggacggggcgcgcaatagagaagttgcttgcccgcagcagcgtggatgatgccgcggcgggggcggcggctgccgccattgacatggcttttttgagcggggatatcgcgcgcctgtggctgaagatgtggcgtgaggattttacaggtggcgtttggtgttgtgggtctggagggtgggaaactgggaatagaaatgaggacaagaggaggaatcttatccgacgattgcttcctctgaagccgaaaaaaagtagactacccctcaacttgtattgttgtatttggttcctaaacttttga

SEQ ID NO: 23172 - DNA, 4445 bp, Zea Mays
ccagagtgtagtctttgtgcgtattcatcgtatcgtattcagagtcgaagaactgcctcaagaaaaattcttcatatctgtatgggtgaaggaaggaatcacaagaaaaaactagttgtattgaaaccgtaaataaaccatgttaggaaacaggccctcagctcagcttctttgtactagtcggcccaaatagcatgccaaggggcaagcgcccaagctcacccgcgacgtcaagcctgccctaacctcgtgtttcccttgctcggcttcaccccatcgccgccgtcgcaacgtgcccgcctgtttcccttgctcgacttcaccccatcgccgccgccgccgtcgcaagcgacgatgctcgacatcaacttgttccgcaccgacaagggcggcaacccggagcttattcgtgagtcccagcgcagccggttcgcctccgtcgagctcgtcgacgaggtcatcgccctcgacaaggcatggcgcgaaaggcagttcgagctggacaagatccggcaggagctcaacgctaccagcaagaagattggcaagctcaaagccagcaagcaagaagaggaagcgaagaagctcatggagagcacagacgaaattaagaaaaggttggcagccaaagaagttgaggtgcaggaggccaagagcaccctcgacgccaagctcacgacgattgggaacatcgtgcatgagtccgtgccagtcagcgaagacgaggcaaacaataaaattgtacggacatttggagagaagagagtagaggaaaatttgaagaatcacgtggacctttgcaggatgcttgacattgtcgcattggagaagggtgctgatgtggctggtggtaggggtttctatttaaaggatgaaggtgtcctccttaacctggcattgataaattttgggctagcctttctgagaaaacggggatttaaaccaatgcaaactccctttttcatgagaaaggaaactatggcaaaatgtgcccagttggcccagtttgatgaggagctttacaaagttacaggtgatggtgaagacaaatatctcatagctacatcagagcagcctttatgtgcttatcacttaggtgatagaatataccctgctgaacttccaatcaaatatgctgggtactccacatgcttccggaaggaagctggttcgcatggaagggacacagctggtatcttcagagtccaccagtttgaaaaaatcgaacaattctgcattacaagcccaaatgacaacgattcttgggagatgcatgaagagatgctaaaaaactcagaagattactataaggagattgggctaccataccaagttgtttccattgtctctggcgctcttaatgatgctgctgctaagaaatatgatttggaagcatggttccctgcatcaaagaccttccgagagttagtatcctgttcaaactgcactgactttcagtcaaggagacttggaattgggtatggccagaaaaagaatgatgagcagtccaagcagtttgttcatatgctgaactctaccttgactgccactgagaggaccctctgttgtattctggagaatttccaaaaggaggacggcgtcgaggtgccaaaggcactgcaaccttatatgggtggaatagagtttcttcctttcaagcaacctttggatgtcaaacaagcttctgactccaaatcaaacaagtccaaatcaaagggaaatgctgcttgagctggatgaggaacactatgttaatttttgggcctaccagtacacaatacccatagcatgactatggcgttgcaggttttcgttttacccattttggtttcttggttgccacattatctaatgacctacctggcatacttatattgcaatagcatttcttgaaatctggaatatttgaccaccatcagctctaccggctgtgtttatcgcgttgccacagaacgctgcttgtttgtctccgaaaccaccagtgttctctgtagcacattagtaacaatttgctggtggatttgatatcatcttttttgaatgatggtgtattggtgtacttgtgatcgataatgaaaaagacatcttgtgttagtggcatctagtgctgttgtggctggaacctggaattgttcttggattctcccttcgcatctcttattttgaaacccggtgcggattgttcgcacgagagcgttttctgacggggtgggagtgcctccacctgtaagtcccagacgtgaaatcttcattcaattgcgctctgagcggggttccgacgcagcttcctcacgtgcctagccttccacacttctctgtctgcccacccgtcgccgcctcatcctcctagggttagggctcgcgtcgcggggggccgtggcgcctggtgcaatgcggaaaccgttggggccggcgctctgtgcatccgtctccgcgcgatctaggggtggctgccgcagcgtcgcggaagctcgacctctatgacgcgaggcaagcaatgccggcgcgtctcgtgaagagcatccgcacagggaggccctctcgacggacgcatggtggcgatgggcgcaccggttagcgtggatcgtctctggcctcgacctcccgccacctcaactctacatgccctggcttgctccgcaaggcatgatatgctgttcggggagcctgggaagagtggtctcgtggctctcaacttggatttcgatcaagtcaagaagtttatcaaggagcggctggggattgaggttgagatgggtggttgcaaggcttaattacgaccttcatcgtcgagccatttgtgccacatgatcaagactactagctttcgattatttcagagaggttgggcagcaccatcagcttctcagagtgtggagggattgagatcgaggagaactgggacaaagttaagactatttttcttcctactgagaagccaacgaggcaacgacgtctgattcatgtgctcctttgattgcgacccatccattggaggcacacagaaaaattggcgacttcattaaaggagtatttgctgtcttccaagatgaatccgttcactatggtcaacggggagacatatcctctggacatcagaggagaactagatgacacaacagccttcaaaaacttcaagaagtgaatctgataaacagggataccatttcttgttgtcattgttggatttactcttatcaattgtgcaggtggggaggtatagaattccctctaccttttggaagagtactcagccctacagaaagtttcatccatgaactagatgagaaggtattgatctctgggctatatttttatctgtatttctttccctggggtctatcacatataaaataatcagtttccatgagaaatacgggatctgcagtgtattctgttgatgtgtgttaattcgccaaccttgttatttcagacaagtgcttgttcttttgtgctactttgcatgtcctgttgatgttataccctgatttaaggctgttcttcattttccttgcgactggatttgaacctgaggacgatgtttgtaggaccatgcatctattgtatttaaagtttaaattaaacataaccacctttttctaatgaaaatatgatgctgcgcttacctgtgttaaatttagtagttcccctttcactgagctaataaaaagttgctttgttgtgatgccatggctagcaagttctttcatctttgtttgccattctattgttgatagtgagagtgagcatgaggtgcacgctgatgtactcaagcggttcaaactgccagcgaagatcatgtagagctcctctcttcactttcactaccacacacacaaagagttctcagtgtttccttttgtatgcagggagttttccgtaccgccgacatgtgaacgatttatatagggacttccctactactgctttaacacttctggactatctacttgcggtgtttgtcaattgagataatcttgggaaagagtgacaaattcgatgagttgatggttgctgccgccgccgagaggcgagaagttgaagatgaagagcaggcttgaaaaaacagtgccgaccatccctgccacgcgtgacgcctccgccggcccccgtaggatcctttcgtctcctgctgtggcctcttcattcgcagccgccccatcagcccatcctccacggctggcctgaatcgccttgcagccccttgtcttccccgtccgcctcttttactgatttgtttgaaaggtcgaaaccttatatagtgctagatgtcttagcagtaacatcggtactactggctaatactggctactgagctaggtggtcctcaacattgcgacctaaagctgaaaacattttgctatgtttgtttggtctccttgcatgtaaaaatggctccctaaaaacttttgttttggggaacatggttccaaatgtctctttat

SEQ ID NO: 23173 - DNA, 2822 bp, Zea Mays
ccagagtgtagtctttgtgcgtattcatcgtatcgtattcagagtcgaagaactgcctcaagaaaaattcttcatatctgtatgggtgaaggaaggaatcacaagaaaaaactagttgtattgaaaccgtaaataaaccatgttaggaaacaggccctcagctcagcttctttgtactagtcggcccaaatagcatgccaaggggcaagcgcccaagctcacccgcgacgtcaagcctgccctaacctcgtgtttcccttgctcggcttcaccccatcgccgccgtcgcaacgtgcccgcctgtttcccttgctcgacttcaccccatcgccgccgccgccgtcgcaagcgacgatgctcgacatcaacttgttccgcaccgacaagggcggcaacccggagcttattcgtgagtcccagcgcagccggttcgcctccgtcgagctcgtcgacgaggtcatcgccctcgacaaggcatggcgcgaaaggcagttcgagctggacaagatccggcaggagctcaacgctaccagcaagaagattggcaagctcaaagccagcaagcaagaagaggaagcgaagaagctcatggagagcacagacgaaattaagaaaaggttggcagccaaagaagttgaggtgcaggaggccaagagcaccctcgacgccaagctcacgacgattgggaacatcgtgcatgagtccgtgccagtcagcgaagacgaggcaaacaataaaattgtacggacatttggagagaagagagtagaggaaaatttgaagaatcacgtggacctttgcaggatgcttgacattgtcgcattggagaagggtgctgatgtggctggtggtaggggtttctatttaaaggatgaaggtgtcctccttaacctggcattgataaattttgggctagcctttctgagaaaacggggatttaaaccaatgcaaactccctttttcatgagaaaggaaactatggcaaaatgtgcccagttggcccagtttgatgaggagctttacaaagttacaggtgatggtgaagacaaatatctcatagctacatcagagcagcctttatgtgcttatcacttaggtgatagaatataccctgctgaacttccaatcaaatatgctgggtactccacatgcttccggaaggaagctggttcgcatggaagggacacagctggtatcttcagagtccaccagtttgaaaaaatcgaacaattctgcattacaagcccaaatgacaacgattcttgggagatgcatgaagagatgctaaaaaactcagaagattactataaggagattgggctaccataccaagttgtttccattgtctctggcgctcttaatgatgctgctgctaagaaatatgatttggaagcatggttccctgcatcaaagaccttccgagagttagtatcctgttcaaactgcactgactttcagtcaaggagacttggaattgggtatggccagaaaaagaatgatgagcagtccaagcagtttgttcatatgctgaactctaccttgactgccactgagaggaccctctgttgtattctggagaatttccaaaaggaggacggcgtcgaggtgccaaaggcactgcaaccttatatgggtggaatagagtttcttcctttcaagcaacctttggatgtcaaacaagcttctgactccaaatcaaacaagtccaaatcaaagggaaatgctgcttgagctggatgaggaacactatgttaatttttgggcctaccagtacacaatacccatagcatgactatggcgttgcagagaggttgggcagcaccatcagcttctcagagtgtggagggattgagatcgaggagaactgggacaaagttaagactatttttcttcctactgagaagccaacgaggcaacgacgtctgattcatgtgctcctttgattgcgacccatccattggaggcacacagaaaaattggcgacttcattaaaggagtatttgctgtcttccaagatgaatccgttcactatggtcaacggggagacatatcctctggacatcagaggagaactagatgacacaacagccttcaaaaacttcaagaagtggggaggtatagaattccctctaccttttggaagagtactcagccctacagaaagtttcatccatgaactagatgagaagattgagataatcttgggaaagagtgacaaattcgatgagttgatggttgctgccgccgccgagaggcgagaagttgaagatgaagagcaggcttgaaaaaacagtgccgaccatccctgccacgcgtgacgcctccgccggcccccgtaggatcctttcgtctcctgctgtggcctcttcattcgcagccgccccatcagcccatcctccacggctggcctgaatcgccttgcagccccttgtcttccccgtccgcctcttttactgatttgtttgaaaggtaacagtgtgttgctcttttgttgttttgatgattctaactgaatgtataaagaagtcccctctccgatgcatcctatacatgttccttcccctcattgcatgtctccctactctttgcagtcataaccattttattgtcttttgttgctaggtcgaaaccttatatagtgctagatgtcttagcagtaacatcggtactactggctaatactggctactgagctaggtggtcctcaacattgcgacctaaagctgaaaacattttgctatgtttgtttggtctccttgcatgtaaaaatggctccctaaaaacttttgttttggggaacatggttccaaatgtctctttat

SEQ ID NO: 23174 - DNA, 4233 bp, Zea Mays
gaagaactgcctcaagaaaaattcttcatatctgtatgggtgaaggaaggaatcacaagaaaaaactagttgtattgaaaccgtaaataaaccatgttaggaaacaggccctcagctcagcttctttgtactagtcggcccaaatagcatgccaaggggcaagcgcccaagctcacccgcgacgtcaagcctgccctaacctcgtgtttcccttgctcggcttcaccccatcgccgccgtcgcaaccgacgatgctcgacatcaacttgttccgcaccgacaagggcggcaacccggagcttattcgtgagtcccagcgcagccggttcgcctccgtcgagctcgtcgacgaggtcatcgccctcgacaaggcatggcgcgaaaggcagttcgagctggacaagatccggcaggagctcaacgctaccagcaagaagattggcaagctcaaagccagcaagcaagaagaggaagcgaagaagctcatggagagcacagacgaaattaagaaaaggttggcagccaaagaagttgaggtgcaggaggccaagagcaccctcgacgccaagctcacgacgattgggaacatcgtgcatgagtccgtgccagtcagcgaagacgaggcaaacaataaaattgtacggacatttggagagaagagagtagaggaaaatttgaagaatcacgtggacctttgcaggatgcttgacattgtcgcattggagaagggtgctgatgtggctggtggtaggggtttctatttaaaggatgaaggtgtcctccttaacctggcattgataaattttgggctagcctttctgagaaaacggggatttaaaccaatgcaaactccctttttcatgagaaaggaaactatggcaaaatgtgcccagttggcccagtttgatgaggagctttacaaagttacaggtgatggtgaagacaaatatctcatagctacatcagagcagcctttatgtgcttatcacttaggtgatagaatataccctgctgaacttccaatcaaatatgctgggtactccacatgcttccggaaggaagctggttcgcatggaagggacacagctggtatcttcagagtccaccagtttgaaaaaatcgaacaattctgcattacaagcccaaatgacaacgattcttgggagatgcatgaagagatgctaaaaaactcagaagattactataaggagattgggctaccataccaagttgtttccattgtctctggcgctcttaatgatgctgctgctaagaaatatgatttggaagcatggttccctgcatcaaagaccttccgagagttagtatcctgttcaaactgcactgactttcagtcaaggagacttggaattgggtatggccagaaaaagaatgatgagcagtccaagcagtttgttcatatgctgaactctaccttgactgccactgagaggaccctctgttgtattctggagaatttccaaaaggaggacggcgtcgaggtgccaaaggcactgcaaccttatatgggtggaatagagtttcttcctttcaagcaacctttggatgtcaaacaagcttctgactccaaatcaaacaagtccaaatcaaagggaaatgctgcttgagctggatgaggaacactatgttaatttttgggcctaccagtacacaatacccatagcatgactatggcgttgcaggttttcgttttacccattttggtttcttggttgccacattatctaatgacctacctggcatacttatattgcaatagcatttcttgaaatctggaatatttgaccaccatcagctctaccggctgtgtttatcgcgttgccacagaacgctgcttgtttgtctccgaaaccaccagtgttctctgtagcacattagtaacaatttgctggtggatttgatatcatcttttttgaatgatggtgtattggtgtacttgtgatcgataatgaaaaagacatcttgtgttagtggcatctagtgctgttgtggctggaacctggaattgttcttggattctcccttcgcatctcttattttgaaacccggtgcggattgttcgcacgagagcgttttctgacggggtgggagtgcctccacctggttagggctcgcgtcgcggggggccgtggcgcctggtgcaatgcggaaaccgttggggccggcgctctgtgcatccgtctccgcgcgatctaggtgctggtggcgttctccctgatcgacgcgctcgccatgttattcttattcctcgaatcgccccttgtgtttacgtcgctgctcggggcaggggtggctgccgcagcgtcgcggaagctcgacctctatgacgcgaggcaagcaatgccggcgcgtctcgtgaagagcatccgcacagggaggccctctcgacggacgcatggtggcgatgggcgcaccggttagcgtggatcgtctctggcctcgacctcccgccacctcaactctacatgccctggcttgctccgcaaggcatgatatgctgttcggggagcctgggaagagtggtctcgtggctctcaacttggatttcgatcaagtcaagaagtttatcaaggagcggctggggattgaggttgagatgggtggttgcaaggcttaattacgaccttcatcgtcgagccatttgtgccacatgatcaagactactagctttcgattatttcagagaggttgggcagcaccatcagcttctcagagtgtggagggattgagatcgaggagaactgggacaaagttaagactatttttcttcctactgagaagccaacgaggcaacgacgtctgattcatgtgctcctttgattgcgacccatccattggaggcacacagaaaaattggcgacttcattaaaggagtatttgctgtcttccaaggtggggaggtatagaattccctctaccttttggaagagtactcagccctacagaaagtttcatccatgaactagatgagaaggtattgatctctgggctatatttttatctgtatttctttccctggggtctatcacatataaaataatcagtttccatgagaaatacgggatctgcagtgtattctgttgatgtgtgttaattcgccaaccttgttatttcagacaagtgcttgttcttttgtgctactttgcatgtcctgttgatgttataccctgatttaaggctgttcttcattttccttgcgactggatttgaacctgaggacgatgtttgtaggaccatgcatctattgtatttaaagtttaaattaaacataaccacctttttctaatgaaaatatgatgctgcgcttacctgtgttaaatttagtagttcccctttcactgagctaataaaaagttgctttgttgtgatgccatggctagcaagttctttcatctttgtttgccattctattgttgatagtgagagtgagcatgaggtgcacgctgatgtactcaagcggttcaaactgccagcgaagatcatggagttttccgtaccgccgacatgtgaacgatttatatagggacttccctactactgctttaacacttctggactatctacttgcggtgtttgtcaattgagataatcttgggaaagagtgacaaattcgatgagttgatggttgctgccgccgccgagaggcgagaagttgaagatgaagagcaggcttgaaaaaacagtgccgaccatccctgccacgcgtgacgcctccgccggcccccgtaggatcctttcgtctcctgctgtggcctcttcattcgcagccgccccatcagcccatcctccacggctggcctgaatcgccttgcagccccttgtcttccccgtccgcctcttttactgatttgtttgaaaggtaacagtgtgttgctcttttgttgttttgatgattctaactgaatgtataaagaagtcccctctccgatgcatcctatacatgttccttcccctcattgcatgtctccctactctttgcagtcataaccattttattgtcttttgttgctaggtcgaaaccttatatagtgctagatgtcttagcagtaacatcggtactactggctaatactggctactgagctaggtggtcctcaacattgcgacctaaagctgaaaacattttgctatgtttgtttggtctccttgcatgtaaaaatggctccctaaaaacttttgttttggggaacatggttccaaatgtctctttat

SEQ ID NO: 23175 - DNA, 3846 bp, Zea Mays
aaaaaactagttgtattgaaaccgtaaataaaccatgttaggaaacaggccctcagctcagcttctttgtactagtcggcccaaatagcatgccaaggggcaagcgcccaagctcacccgcgacgtcaagcctgccctaacctcgtgtttcccttgctcggcttcaccccatcgccgccgtcgcaacgtgcccgcctgtttcccttgctcgacttcaccccatcgccgccgccgccgtcgcaagcgacgatgctcgacatcaacttgttccgcaccgacaagggcggcaacccggagcttattcgtgagtcccagcgcagccggttcgcctccgtcgagctcgtcgacgaggtcatcgccctcgacaaggcatggcgcgaaaggcagttcgagctggacaagatccggcaggagctcaacgctaccagcaagaagattggcaagctcaaagccagcaagcaagaagaggaagcgaagaagctcatggagagcacagacgaaattaagaaaaggttggcagccaaagaagttgaggtgcaggaggccaagagcaccctcgacgccaagctcacgacgattgggaacatcgtgcatgagtccgtgccagtcagcgaagacgaggcaaacaataaaattgtacggacatttggagagaagagagtagaggaaaatttgaagaatcacgtggacctttgcaggatgcttgacattgtcgcattggagaagggtgctgatgtggctggtggtaggggtttctatttaaaggatgaaggtgtcctccttaacctggcattgataaattttgggctagcctttctgagaaaacggggatttaaaccaatgcaaactccctttttcatgagaaaggaaactatggcaaaatgtgcccagttggcccagtttgatgaggagctttacaaagttacaggtgatggtgaagacaaatatctcatagctacatcagagcagcctttatgtgcttatcacttaggtgatagaatataccctgctgaacttccaatcaaatatgctgggtactccacatgcttccggaaggaagctggttcgcatggaagggacacagctggtatcttcagagtccaccagtttgaaaaaatcgaacaattctgcattacaagcccaaatgacaacgattcttgggagatgcatgaagagatgctaaaaaactcagaagattactataaggagattgggctaccataccaagttgtttccattgtctctggcgctcttaatgatgctgctgctaagaaatatgatttggaagcatggttccctgcatcaaagaccttccgagagttagtatcctgttcaaactgcactgactttcagtcaaggagacttggaattgggtatggccagaaaaagaatgatgagcagtccaagcagtttgttcatatgctgaactctaccttgactgccactgagaggaccctctgttgtattctggagaatttccaaaaggaggacggcgtcgaggtgccaaaggcactgcaaccttatatgggtggaatagagtttcttcctttcaagcaacctttggatgtcaaacaagcttctgactccaaatcaaacaagtccaaatcaaagggaaatgctgcttgagctggatgaggaacactatgttaatttttgggcctaccagtacacaatacccatagcatgactatggcgttgcaggttttcgttttacccattttggtttcttggttgccacattatctaatgacctacctggcatacttatattgcaatagcatttcttgaaatctggaatatttgaccaccatcagctctaccggctgtgtttatcgcgttgccacagaacgctgcttgtttgtctccgaaaccaccagtgttctctgtagcacattagtaacaatttgctggtggatttgatatcatcttttttgaatgatggtgtattggtgtacttgtgatcgataatgaaaaagacatcttgtgttagtggcatctagtgctgttgtggctggaacctggaattgttcttggattctcccttcgcatctcttattttgaaacccggtgcggattgttcgcacgagagcgttttctgacggggtgggagtgcctccacctgtaagtcccagacgtgaaatcttcattcaattgcgctctgagcggggttccgacgcagcttcctcacgtgcctagccttccacacttctctgtctgcccacccgtcgccgcctcatcctcctagggttagggctcgcgtcgcggggggccgtggcgcctggtgcaatgcggaaaccgttggggccggcgctctgtgcatccgtctccgcgcgatctaggtgctggtggcgttctccctgatcgacgcgctcgccatgttattcttattcctcgaatcgccccttgtgtttacgtcgctgctcggggcaggggtggctgccgcagcgtcgcggaagctcgacctctatgacgcgaggcaagcaatgccggcgcgtctcgtgaagagcatccgcacagggaggccctctcgacggacgcatggtggcgatgggcgcaccggttagcgtggatcgtctctggcctcgacctcccgccacctcaactctacatgccctggcttgctccgcaaggcatgatatgctgttcggggagcctgggaagagtggtctcgtggctctcaacttggatttcgatcaagtcaagaagtttatcaaggagcggctggggattgaggttgagatgggtggttgcaaggcttaattacgaccttcatcgtcgagccatttgtgccacatgatcaagactactagctttcgattatttcagagaggttgggcagcaccatcagcttctcagagtgtggagggattgagatcgaggagaactgggacaaagttaagactatttttcttcctactgagaagccaacgaggcaacgacgtctgattcatgtgctcctttgattgcgacccatccattggaggcacacagaaaaattggcgacttcattaaaggagtatttgctgtcttccaaggtggggaggtatagaattccctctaccttttggaagagtactcagccctacagaaagtttcatccatgaactagatgagaagggagttttccgtaccgccgacatgtgaacgatttatatagggacttccctactactgctttaacacttctggactatctacttgcggtgtttgtcaattgagataatcttgggaaagagtgacaaattcgatgagttgatggttgctgccgccgccgagaggcgagaagttgaagatgaagagcaggcttgaaaaaacagtgccgaccatccctgccacgcgtgacgcctccgccggcccccgtaggatcctttcgtctcctgctgtggcctcttcattcgcagccgccccatcagcccatcctccacggctggcctgaatcgccttgcagccccttgtcttccccgtccgcctcttttactgatttgtttgaaaggtaacagtgtgttgctcttttgttgttttgatgattctaactgaatgtataaagaagtcccctctccgatgcatcctatacatgttccttcccctcattgcatgtctccctactctttgcagtcataaccattttattgtcttttgttgctaggtcgaaaccttatatagtgctagatgtcttagcagtaacatcggtactactggctaatactggctactgagctaggtggtcctcaacattgcgacctaaagctgaaaacattttgctatgtttgtttggtctccttgcatgtaaaaatggctccctaaaaacttttgttttggggaacatggttccaaatgtctctttat

SEQ ID NO: 23176 - DNA, 3817 bp, Zea Mays
aaataaaccatgttaggaaacaggccctcagctcagcttctttgtactagtcggcccaaatagcatgccaaggggcaagcgcccaagctcacccgcgacgtcaagcctgccctaacctcgtgtttcccttgctcggcttcaccccatcgccgccgtcgcaacgtgcccgcctgtttcccttgctcgacttcaccccatcgccgccgccgccgtcgcaagcgacgatgctcgacatcaacttgttccgcaccgacaagggcggcaacccggagcttattcgtgagtcccagcgcagccggttcgcctccgtcgagctcgtcgacgaggtcatcgccctcgacaaggcatggcgcgaaaggcagttcgagctggacaagatccggcaggagctcaacgctaccagcaagaagattggcaagctcaaagccagcaagcaagaagaggaagcgaagaagctcatggagagcacagacgaaattaagaaaaggttggcagccaaagaagttgaggtgcaggaggccaagagcaccctcgacgccaagctcacgacgattgggaacatcgtgcatgagtccgtgccagtcagcgaagacgaggcaaacaataaaattgtacggacatttggagagaagagagtagaggaaaatttgaagaatcacgtggacctttgcaggatgcttgacattgtcgcattggagaagggtgctgatgtggctggtggtaggggtttctatttaaaggatgaaggtgtcctccttaacctggcattgataaattttgggctagcctttctgagaaaacggggatttaaaccaatgcaaactccctttttcatgagaaaggaaactatggcaaaatgtgcccagttggcccagtttgatgaggagctttacaaagttacaggtgatggtgaagacaaatatctcatagctacatcagagcagcctttatgtgcttatcacttaggtgatagaatataccctgctgaacttccaatcaaatatgctgggtactccacatgcttccggaaggaagctggttcgcatggaagggacacagctggtatcttcagagtccaccagtttgaaaaaatcgaacaattctgcattacaagcccaaatgacaacgattcttgggagatgcatgaagagatgctaaaaaactcagaagattactataaggagattgggctaccataccaagttgtttccattgtctctggcgctcttaatgatgctgctgctaagaaatatgatttggaagcatggttccctgcatcaaagaccttccgagagttagtatcctgttcaaactgcactgactttcagtcaaggagacttggaattgggtatggccagaaaaagaatgatgagcagtccaagcagtttgttcatatgctgaactctaccttgactgccactgagaggaccctctgttgtattctggagaatttccaaaaggaggacggcgtcgaggtgccaaaggcactgcaaccttatatgggtggaatagagtttcttcctttcaagcaacctttggatgtcaaacaagcttctgactccaaatcaaacaagtccaaatcaaagggaaatgctgcttgagctggatgaggaacactatgttaatttttgggcctaccagtacacaatacccatagcatgactatggcgttgcaggttttcgttttacccattttggtttcttggttgccacattatctaatgacctacctggcatacttatattgcaatagcatttcttgaaatctggaatatttgaccaccatcagctctaccggctgtgtttatcgcgttgccacagaacgctgcttgtttgtctccgaaaccaccagtgttctctgtagcacattagtaacaatttgctggtggatttgatatcatcttttttgaatgatggtgtattggtgtacttgtgatcgataatgaaaaagacatcttgtgttagtggcatctagtgctgttgtggctggaacctggaattgttcttggattctcccttcgcatctcttattttgaaacccggtgcggattgttcgcacgagagcgttttctgacggggtgggagtgcctccacctgtaagtcccagacgtgaaatcttcattcaattgcgctctgagcggggttccgacgcagcttcctcacgtgcctagccttccacacttctctgtctgcccacccgtcgccgcctcatcctcctagggttagggctcgcgtcgcggggggccgtggcgcctggtgcaatgcggaaaccgttggggccggcgctctgtgcatccgtctccgcgcgatctaggtgctggtggcgttctccctgatcgacgcgctcgccatgttattcttattcctcgaatcgccccttgtgtttacgtcgctgctcggggcaggggtggctgccgcagcgtcgcggaagctcgacctctatgacgcgaggcaagcaatgccggcgcgtctcgtgaagagcatccgcacagggaggccctctcgacggacgcatggtggcgatgggcgcaccggttagcgtggatcgtctctggcctcgacctcccgccacctcaactctacatgccctggcttgctccgcaaggcatgatatgctgttcggggagcctgggaagagtggtctcgtggctctcaacttggatttcgatcaagtcaagaagtttatcaaggagcggctggggattgaggttgagatgggtggttgcaaggcttaattacgaccttcatcgtcgagccatttgtgccacatgatcaagactactagctttcgattatttcagagaggttgggcagcaccatcagcttctcagagtgtggagggattgagatcgaggagaactgggacaaagttaagactatttttcttcctactgagaagccaacgaggcaacgacgtctgattcatgtgctcctttgattgcgacccatccattggaggcacacagaaaaattggcgacttcattaaaggagtatttgctgtcttccaaggtggggaggtatagaattccctctaccttttggaagagtactcagccctacagaaagtttcatccatgaactagatgagaagggagttttccgtaccgccgacatgtgaacgatttatatagggacttccctactactgctttaacacttctggactatctacttgcggtgtttattgagataatcttgggaaagagtgacaaattcgatgagttgatggttgctgccgccgccgagaggcgagaagttgaagatgaagagcaggcttgaaaaaacagtgccgaccatccctgccacgcgtgacgcctccgccggcccccgtaggatcctttcgtctcctgctgtggcctcttcattcgcagccgccccatcagcccatcctccacggctggcctgaatcgccttgcagccccttgtcttccccgtccgcctcttttactgatttgtttgaaaggtaacagtgtgttgctcttttgttgttttgatgattctaactgaatgtataaagaagtcccctctccgatgcatcctatacatgttccttcccctcattgcatgtctccctactctttgcagtcataaccattttattgtcttttgttgctaggtcgaaaccttatatagtgctagatgtcttagcagtaacatcggtactactggctaatactggctactgagctaggtggtcctcaacattgcgacctaaagctgaaaacattttgctatgtttgtttggtctccttgcatgtaaaaatggctccctaaaaacttttgttttggggaacatggttccaaatgtctctttat

SEQ ID NO: 23177 - DNA, 3350 bp, Zea Mays
aaataaaccatgttaggaaacaggccctcagctcagcttctttgtactagtcggcccaaatagcatgccaaggggcaagcgcccaagctcacccgcgacgtcaagcctgccctaacctcgtgtttcccttgctcggcttcaccccatcgccgccgtcgcaacgtgcccgcctgtttcccttgctcgacttcaccccatcgccgccgccgccgtcgcaagcgacgatgctcgacatcaacttgttccgcaccgacaagggcggcaacccggagcttattcgtgagtcccagcgcagccggttcgcctccgtcgagctcgtcgacgaggtcatcgccctcgacaaggcatggcgcgaaaggcagttcgagctggacaagatccggcaggagctcaacgctaccagcaagaagattggcaagctcaaagccagcaagcaagaagaggaagcgaagaagctcatggagagcacagacgaaattaagaaaaggttggcagccaaagaagttgaggtgcaggaggccaagagcaccctcgacgccaagctcacgacgattgggaacatcgtgcatgagtccgtgccagtcagcgaagacgaggcaaacaataaaattgtacggacatttggagagaagagagtagaggaaaatttgaagaatcacgtggacctttgcaggatgcttgacattgtcgcattggagaagggtgctgatgtggctggtggtaggggtttctatttaaaggatgaaggtgtcctccttaacctggcattgataaattttgggctagcctttctgagaaaacggggatttaaaccaatgcaaactccctttttcatgagaaaggaaactatggcaaaatgtgcccagttggcccagtttgatgaggagctttacaaagttacaggtgatggtgaagacaaatatctcatagctacatcagagcagcctttatgtgcttatcacttaggtgatagaatataccctgctgaacttccaatcaaatatgctgggtactccacatgcttccggaaggaagctggttcgcatggaagggacacagctggtatcttcagagtccaccagtttgaaaaaatcgaacaattctgcattacaagcccaaatgacaacgattcttgggagatgcatgaagagatgctaaaaaactcagaagattactataaggagattgggctaccataccaagttgtttccattgtctctggcgctcttaatgatgctgctgctaagaaatatgatttggaagcatggttccctgcatcaaagaccttccgagagttagtatcctgttcaaactgcactgactttcagtcaaggagacttggaattgggtatggccagaaaaagaatgatgagcagtccaagcagtttgttcatatgctgaactctaccttgactgccactgagaggaccctctgttgtattctggagaatttccaaaaggaggacggcgtcgaggtgccaaaggcactgcaaccttatatgggtggaatagagtttcttcctttcaagcaacctttggatgtcaaacaagcttctgactccaaatcaaacaagtccaaatcaaagggaaatgctgcttgagctggatgaggaacactatgttaatttttgggcctaccagtacacaatacccatagcatgactatggcgttgcagagaggttgggcagcaccatcagcttctcagagtgtggagggattgagatcgaggagaactgggacaaagttaagactatttttcttcctactgagaagccaacgaggcaacgacgtctgattcatgtgctcctttgattgcgacccatccattggaggcacacagaaaaattggcgacttcattaaaggagtatttgctgtcttccaaggtggggaggtatagaattccctctaccttttggaagagtactcagccctacagaaagtttcatccatgaactagatgagaaggtattgatctctgggctatatttttatctgtatttctttccctggggtctatcacatataaaataatcagtttccatgagaaatacgggatctgcagtgtattctgttgatgtgtgttaattcgccaaccttgttatttcagacaagtgcttgttcttttgtgctactttgcatgtcctgttgatgttataccctgatttaaggctgttcttcattttccttgcgactggatttgaacctgaggacgatgtttgtaggaccatgcatctattgtatttaaagtttaaattaaacataaccacctttttctaatgaaaatatgatgctgcgcttacctgtgttaaatttagtagttcccctttcactgagctaataaaaagttgctttgttgtgatgccatggctagcaagttctttcatctttgtttgccattctattgttgatagtgagagtgagcatgaggtgcacgctgatgtactcaagcggttcaaactgccagcgaagatcatgtagagctcctctcttcactttcactaccacacacacaaagagttctcagtgtttccttttgtatgcagggagttttccgtaccgccgacatgtgaacgatttatatagggacttccctactactgctttaacacttctggactatctacttgcggtgtttgtcagtttggtcattctatcttaaactgcatgcaattcttttcctgagggttgagctaacgtgaacctcaaattccacagattgagataatcttgggaaagagtgacaaattcgatgagttgatggttgctgccgccgccgagaggcgagaagttgaagatgaagagcaggcttgaaaaaacagtgccgaccatccctgccacgcgtgacgcctccgccggcccccgtaggatcctttcgtctcctgctgtggcctcttcattcgcagccgccccatcagcccatcctccacggctggcctgaatcgccttgcagccccttgtcttccccgtccgcctcttttactgatttgtttgaaaggtaacagtgtgttgctcttttgttgttttgatgattctaactgaatgtataaagaagtcccctctccgatgcatcctatacatgttccttcccctcattgcatgtctccctactctttgcagtcataaccattttattgtcttttgttgctaggtcgaaaccttatatagtgctagatgtcttagcagtaacatcggtactactggctaatactggctactgagctaggtggtcctcaacattgcgacctaaagctgaaaacattttgctatgtttgtttggtctccttgcatgtaaaaatggctccctaaaaacttttgttttggggaacatggttccaaatgtctctttat

SEQ ID NO: 23178 - DNA, 2692 bp, Zea Mays
aaaccatgttaggaaacaggccctcagctcagcttctttgtactagtcggcccaaatagcatgccaaggggcaagcgcccaagctcacccgcgacgtcaagcctgccctaacctcgtgtttcccttgctcggcttcaccccatcgccgccgtcgcaacgtgcccgcctgtttcccttgctcgacttcaccccatcgccgccgccgccgtcgcaagcgacgatgctcgacatcaacttgttccgcaccgacaagggcggcaacccggagcttattcgtgagtcccagcgcagccggttcgcctccgtcgagctcgtcgacgaggtcatcgccctcgacaaggcatggcgcgaaaggcagttcgagctggacaagatccggcaggagctcaacgctaccagcaagaagattggcaagctcaaagccagcaagcaagaagaggaagcgaagaagctcatggagagcacagacgaaattaagaaaaggttggcagccaaagaagttgaggtgcaggaggccaagagcaccctcgacgccaagctcacgacgattgggaacatcgtgcatgagtccgtgccagtcagcgaagacgaggcaaacaataaaattgtacggacatttggagagaagagagtagaggaaaatttgaagaatcacgtggacctttgcaggatgcttgacattgtcgcattggagaagggtgctgatgtggctggtggtaggggtttctatttaaaggatgaaggtgtcctccttaacctggcattgataaattttgggctagcctttctgagaaaacggggatttaaaccaatgcaaactccctttttcatgagaaaggaaactatggcaaaatgtgcccagttggcccagtttgatgaggagctttacaaagttacaggtgatggtgaagacaaatatctcatagctacatcagagcagcctttatgtgcttatcacttaggtgatagaatataccctgctgaacttccaatcaaatatgctgggtactccacatgcttccggaaggaagctggttcgcatggaagggacacagctggtatcttcagagtccaccagtttgaaaaaatcgaacaattctgcattacaagcccaaatgacaacgattcttgggagatgcatgaagagatgctaaaaaactcagaagattactataaggagattgggctaccataccaagttgtttccattgtctctggcgctcttaatgatgctgctgctaagaaatatgatttggaagcatggttccctgcatcaaagaccttccgagagttagtatcctgttcaaactgcactgactttcagtcaaggagacttggaattgggtatggccagaaaaagaatgatgagcagtccaagcagtttgttcatatgctgaactctaccttgactgccactgagaggaccctctgttgtattctggagaatttccaaaaggaggacggcgtcgaggtgccaaaggcactgcaaccttatatgggtggaatagagtttcttcctttcaagcaacctttggatgtcaaacaagcttctgactccaaatcaaacaagtccaaatcaaagggaaatgctgcttgagctggatgaggaacactatgttaatttttgggcctaccagtacacaatacccatagcatgactatggcgttgcagagaggttgggcagcaccatcagcttctcagagtgtggagggattgagatcgaggagaactgggacaaagttaagactatttttcttcctactgagaagccaacgaggcaacgacgtctgattcatgtgctcctttgattgcgacccatccattggaggcacacagaaaaattggcgacttcattaaaggagtatttgctgtcttccaaggtggggaggtatagaattccctctaccttttggaagagtactcagccctacagaaagtttcatccatgaactagatgagaagggagttttccgtaccgccgacatgtgaacgatttatatagggacttccctactactgctttaacacttctggactatctacttgcggtgtttgtcaattgagataatcttgggaaagagtgacaaattcgatgagttgatggttgctgccgccgccgagaggcgagaagttgaagatgaagagcaggcttgaaaaaacagtgccgaccatccctgccacgcgtgacgcctccgccggcccccgtaggatcctttcgtctcctgctgtggcctcttcattcgcagccgccccatcagcccatcctccacggctggcctgaatcgccttgcagccccttgtcttccccgtccgcctcttttactgatttgtttgaaaggtaacagtgtgttgctcttttgttgttttgatgattctaactgaatgtataaagaagtcccctctccgatgcatcctatacatgttccttcccctcattgcatgtctccctactctttgcagtcataaccattttattgtcttttgttgctaggtcgaaaccttatatagtgctagatgtcttagcagtaacatcggtactactggctaatactggctactgagctaggtggtcctcaacattgcgacctaaagctgaaaacattttgctatgtttgtttggtctccttgcatgtaaaaatggctccctaaaaacttttgttttggggaacatggttccaaatgtctctttat

SEQ ID NO: 23179 - DNA, 2662 bp, Zea Mays
cctcagctcagcttctttgtactagtcggcccaaatagcatgccaaggggcaagcgcccaagctcacccgcgacgtcaagcctgccctaacctcgtgtttcccttgctcggcttcaccccatcgccgccgtcgcaacgtgcccgcctgtttcccttgctcgacttcaccccatcgccgccgccgccgtcgcaagcgacgatgctcgacatcaacttgttccgcaccgacaagggcggcaacccggagcttattcgtgagtcccagcgcagccggttcgcctccgtcgagctcgtcgacgaggtcatcgccctcgacaaggcatggcgcgaaattcgagctggacaagatccggcaggagctcaacgctaccagcaagaagattggcaagctcaaagccagcaagcaagaagaggaagcgaagaagctcatggagagcacagacgaaattaagaaaaggttggcagccaaagaagttgaggtgcaggaggccaagagcaccctcgacgccaagctcacgacgattgggaacatcgtgcatgagtccgtgccagtcagcgaagacgaggcaaacaataaaattgtacggacatttggagagaagagagtagaggaaaatttgaagaatcacgtggacctttgcaggatgcttgacattgtcgcattggagaagggtgctgatgtggctggtggtaggggtttctatttaaaggatgaaggtgtcctccttaacctggcattgataaattttgggctagcctttctgagaaaacggggatttaaaccaatgcaaactccctttttcatgagaaaggaaactatggcaaaatgtgcccagttggcccagtttgatgaggagctttacaaagttacaggtgatggtgaagacaaatatctcatagctacatcagagcagcctttatgtgcttatcacttaggtgatagaatataccctgctgaacttccaatcaaatatgctgggtactccacatgcttccggaaggaagctggttcgcatggaagggacacagctggtatcttcagagtccaccagtttgaaaaaatcgaacaattctgcattacaagcccaaatgacaacgattcttgggagatgcatgaagagatgctaaaaaactcagaagattactataaggagattgggctaccataccaagttgtttccattgtctctggcgctcttaatgatgctgctgctaagaaatatgatttggaagcatggttccctgcatcaaagaccttccgagagttagtatcctgttcaaactgcactgactttcagtcaaggagacttggaattgggtatggccagaaaaagaatgatgagcagtccaagcagtttgttcatatgctgaactctaccttgactgccactgagaggaccctctgttgtattctggagaatttccaaaaggaggacggcgtcgaggtgccaaaggcactgcaaccttatatgggtggaatagagtttcttcctttcaagcaacctttggatgtcaaacaagcttctgactccaaatcaaacaagtccaaatcaaagggaaatgctgcttgagctggatgaggaacactatgttaatttttgggcctaccagtacacaatacccatagcatgactatggcgttgcagagaggttgggcagcaccatcagcttctcagagtgtggagggattgagatcgaggagaactgggacaaagttaagactatttttcttcctactgagaagccaacgaggcaacgacgtctgattcatgtgctcctttgattgcgacccatccattggaggcacacagaaaaattggcgacttcattaaaggagtatttgctgtcttccaagatgaatccgttcactatggtcaacggggagacatatcctctggacatcagaggagaactagatgacacaacagccttcaaaaacttcaagaagtggggaggtatagaattccctctaccttttggaagagtactcagccctacagaaagtttcatccatgaactagatgagaagattgagataatcttgggaaagagtgacaaattcgatgagttgatggttgctgccgccgccgagaggcgagaagttgaagatgaagagcaggcttgaaaaaacagtgccgaccatccctgccacgcgtgacgcctccgccggcccccgtaggatcctttcgtctcctgctgtggcctcttcattcgcagccgccccatcagcccatcctccacggctggcctgaatcgccttgcagccccttgtcttccccgtccgcctcttttactgatttgtttgaaaggtaacagtgtgttgctcttttgttgttttgatgattctaactgaatgtataaagaagtcccctctccgatgcatcctatacatgttccttcccctcattgcatgtctccctactctttgcagtcataaccattttattgtcttttgttgctaggtcgaaaccttatatagtgctagatgtcttagcagtaacatcggtactactggctaatactggctactgagctaggtggtcctcaacattgcgacctaaagctgaaaacattttgctatgtttgtttggtctccttgcatgtaaaaatggctccctaaaaacttttgttttggggaacatggttccaaatgtctctttat

SEQ ID NO: 23180 - DNA, 2759 bp, Zea Mays
ctcagctcagcttctttgtactagtcggcccaaatagcatgccaaggggcaagcgcccaagctcacccgcgacgtcaagcctgccctaacctcgtgtttcccttgctcggcttcaccccatcgccgccgtcgcaacgtgcccgcctgtttcccttgctcgacttcaccccatcgccgccgccgccgtcgcaagcgacgatgctcgacatcaacttgttccgcaccgacaagggcggcaacccggagcttattcgtgagtcccagcgcagccggttcgcctccgtcgagctcgtcgacgaggtcatcgccctcgacaaggcatggcgcgaaaggcagttcgagctggacaagatccggcaggagctcaacgctaccagcaagaagattggcaagctcaaagccagcaagcaagaagaggaagcgaagaagctcatggagagcacagacgaaattaagaaaaggttggcagccaaagaagttgaggtgcaggaggccaagagcaccctcgacgccaagctcacgacgattgggaacatcgtgcatgagtccgtgccagtcagcgaagacgaggcaaacaataaaattgtacggacatttggagagaagagagtagaggaaaatttgaagaatcacgtggacctttgcaggatgcttgacattgtcgcattggagaagggtgctgatgtggctggtggtaggggtttctatttaaaggatgaaggtgtcctccttaacctggcattgataaattttgggctagcctttctgagaaaacggggatttaaaccaatgcaaactccctttttcatgagaaaggaaactatggcaaaatgtgcccagttggcccagtttgatgaggagctttacaaagttacaggtgatggtgaagacaaatatctcatagctacatcagagcagcctttatgtgcttatcacttaggtgatagaatataccctgctgaacttccaatcaaatatgctgggtactccacatgcttccggaaggaagctggttcgcatggaagggacacagctggtatcttcagagtccaccagtttgaaaaaatcgaacaattctgcattacaagcccaaatgacaacgattcttgggagatgcatgaagagatgctaaaaaactcagaagattactataaggagattgggctaccataccaagttgtttccattgtctctggcgctcttaatgatgctgctgctaagaaatatgatttggaagcatggttccctgcatcaaagaccttccgagagttagtatcctgttcaaactgcactgactttcagtcaaggagacttggaattgggtatggccagaaaaagaatgatgagcagtccaagcagtttgttcatatgctgaactctaccttgactgccactgagaggaccctctgttgtattctggagaatttccaaaaggaggacggcgtcgaggtgccaaaggcactgcaaccttatatgggtggaatagagtttcttcctttcaagcaacctttggatgtcaaacaagcttctgactccaaatcaaacaagtccaaatcaaagggaaatgctgcttgagctggatgaggaacactatgttaatttttgggcctaccagtacacaatacccatagcatgactatggcgttgcaggttgagatgggtggttgcaaggcttaattacgaccttcatcgtcgagccatttgtgccacatgatcaagactactagctttcgattatttcagagaggttgggcagcaccatcagcttctcagagtgtggagggattgagatcgaggagaactgggacaaagttaagactatttttcttcctactgagaagccaacgaggcaacgacgtctgattcatgtgctcctttgattgcgacccatccattggaggcacacagaaaaattggcgacttcattaaaggagtatttgctgtcttccaagatgaatccgttcactatggtcaacggggagacatatcctctggacatcagaggagaactagatgacacaacagccttcaaaaacttcaagaagtggggaggtatagaattccctctaccttttggaagagtactcagccctacagaaagtttcatccatgaactagatgagaagattgagataatcttgggaaagagtgacaaattcgatgagttgatggttgctgccgccgccgagaggcgagaagttgaagatgaagagcaggcttgaaaaaacagtgccgaccatccctgccacgcgtgacgcctccgccggcccccgtaggatcctttcgtctcctgctgtggcctcttcattcgcagccgccccatcagcccatcctccacggctggcctgaatcgccttgcagccccttgtcttccccgtccgcctcttttactgatttgtttgaaaggtaacagtgtgttgctcttttgttgttttgatgattctaactgaatgtataaagaagtcccctctccgatgcatcctatacatgttccttcccctcattgcatgtctccctactctttgcagtcataaccattttattgtcttttgttgctaggtcgaaaccttatatagtgctagatgtcttagcagtaacatcggtactactggctaatactggctactgagctaggtggtcctcaacattgcgacctaaagctgaaaacattttgctatgtttgtttggtctccttgcatgtaaaaatggctccctaaaaacttttgttttggggaacatggttccaaatgtctctttat

SEQ ID NO: 23181 - DNA, 3843 bp, Zea Mays
ctcagcttctttgtactagtcggcccaaatagcatgccaaggggcaagcgcccaagctcacccgcgacgtcaagcctgccctaacctcgtgtttcccttgctcggcttcaccccatcgccgccgtcgcaacgtgcccgcctgtttcccttgctcgacttcaccccatcgccgccgccgccgtcgcaagcgacgatgctcgacatcaacttgttccgcaccgacaagggcggcaacccggagcttattcgtgagtcccagcgcagccggttcgcctccgtcgagctcgtcgacgaggtcatcgccctcgacaaggcatggcgcgaaaggcagttcgagctggacaagatccggcaggagctcaacgctaccagcaagaagattggcaagctcaaagccagcaagcaagaagaggaagcgaagaagctcatggagagcacagacgaaattaagaaaaggttggcagccaaagaagttgaggtgcaggaggccaagagcaccctcgacgccaagctcacgacgattgggaacatcgtgcatgagtccgtgccagtcagcgaagacgaggcaaacaataaaattgtacggacatttggagagaagagagtagaggaaaatttgaagaatcacgtggacctttgcaggatgcttgacattgtcgcattggagaagggtgctgatgtggctggtggtaggggtttctatttaaaggatgaaggtgtcctccttaacctggcattgataaattttgggctagcctttctgagaaaacggggatttaaaccaatgcaaactccctttttcatgagaaaggaaactatggcaaaatgtgcccagttggcccagtttgatgaggagctttacaaagttacaggtgatggtgaagacaaatatctcatagctacatcagagcagcctttatgtgcttatcacttaggtgatagaatataccctgctgaacttccaatcaaatatgctgggtactccacatgcttccggaaggaagctggttcgcatggaagggacacagctggtatcttcagagtccaccagtttgaaaaaatcgaacaattctgcattacaagcccaaatgacaacgattcttgggagatgcatgaagagatgctaaaaaactcagaagattactataaggagattgggctaccataccaagttgtttccattgtctctggcgctcttaatgatgctgctgctaagaaatatgatttggaagcatggttccctgcatcaaagaccttccgagagttagtatcctgttcaaactgcactgactttcagtcaaggagacttggaattgggtatggccagaaaaagaatgatgagcagtccaagcagtttgttcatatgctgaactctaccttgactgccactgagaggaccctctgttgtattctggagaatttccaaaaggaggacggcgtcgaggtgccaaaggcactgcaaccttatatgggtggaatagagtttcttcctttcaagcaacctttggatgtcaaacaagcttctgactccaaatcaaacaagtccaaatcaaagggaaatgctgcttgagctggatgaggaacactatgttaatttttgggcctaccagtacacaatacccatagcatgactatggcgttgcaggttttcgttttacccattttggtttcttggttgccacattatctaatgacctacctggcatacttatattgcaatagcatttcttgaaatctggaatatttgaccaccatcagctctaccggctgtgtttatcgcgttgccacagaacgctgcttgtttgtctccgaaaccaccagtgttctctgtagcacattagtaacaatttgctggtggatttgatatcatcttttttgaatgatggtgtattggtgtacttgtgatcgataatgaaaaagacatcttgtgttagtggcatctagtgctgttgtggctggaacctggaattgttcttggattctcccttcgcatctcttattttgaaacccggtgcggattgttcgcacgagagcgttttctgacggggtgggagtgcctccacctgtaagtcccagacgtgaaatcttcattcaattgcgctctgagcggggttccgacgcagcttcctcacgtgcctagccttccacacttctctgtctgcccacccgtcgccgcctcatcctcctagggttagggctcgcgtcgcggggggccgtggcgcctggtgcaatgcggaaaccgttggggccggcgctctgtgcatccgtctccgcgcgatctaggtgctggtggcgttctccctgatcgacgcgctcgccatgttattcttattcctcgaatcgccccttgtgtttacgtcgctgctcggggcaggggtggctgccgcagcgtcgcggaagctcgacctctatgacgcgaggcaagcaatgccggcgcgtctcgtgaagagcatccgcacagggaggccctctcgacggacgcatggtggcgatgggcgcaccggttagcgtggatcgtctctggcctcgacctcccgccacctcaactctacatgccctggcttgctccgcaaggcatgatatgctgttcggggagcctgggaagagtggtctcgtggctctcaacttggatttcgatcaagtcaagaagtttatcaaggagcggctggggattgaggttgagatgggtggttgcaaggcttaattacgaccttcatcgtcgagccatttgtgccacatgatcaagactactagctttcgattatttcagagaggttgggcagcaccatcagcttctcagagtgtggagggattgagatcgaggagaactgggacaaagttaagactatttttcttcctactgagaagccaacgaggcaacgacgtctgattcatgtgctcctttgattgcgacccatccattggaggcacacagaaaaattggcgacttcattaaaggagtatttgctgtcttccaaggtggggaggtatagaattccctctaccttttggaagagtactcagccctacagaaagtttcatccatgaactagatgagaagtgagagtgagcatgaggtgcacgctgatgtactcaagcggttcaaactgccagcgaagatcatggagttttccgtaccgccgacatgtgaacgatttatatagggacttccctactactgctttaacacttctggactatctacttgcgattgagataatcttgggaaagagtgacaaattcgatgagttgatggttgctgccgccgccgagaggcgagaagttgaagatgaagagcaggcttgaaaaaacagtgccgaccatccctgccacgcgtgacgcctccgccggcccccgtaggatcctttcgtctcctgctgtggcctcttcattcgcagccgccccatcagcccatcctccacggctggcctgaatcgccttgcagccccttgtcttccccgtccgcctcttttactgatttgtttgaaaggtaacagtgtgttgctcttttgttgttttgatgattctaactgaatgtataaagaagtcccctctccgatgcatcctatacatgttccttcccctcattgcatgtctccctactctttgcagtcataaccattttattgtcttttgttgctaggtcgaaaccttatatagtgctagatgtcttagcagtaacatcggtactactggctaatactggctactgagctaggtggtcctcaacattgcgacctaaagctgaaaacattttgctatgtttgtttggtctccttgcatgtaaaaatggctccctaaaaacttttgttttggggaacatggttccaaatgtctctttat

SEQ ID NO: 23182 - DNA, 3689 bp, Zea Mays
ctttgtactagtcggcccaaatagcatgccaaggggcaagcgcccaagctcacccgcgacgtcaagcctgccctaacctcgtgtttcccttgctcggcttcaccccatcgccgccgtcgcaacgtgcccgcctgtttcccttgctcgacttcaccccatcgccgccgccgccgtcgcaagcgacgatgctcgacatcaacttgttccgcaccgacaagggcggcaacccggagcttattcgtgagtcccagcgcagccggttcgcctccgtcgagctcgtcgacgaggtcatcgccctcgacaaggcatggcgcgaaaggcagttcgagctggacaagatccggcaggagctcaacgctaccagcaagaagattggcaagctcaaagccagcaagcaagaagaggaagcgaagaagctcatggagagcacagacgaaattaagaaaaggttggcagccaaagaagttgaggtgcaggaggccaagagcaccctcgacgccaagctcacgacgattgggaacatcgtgcatgagtccgtgccagtcagcgaagacgaggcaaacaataaaattgtacggacatttggagagaagagagtagaggaaaatttgaagaatcacgtggacctttgcaggatgcttgacattgtcgcattggagaagggtgctgatgtggctggtggtaggggtttctatttaaaggatgaaggtgtcctccttaacctggcattgataaattttgggctagcctttctgagaaaacggggatttaaaccaatgcaaactccctttttcatgagaaaggaaactatggcaaaatgtgcccagttggcccagtttgatgaggagctttacaaagttacaggtgatggtgaagacaaatatctcatagctacatcagagcagcctttatgtgcttatcacttaggtgatagaatataccctgctgaacttccaatcaaatatgctgggtactccacatgcttccggaaggaagctggttcgcatggaagggacacagctggtatcttcagagtccaccagtttgaaaaaatcgaacaattctgcattacaagcccaaatgacaacgattcttgggagatgcatgaagagatgctaaaaaactcagaagattactataaggagattgggctaccataccaagttgtttccattgtctctggcgctcttaatgatgctgctgctaagaaatatgatttggaagcatggttccctgcatcaaagaccttccgagagttagtatcctgttcaaactgcactgactttcagtcaaggagacttggaattgggtatggccagaaaaagaatgatgagcagtccaagcagtttgttcatatgctgaactctaccttgactgccactgagaggaccctctgttgtattctggagaatttccaaaaggaggacggcgtcgaggtgccaaaggcactgcaaccttatatgggtggaatagagtttcttcctttcaagcaacctttggatgtcaaacaagcttctgactccaaatcaaacaagtccaaatcaaagggaaatgctgcttgagctggatgaggaacactatgttaatttttgggcctaccagtacacaatacccatagcatgactatggcgttgcaggttttcgttttacccattttggtttcttggttgccacattatctaatgacctacctggcatacttatattgcaatagcatttcttgaaatctggaatatttgaccaccatcagctctaccggctgtgtttatcgcgttgccacagaacgctgcttgtttgtctccgaaaccaccagtgttctctgtagcacattagtaacaatttgctggtggatttgatatcatcttttttgaatgatggtgtattggtgtacttgtgatcgataatgaaaaagacatcttgtgttagtggcatctagtgctgttgtggctggaacctggaattgttcttggattctcccttcgcatctcttattttgaaacccggtgcggattgttcgcacgagagcgttttctgacggggtgggagtgcctccacctgtaagtcccagacgtgaaatcttcattcaattgcgctctgagcggggttccgacgcagcttcctcacgtgcctagccttccacacttctctgtctgcccacccgtcgccgcctcatcctcctagggttagggctcgcgtcgcggggggccgtggcgcctggtgcaatgcggaaaccgttggggccggcgctctgtgcatccgtctccgcgcgatctaggtgctggtggcgttctccctgatcgacgcgctcgccatgttattcttattcctcgaatcgccccttgtgtttacgtcgctgctcggggcaggggtggctgccgcagcgtcgcggaagctcgacctctatgacgcgaggcaagcaatgccggcgcgtctcgtgaagagcatccgcacagggaggccctctcgacggacgcatggtggcgatgggcgcaccggttagcgtggatcgtctctggcctcgacctcccgccacctcaactctacatgccctggcttgctccgcaaggcatgatatgctgttcggggagcctgggaagagtggtctcgtggctctcaacttggatttcgatcaagtcaagaagtttatcaaggagcggctggggattgagagaggttgggcagcaccatcagcttctcagagtgtggagggattgagatcgaggagaactgggacaaagttaagactatttttcttcctactgagaagccaacgaggcaacgacgtctgattcatgtgctcctttgattgcgacccatccattggaggcacacagaaaaattggcgacttcattaaaggagtatttgctgtcttccaaggtggggaggtatagaattccctctaccttttggaagagtactcagccctacagaaagtttcatccatgaactagatgagaagggagttttccgtaccgccgacatgtgaacgatttatatagggacttccctactactgctttaacacttctggactatctacttgcggtgtttgtcaattgagataatcttgggaaagagtgacaaattcgatgagttgatggttgctgccgccgccgagaggcgagaagttgaagatgaagagcaggcttgaaaaaacagtgccgaccatccctgccacgcgtgacgcctccgccggcccccgtaggatcctttcgtctcctgctgtggcctcttcattcgcagccgccccatcagcccatcctccacggctggcctgaatcgccttgcagccccttgtcttccccgtccgcctcttttactgatttgtttgaaaggtaacagtgtgttgctcttttgttgttttgatgattctaactgaatgtataaagaagtcccctctccgatgcatcctatacatgttccttcccctcattgcatgtctccctactctttgcagtcataaccattttattgtcttttgttgctaggtcgaaaccttatatagtgctagatgtcttagcagtaacatcggtactactggctaatactggctactgagctaggtggtcctcaacattgcgacctaaagctgaaaacattttgctatgtttgtttggtctccttgcatgtaaaaatggctccctaaaaacttttgttttggggaacatggttccaaatgtctctttat

SEQ ID NO: 23183 - DNA, 2619 bp, Zea Mays
ctttgtactagtcggcccaaatagcatgccaaggggcaagcgcccaagctcacccgcgacgtcaagcctgccctaacctcgtgtttcccttgctcggcttcaccccatcgccgccgtcgcaacgtgcccgcctgtttcccttgctcgacttcaccccatcgccgccgccgccgtcgcaagcgacgatgctcgacatcaacttgttccgcaccgacaagggcggcaacccggagcttattcgtgagtcccagcgcagccggttcgcctccgtcgagctcgtcgacgaggtcatcgccctcgacaaggcatggcgcgaaaggcagttcgagctggacaagatccggcaggagctcaacgctaccagcaagaagattggcaagctcaaagccagcaagcaagaagaggaagcgaagaagctcatggagagcacagacgaaattaagaaaaggttggcagccaaagaagttgaggtgcaggaggccaagagcaccctcgacgccaagctcacgacgattgggaacatcgtgcatgagtccgtgccagtcagcgaagacgaggcaaacaataaaattgtacggacatttggagagaagagagtagaggaaaatttgaagaatcacgtggacctttgcaggatgcttgacattgtcgcattggagaagggtgctgatgtggctggtggtaggggtttctatttaaaggatgaaggtgtcctccttaacctggcattgataaattttgggctagcctttctgagaaaacggggatttaaaccaatgcaaactccctttttcatgagaaaggaaactatggcaaaatgtgcccagttggcccagtttgatgaggagctttacaaagttacaggtgatggtgaagacaaatatctcatagctacatcagagcagcctttatgtgcttatcacttagatatgctgggtactccacatgcttccggaaggaagctggttcgcatggaagggacacagctggtatcttcagagtccaccagtttgaaaaaatcgaacaattctgcattacaagcccaaatgacaacgattcttgggagatgcatgaagagatgctaaaaaactcagaagattactataaggagattgggctaccataccaagttgtttccattgtctctggcgctcttaatgatgctgctgctaagaaatatgatttggaagcatggttccctgcatcaaagaccttccgagagttagtatcctgttcaaactgcactgactttcagtcaaggagacttggaattgggtatggccagaaaaagaatgatgagcagtccaagcagtttgttcatatgctgaactctaccttgactgccactgagaggaccctctgttgtattctggagaatttccaaaaggaggacggcgtcgaggtgccaaaggcactgcaaccttatatgggtggaatagagtttcttcctttcaagcaacctttggatgtcaaacaagcttctgactccaaatcaaacaagtccaaatcaaagggaaatgctgcttgagctggatgaggaacactatgttaatttttgggcctaccagtacacaatacccatagcatgactatggcgttgcagagaggttgggcagcaccatcagcttctcagagtgtggagggattgagatcgaggagaactgggacaaagttaagactatttttcttcctactgagaagccaacgaggcaacgacgtctgattcatgtgctcctttgattgcgacccatccattggaggcacacagaaaaattggcgacttcattaaaggagtatttgctgtcttccaagatgaatccgttcactatggtcaacggggagacatatcctctggacatcagaggagaactagatgacacaacagccttcaaaaacttcaagaagtggggaggtatagaattccctctaccttttggaagagtactcagccctacagaaagtttcatccatgaactagatgagaagattgagataatcttgggaaagagtgacaaattcgatgagttgatggttgctgccgccgccgagaggcgagaagttgaagatgaagagcaggcttgaaaaaacagtgccgaccatccctgccacgcgtgacgcctccgccggcccccgtaggatcctttcgtctcctgctgtggcctcttcattcgcagccgccccatcagcccatcctccacggctggcctgaatcgccttgcagccccttgtcttccccgtccgcctcttttactgatttgtttgaaaggtaacagtgtgttgctcttttgttgttttgatgattctaactgaatgtataaagaagtcccctctccgatgcatcctatacatgttccttcccctcattgcatgtctccctactctttgcagtcataaccattttattgtcttttgttgctaggtcgaaaccttatatagtgctagatgtcttagcagtaacatcggtactactggctaatactggctactgagctaggtggtcctcaacattgcgacctaaagctgaaaacattttgctatgtttgtttggtctccttgcatgtaaaaatggctccctaaaaacttttgttttggggaacatggttccaaatgtctctttat

SEQ ID NO: 23184 - DNA, 3846 bp, Zea Mays
ctttgtactagtcggcccaaatagcatgccaaggggcaagcgcccaagctcacccgcgacgtcaagcctgccctaacctcgtgtttcccttgctcggcttcaccccatcgccgccgtcgcaacgtgcccgcctgtttcccttgctcgacttcaccccatcgccgccgccgccgtcgcaagcgacgatgctcgacatcaacttgttccgcaccgacaagggcggcaacccggagcttattcgtgagtcccagcgcagccggttcgcctccgtcgagctcgtcgacgaggtcatcgccctcgacaaggcatggcgcgaaaggcagttcgagctggacaagatccggcaggagctcaacgctaccagcaagaagattggcaagctcaaagccagcaagcaagaagaggaagcgaagaagctcatggagagcacagacgaaattaagaaaaggttggcagccaaagaagttgaggtgcaggaggccaagagcaccctcgacgccaagctcacgacgattgggaacatcgtgcatgagtccgtgccagtcagcgaagacgaggcaaacaataaaattgtacggacatttggagagaagagagtagaggaaaatttgaagaatcacgtggacctttgcaggatgcttgacattgtcgcattggagaagggtgctgatgtggctggtggtaggggtttctatttaaaggatgaaggtgtcctccttaacctggcattgataaattttgggctagcctttctgagaaaacggggatttaaaccaatgcaaactccctttttcatgagaaaggaaactatggcaaaatgtgcccagttggcccagtttgatgaggagctttacaaagttacaggtgatggtgaagacaaatatctcatagctacatcagagcagcctttatgtgcttatcacttaggtgatagaatataccctgctgaacttccaatcaaatatgctgggtactccacatgcttccggaaggaagctggttcgcatggaagggacacagctggtatcttcagagtccaccagtttgaaaaaatcgaacaattctgcattacaagcccaaatgacaacgattcttgggagatgcatgaagagatgctaaaaaactcagaagattactataaggagattgggctaccataccaagttgtttccattgtctctggcgctcttaatgatgctgctgctaagaaatatgatttggaagcatggttccctgcatcaaagaccttccgagagttagtatcctgttcaaactgcactgactttcagtcaaggagacttggaattgggtatggccagaaaaagaatgatgagcagtccaagcagtttgttcatatgctgaactctaccttgactgccactgagaggaccctctgttgtattctggagaatttccaaaaggaggacggcgtcgaggtgccaaaggcactgcaaccttatatgggtggaatagagtttcttcctttcaagcaacctttggatgtcaaacaagcttctgactccaaatcaaacaagtccaaatcaaagggaaatgctgcttgagctggatgaggaacactatgttaatttttgggcctaccagtacacaatacccatagcatgactatggcgttgcaggttttcgttttacccattttggtttcttggttgccacattatctaatgacctacctggcatacttatattgcaatagcatttcttgaaatctggaatatttgaccaccatcagctctaccggctgtgtttatcgcgttgccacagaacgctgcttgtttgtctccgaaaccaccagtgttctctgtagcacattagtaacaatttgctggtggatttgatatcatcttttttgaatgatggtgtattggtgtacttgtgatcgataatgaaaaagacatcttgtgttagtggcatctagtgctgttgtggctggaacctggaattgttcttggattctcccttcgcatctcttattttgaaacccggtgcggattgttcgcacgagagcgttttctgacggggtgggagtgcctccacctgtaagtcccagacgtgaaatcttcattcaattgcgctctgagcggggttccgacgcagcttcctcacgtgcctagccttccacacttctctgtctgcccacccgtcgccgcctcatcctcctagggttagggctcgcgtcgcggggggccgtggcgcctggtgcaatgcggaaaccgttggggccggcgctctgtgcatccgtctccgcgcgatctaggggtggctgccgcagcgtcgcggaagctcgacctctatgacgcgaggcaagcaatgccggcgcgtctcgtgaagagcatccgcacagggaggccctctcgacggacgcatggtggcgatgggcgcaccggttagcgtggatcgtctctggcctcgacctcccgccacctcaactctacatgccctggcttgctccgcaaggcatgatatgctgttcggggagcctgggaagagtggtctcgtggctctcaacttggatttcgatcaagtcaagaagtttatcaaggagcggctggggattgaggttgagatgggtggttgcaaggcttaattacgaccttcatcgtcgagccatttgtgccacatgatcaagactactagctttcgattatttcagagaggttgggcagcaccatcagcttctcagagtgtggagggattgagatcgaggagaactgggacaaagttaagactatttttcttcctactgagaagccaacgaggcaacgacgtctgattcatgtgctcctttgattgcgacccatccattggaggcacacagaaaaattggcgacttcattaaaggagtatttgctgtcttccaagatgaatccgttcactatggtcaacggggagacatatcctctggacatcagaggagaactagatgacacaacagccttcaaaaacttcaagaagtggggaggtatagaattccctctaccttttggaagagtactcagccctacagaaagtttcatccatgaactagatgagaagtgagagtgagcatgaggtgcacgctgatgtactcaagcggttcaaactgccagcgaagatcatggagttttccgtaccgccgacatgtgaacgatttatatagggacttccctactactgctttaacacttctggactatctacttgcggtgtttgtcaattgagataatcttgggaaagagtgacaaattcgatgagttgatggttgctgccgccgccgagaggcgagaagttgaagatgaagagcaggcttgaaaaaacagtgccgaccatccctgccacgcgtgacgcctccgccggcccccgtaggatcctttcgtctcctgctgtggcctcttcattcgcagccgccccatcagcccatcctccacggctggcctgaatcgccttgcagccccttgtcttccccgtccgcctcttttactgatttgtttgaaaggtaacagtgtgttgctcttttgttgttttgatgattctaactgaatgtataaagaagtcccctctccgatgcatcctatacatgttccttcccctcattgcatgtctccctactctttgcagtcataaccattttattgtcttttgttgctaggtcgaaaccttatatagtgctagatgtcttagcagtaacatcggtactactggctaatactggctactgagctaggtggtcctcaacattgcgacctaaagctgaaaacattttgctatgtttgtttggtctccttgcatgtaaaaatggctccctaaaaacttttgttttggggaacatggttccaaatgtctctttat

SEQ ID NO: 23185 - DNA, 3686 bp, Zea Mays
ctttgtactagtcggcccaaatagcatgccaaggggcaagcgcccaagctcacccgcgacgtcaagcctgccctaacctcgtgtttcccttgctcggcttcaccccatcgccgccgtcgcaacgtgcccgcctgtttcccttgctcgacttcaccccatcgccgccgccgccgtcgcaagcgacgatgctcgacatcaacttgttccgcaccgacaagggcggcaacccggagcttattcgtgagtcccagcgcagccggttcgcctccgtcgagctcgtcgacgaggtcatcgccctcgacaaggcatggcgcgaaaggcagttcgagctggacaagatccggcaggagctcaacgctaccagcaagaagattggcaagctcaaagccagcaagcaagaagaggaagcgaagaagctcatggagagcacagacgaaattaagaaaaggttggcagccaaagaagttgaggtgcaggaggccaagagcaccctcgacgccaagctcacgacgattgggaacatcgtgcatgagtccgtgccagtcagcgaagacgaggcaaacaataaaattgtacggacatttggagagaagagagtagaggaaaatttgaagaatcacgtggacctttgcaggatgcttgacattgtcgcattggagaagggtgctgatgtggctggtggtaggggtttctatttaaaggatgaaggtgtcctccttaacctggcattgataaattttgggctagcctttctgagaaaacggggatttaaaccaatgcaaactccctttttcatgagaaaggaaactatggcaaaatgtgcccagttggcccagtttgatgaggagctttacaaagttacaggtgatggtgaagacaaatatctcatagctacatcagagcagcctttatgtgcttatcacttaggtgatagaatataccctgctgaacttccaatcaaatatgctgggtactccacatgcttccggaaggaagctggttcgcatggaagggacacagctggtatcttcagagtccaccagtttgaaaaaatcgaacaattctgcattacaagcccaaatgacaacgattcttgggagatgcatgaagagatgctaaaaaactcagaagattactataaggagattgggctaccataccaagttgtttccattgtctctggcgctcttaatgatgctgctgctaagaaatatgatttggaagcatggttccctgcatcaaagaccttccgagagttagtatcctgttcaaactgcactgactttcagtcaaggagacttggaattgggtatggccagaaaaagaatgatgagcagtccaagcagtttgttcatatgctgaactctaccttgactgccactgagaggaccctctgttgtattctggagaatttccaaaaggaggacggcgtcgaggtgccaaaggcactgcaaccttatatgggtggaatagagtttcttcctttcaagcaacctttggatgtcaaacaagcttctgactccaaatcaaacaagtccaaatcaaagggaaatgctgcttgagctggatgaggaacactatgttaatttttgggcctaccagtacacaatacccatagcatgactatggcgttgcaggttttcgttttacccattttggtttcttggttgccacattatctaatgacctacctggcatacttatattgcaatagcatttcttgaaatctggaatatttgaccaccatcagctctaccggctgtgtttatcgcgttgccacagaacgctgcttgtttgtctccgaaaccaccagtgttctctgtagcacattagtaacaatttgctggtggatttgatatcatcttttttgaatgatggtgtattggtgtacttgtgatcgataatgaaaaagacatcttgtgttagtggcatctagtgctgttgtggctggaacctggaattgttcttggattctcccttcgcatctcttattttgaaacccggtgcggattgttcgcacgagagcgttttctgacggggtgggagtgcctccacctgtaagtcccagacgtgaaatcttcattcaattgcgctctgagcggggttccgacgcagcttcctcacgtgcctagccttccacacttctctgtctgcccacccgtcgccgcctcatcctcctagggttagggctcgcgtcgcggggggccgtggcgcctggtgcaatgcggaaaccgttggggccggcgctctgtgcatccgtctccgcgcgatctaggtgctggtggcgttctccctgatcgacgcgctcgccatgttattcttattcctcgaatcgccccttgtgtttacgtcgctgctcggggcaggggtggctgccgcagcgtcgcggaagctcgacctctatgacgcgaggcaagcaatgccggcgcgtctcgtgaagagcatccgcacagggaggccctctcgacggacgcatggtggcgatgggcgcaccggttagcgtggatcgtctctggcctcgacctcccgccacctcaactctacatgccctggcttgctccgcaaggcatgatatgctgttcggggagcctgggaagagtggtctcgtggctctcaacttggatttcgatcaagtcaagaagtttatcaaggagcggctggggattgaggttgagatgggtggttgcaaggcttaattacgaccttcatcgtcgagccatttgtgccacatgatcaagactactagctttcgattatttcagagaggttgggcagcaccatcagcttctcagagtgtggagggattgagatcgaggagaactgggacaaagttaagactatttttcttcctactgagaagccaacgaggcaacgacgtctgattcatgtgctcctttgattgcgacccatccattggaggcacacagaaaaattggcgacttcattaaaggagtatttgctgtcttccaaggtggggaggtatagaattccctctaccttttggaagagtactcagccctacagaaagtttcatccatgaactagatgagaagattgagataatcttgggaaagagtgacaaattcgatgagttgatggttgctgccgccgccgagaggcgagaagttgaagatgaagagcaggcttgaaaaaacagtgccgaccatccctgccacgcgtgacgcctccgccggcccccgtaggatcctttcgtctcctgctgtggcctcttcattcgcagccgccccatcagcccatcctccacggctggcctgaatcgccttgcagccccttgtcttccccgtccgcctcttttactgatttgtttgaaaggtaacagtgtgttgctcttttgttgttttgatgattctaactgaatgtataaagaagtcccctctccgatgcatcctatacatgttccttcccctcattgcatgtctccctactctttgcagtcataaccattttattgtcttttgttgctaggtcgaaaccttatatagtgctagatgtcttagcagtaacatcggtactactggctaatactggctactgagctaggtggtcctcaacattgcgacctaaagctgaaaacattttgctatgtttgtttggtctccttgcatgtaaaaatggctccctaaaaacttttgttttggggaacatggttccaaatgtctctttat

SEQ ID NO: 23186 - DNA, 3077 bp, Zea Mays
ctttgtactagtcggcccaaatagcatgccaaggggcaagcgcccaagctcacccgcgacgtcaagcctgccctaacctcgtgtttcccttgctcggcttcaccccatcgccgccgtcgcaacgtgcccgcctgtttcccttgctcgacttcaccccatcgccgccgccgccgtcgcaagcgacgatgctcgacatcaacttgttccgcaccgacaagggcggcaacccggagcttattcgtgagtcccagcgcagccggttcgcctccgtcgagctcgtcgacgaggtcatcgccctcgacaaggcatggcgcgaaaggcagttcgagctggacaagatccggcaggagctcaacgctaccagcaagaagattggcaagctcaaagccagcaagcaagaagaggaagcgaagaagctcatggagagcacagacgaaattaagaaaaggttggcagccaaagaagttgaggtgcaggaggccaagagcaccctcgacgccaagctcacgacgattgggaacatcgtgcatgagtccgtgccagtcagcgaagacgagggctgatcagccgtcgattaatctgatcgctttctgatcagtcgatcagacctccaaatcgtccggacacatggaaaccaatcaggcttttgtatatatattactacagacattagcgtagagtgccagagtatcatgtatcatcgttacttgcctgcacaatgggacgcccccatcttattgtcatgaagagaaggcttccacatcaggtcaagctagctaaggcaaacaataaaattgtacggacatttggagagaagagagtagaggaaaatttgaagaatcacgtggacctttgcaggatgcttgacattgtcgcattggagaagggtgctgatgtggctggtggtaggggtttctatttaaaggatgaaggtgtcctccttaacctggcattgataaattttgggctagcctttctgagaaaacggggatttaaaccaatgcaaactccctttttcatgagaaaggaaactatggcaaaatgtgcccagttggcccagtttgatgaggagctttacaaagttacaggtgatggtgaagacaaatatctcatagctacatcagagcagcctttatgtgcttatcacttaggtgatagaatataccctgctgaacttccaatcaaatatgctgggtactccacatgcttccggaaggaagctggttcgcatggaagggacacagctggtatcttcagagtccaccagtttgaaaaaatcgaacaattctgcattacaagcccaaatgacaacgattcttgggagatgcatgaagagatgctaaaaaactcagaagattactataaggagattgggctaccataccaagttgtttccattgtctctggcgctcttaatgatgctgctgctaagaaatatgatttggaagcatggttccctgcatcaaagaccttccgagagttagtatcctgttcaaactgcactgactttcagtcaaggagacttggaattgggtatggccagaaaaagaatgatgagcagtccaagcagtttgttcatatgctgaactctaccttgactgccactgagaggaccctctgttgtattctggagaatttccaaaaggaggacggcgtcgaggtgccaaaggcactgcaaccttatatgggtggaatagagtttcttcctttcaagcaacctttggatgtcaaacaagcttctgactccaaatcaaacaagtccaaatcaaagggaaatgctgcttgagctggatgaggaacactatgttaatttttgggcctaccagtacacaatacccatagcatgactatggcgttgcagagaggttgggcagcaccatcagcttctcagagtgtggagggattgagatcgaggagaactgggacaaagttaagactatttttcttcctactgagaagccaacgaggcaacgacgtctgattcatgtgctcctttgattgcgacccatccattggaggcacacagaaaaattggcgacttcattaaaggagtatttgctgtcttccaaggtaccacagatttgggaaatgtttatttgctggctgtagtgaattaagaatttttcatgtcactatattttcttatttgccatgtttataataattatgctccatctccatatggatttctcatttcttgagatgaatccgttcactatggtcaacggggagacatatcctctggacatcagaggagaactagatgacacaacagccttcaaaaacttcaagaagtgaatctgataaacagggataccatttcttgttgtcattgttggatttactcttatcaattgtgcaggtggggaggtatagaattccctctaccttttggaagagtactcagccctacagaaagtttcatccatgaactagatgagaagattgagataatcttgggaaagagtgacaaattcgatgagttgatggttgctgccgccgccgagaggcgagaagttgaagatgaagagcaggcttgaaaaaacagtgccgaccatccctgccacgcgtgacgcctccgccggcccccgtaggatcctttcgtctcctgctgtggcctcttcattcgcagccgccccatcagcccatcctccacggctggcctgaatcgccttgcagccccttgtcttccccgtccgcctcttttactgatttgtttgaaaggtaacagtgtgttgctcttttgttgttttgatgattctaactgaatgtataaagaagtcccctctccgatgcatcctatacatgttccttcccctcattgcatgtctccctactctttgcagtcataaccattttattgtcttttgttgctaggtcgaaaccttatatagtgctagatgtcttagcagtaacatcggtactactggctaatactggctactgagctaggtggtcctcaacattgcgacctaaagctgaaaacattttgctatgtttgtttggtctccttgcatgtaaaaatggctccctaaaaacttttgttttggggaacatggttccaaatgtctctttat

SEQ ID NO: 23187 - DNA, 3687 bp, Zea Mays
ctttgtactagtcggcccaaatagcatgccaaggggcaagcgcccaagctcacccgcgacgtcaagcctgccctaacctcgtgtttcccttgctcggcttcaccccatcgccgccgtcgcaacgtgcccgcctgtttcccttgctcgacttcaccccatcgccgccgccgccgtcgcaagcgacgatgctcgacatcaacttgttccgcaccgacaagggcggcaacccggagcttattcgtgagtcccagcgcagccggttcgcctccgtcgagctcgtcgacgaggtcatcgccctcgacaaggcatggcgcgaaaggcagttcgagctggacaagatccggcaggagctcaacgctaccagcaagaagattggcaagctcaaagccagcaagcaagaagaggaagcgaagaagctcatggagagcacagacgaaattaagaaaaggttggcagccaaagaagttgaggtgcaggaggccaagagcaccctcgacgccaagctcacgacgattgggaacatcgtgcatgagtccgtgccagtcagcgaagacgaggcaaacaataaaattgtacggacatttggagagaagagagtagaggaaaatttgaagaatcacgtggacctttgcaggatgcttgacattgtcgcattggagaagggtgctgatgtggctggtggtaggggtttctatttaaaggatgaaggtgtcctccttaacctggcattgataaattttgggctagcctttctgagaaaacggggatttaaaccaatgcaaactccctttttcatgagaaaggaaactatggcaaaatgtgcccagttggcccagtttgatgaggagctttacaaagttacaggtgatggtgaagacaaatatctcatagctacatcagagcagcctttatgtgcttatcacttaggtgatagaatataccctgctgaacttccaatcaaatatgctgggtactccacatgcttccggaaggaagctggttcgcatggaagggacacagctggtatcttcagagtccaccagtttgaaaaaatcgaacaattctgcattacaagcccaaatgacaacgattcttgggagatgcatgaagagatgctaaaaaactcagaagattactataaggagattgggctaccataccaagttgtttccattgtctctggcgctcttaatgatgctgctgctaagaaatatgatttggaagcatggttccctgcatcaaagaccttccgagagttagtatcctgttcaaactgcactgactttcagtcaaggagacttggaattgggtatggccagaaaaagaatgatgagcagtccaagcagtttgttcatatgctgaactctaccttgactgccactgagaggaccctctgttgtattctggagaatttccaaaaggaggacggcgtcgaggtgccaaaggcactgcaaccttatatgggtggaatagagtttcttcctttcaagcaacctttggatgtcaaacaagcttctgactccaaatcaaacaagtccaaatcaaagggaaatgctgcttgagctggatgaggaacactatgttaatttttgggcctaccagtacacaatacccatagcatgactatggcgttgcaggttttcgttttacccattttggtttcttggttgccacattatctaatgacctacctggcatacttatattgcaatagcatttcttgaaatctggaatatttgaccaccatcagctctaccggctgtgtttatcgcgttgccacagaacgctgcttgtttgtctccgaaaccaccagtgttctctgtagcacattagtaacaatttgctggtggatttgatatcatcttttttgaatgatggtgtattggtgtacttgtgatcgataatgaaaaagacatcttgtgttagtggcatctagtgctgttgtggctggaacctggaattgttcttggattctcccttcgcatctcttattttgaaacccggtgcggattgttcgcacgagagcgttttctgacggggtgggagtgcctccacctgtaagtcccagacgtgaaatcttcattcaattgcgctctgagcggggttccgacgcagcttcctcacgtgcctagccttccacacttctctgtctgcccacccgtcgccgcctcatcctcctagggttagggctcgcgtcgcggggggccgtggcgcctggtgcaatgcggaaaccgttggggccggcgctctgtgcatccgtctccgcgcgatctaggggtggctgccgcagcgtcgcggaagctcgacctctatgacgcgaggcaagcaatgccggcgcgtctcgtgaagagcatccgcacagggaggccctctcgacggacgcatggtggcgatgggcgcaccggttagcgtggatcgtctctggcctcgacctcccgccacctcaactctacatgccctggcttgctccgcaaggcatgatatgctgttcggggagcctgggaagagtggtctcgtggctctcaacttggatttcgatcaagtcaagaagtttatcaaggagcggctggggattgaggttgagatgggtggttgcaaggcttaattacgaccttcatcgtcgagccatttgtgccacatgatcaagactactagctttcgattatttcagagaggttgggcagcaccatcagcttctcagagtgtggagggattgagatcgaggagaactgggacaaagttaagactatttttcttcctactgagaagccaacgaggcaacgacgtctgattcatgtgctcctttgattgcgacccatccattggaggcacacagaaaaattggcgacttcattaaaggagtatttgctgtcttccaagatgaatccgttcactatggtcaacggggagacatatcctctggacatcagaggagaactagatgacacaacagccttcaaaaacttcaagaagtggggaggtatagaattccctctaccttttggaagagtactcagccctacagaaagtttcatccatgaactagatgagaagattgagataatcttgggaaagagtgacaaattcgatgagttgatggttgctgccgccgccgagaggcgagaagttgaagatgaagagcaggcttgaaaaaacagtgccgaccatccctgccacgcgtgacgcctccgccggcccccgtaggatcctttcgtctcctgctgtggcctcttcattcgcagccgccccatcagcccatcctccacggctggcctgaatcgccttgcagccccttgtcttccccgtccgcctcttttactgatttgtttgaaaggtaacagtgtgttgctcttttgttgttttgatgattctaactgaatgtataaagaagtcccctctccgatgcatcctatacatgttccttcccctcattgcatgtctccctactctttgcagtcataaccattttattgtcttttgttgctaggtcgaaaccttatatagtgctagatgtcttagcagtaacatcggtactactggctaatactggctactgagctaggtggtcctcaacattgcgacctaaagctgaaaacattttgctatgtttgtttggtctccttgcatgtaaaaatggctccctaaaaacttttgttttggggaacatggttccaaatgtctctttat

SEQ ID NO: 23188 - DNA, 3999 bp, Zea Mays
ctttgtactagtcggcccaaatagcatgccaaggggcaagcgcccaagctcacccgcgacgtcaagcctgccctaacctcgtgtttcccttgctcggcttcaccccatcgccgccgtcgcaacgtgcccgcctgtttcccttgctcgacttcaccccatcgccgccgccgccgtcgcaagcgacgatgctcgacatcaacttgttccgcaccgacaagggcggcaacccggagcttattcgtgagtcccagcgcagccggttcgcctccgtcgagctcgtcgacgaggtcatcgccctcgacaaggcatggcgcgaaaggcagttcgagctggacaagatccggcaggagctcaacgctaccagcaagaagattggcaagctcaaagccagcaagcaagaagaggaagcgaagaagctcatggagagcacagacgaaattaagaaaaggttggcagccaaagaagttgaggtgcaggaggccaagagcaccctcgacgccaagctcacgacgattgggaacatcgtgcatgagtccgtgccagtcagcgaagacgaggcaaacaataaaattgtacggacatttggagagaagagagtagaggaaaatttgaagaatcacgtggacctttgcaggatgcttgacattgtcgcattggagaagggtgctgatgtggctggtggtaggggtttctatttaaaggatgaaggtgtcctccttaacctggcattgataaattttgggctagcctttctgagaaaacggggatttaaaccaatgcaaactccctttttcatgagaaaggaaactatggcaaaatgtgcccagttggcccagtttgatgaggagctttacaaagttacaggtgatggtgaagacaaatatctcatagctacatcagagcagcctttatgtgcttatcacttaggtgatagaatataccctgctgaacttccaatcaaatatgctgggtactccacatgcttccggaaggaagctggttcgcatggaagggacacagctggtatcttcagagtccaccagtttgaaaaaatcgaacaattctgcattacaagcccaaatgacaacgattcttgggagatgcatgaagagatgctaaaaaactcagaagattactataaggagattgggctaccataccaagttgtttccattgtctctggcgctcttaatgatgctgctgctaagaaatatgatttggaagcatggttccctgcatcaaagaccttccgagagttagtatcctgttcaaactgcactgactttcagtcaaggagacttggaattgggtatggccagaaaaagaatgatgagcagtccaagcagtttgttcatatgctgaactctaccttgactgccactgagaggaccctctgttgtattctggagaatttccaaaaggaggacggcgtcgaggtgccaaaggcactgcaaccttatatgggtggaatagagtttcttcctttcaagcaacctttggatgtcaaacaagcttctgactccaaatcaaacaagtccaaatcaaagggaaatgctgcttgagctggatgaggaacactatgttaatttttgggcctaccagtacacaatacccatagcatgactatggcgttgcaggggtggctgccgcagcgtcgcggaagctcgacctctatgacgcgaggcaagcaatgccggcgcgtctcgtgaagagcatccgcacagggaggccctctcgacggacgcatggtggcgatgggcgcaccggttagcgtggatcgtctctggcctcgacctcccgccacctcaactctacatgccctggcttgctccgcaaggcatgatatgctgttcggggagcctgggaagagtggtctcgtggctctcaacttggatttcgatcaagtcaagaagtttatcaaggagcggctggggattgaggttgagatgggtggttgcaaggcttaattacgaccttcatcgtcgagccatttgtgccacatgatcaagactactagctttcgattatttcagagaggttgggcagcaccatcagcttctcagagtgtggagggattgagatcgaggagaactgggacaaagttaagactatttttcttcctactgagaagccaacgaggcaacgacgtctgattcatgtgctcctttgattgcgacccatccattggaggcacacagaaaaattggcgacttcattaaaggagtatttgctgtcttccaaggtaccacagatttgggaaatgtttatttgctggctgtagtgaattaagaatttttcatgtcactatattttcttatttgccatgtttataataattatgctccatctccatatggatttctcatttcttgagatgaatccgttcactatggtcaacggggagacatatcctctggacatcagaggagaactagatgacacaacagccttcaaaaacttcaagaagtgaatctgataaacagggataccatttcttgttgtcattgttggatttactcttatcaattgtgcaggtggggaggtatagaattccctctaccttttggaagagtactcagccctacagaaagtttcatccatgaactagatgagaaggtattgatctctgggctatatttttatctgtatttctttccctggggtctatcacatataaaataatcagtttccatgagaaatacgggatctgcagtgtattctgttgatgtgtgttaattcgccaaccttgttatttcagacaagtgcttgttcttttgtgctactttgcatgtcctgttgatgttataccctgatttaaggctgttcttcattttccttgcgactggatttgaacctgaggacgatgtttgtaggaccatgcatctattgtatttaaagtttaaattaaacataaccacctttttctaatgaaaatatgatgctgcgcttacctgtgttaaatttagtagttcccctttcactgagctaataaaaagttgctttgttgtgatgccatggctagcaagttctttcatctttgtttgccattctattgttgatagtgagagtgagcatgaggtgcacgctgatgtactcaagcggttcaaactgccagcgaagatcatgtagagctcctctcttcactttcactaccacacacacaaagagttctcagtgtttccttttgtatgcagggagttttccgtaccgccgacatgtgaacgatttatatagggacttccctactactgctttaacacttctggactatctacttgcggtgtttgtcagtttggtcattctatcttaaactgcatgcaattcttttcctgagggttgagctaacgtgaacctcaaattccacagattgagataatcttgggaaagagtgacaaattcgatgagttgatggttgctgccgccgccgagaggcgagaagttgaagatgaagagcaggcttgaaaaaacagtgccgaccatccctgccacgcgtgacgcctccgccggcccccgtaggatcctttcgtctcctgctgtggcctcttcattcgcagccgccccatcagcccatcctccacggctggcctgaatcgccttgcagccccttgtcttccccgtccgcctcttttactgatttgtttgaaaggtaacagtgtgttgctcttttgttgttttgatgattctaactgaatgtataaagaagtcccctctccgatgcatcctatacatgttccttcccctcattgcatgtctccctactctttgcagtcataaccattttattgtcttttgttgctaggtcgaaaccttatatagtgctagatgtcttagcagtaacatcggtactactggctaatactggctactgagctaggtggtcctcaacattgcgacctaaagctgaaaacattttgctatgtttgtttggtctccttgcatgtaaaaatggctccctaaaaacttttgttttggggaacatggttccaaatgtctctttat

SEQ ID NO: 23189 - DNA, 2796 bp, Zea Mays
ctcaaattatggaattgctatgttattagattattgtagctaactgtaaaattacgactacagagaagcatatttgtgaacgggaaaaaacaaaaaaaagagaaaggaacagccagtgttgcaaggtattgtcttctatcctatcttgttgtacctgctgtagtagacctgtgcttcaggaattgaggattaaagtaccatgagcttgctgtagtaccaagaacatttgaaatacattaaaaatgaggaagtgattggaggccatctactcatttctatatatctttgaagggtgaaggttaggctcttcctcagctgcttcagagcctcctgctttttctgaaatgcatgaagaaacaatagagtcggctctgagaattgtcaagcagtcagcatgcttccaacacattttcagttaatgattcgtaataattgttgcaatcatgtagtcatgtgtaaataaagtgaatatttagctgatatatttatattgttgaatcgaggtgtttacatggttcaaagtgttgctttagataacagaagaaagtatttataagaatatagcaagaaaaaaggtaatatgaggatcaataggttaacaataaagggggaggggcgtgcagggcgcttatgttatttgaccatacctgttgtcattaagtgtcataatctttgctaaattgaagatgcattcgtccagcgagatgagcaggcatgtagaatcggttaggataacaggcaatcagaatcagttaggataacaaattagtaagtgaataataatgtacataaacatatatattgagaaaagaccacatatattgaacacatgcacaagacatcaatttgaaccggtttatcacaatttaaggtctttgtgagttgttaacttggtatactatacaattttggcttgttatattgaatctgcattacaaaacttaagcacgatatctttccaaggtgtcgtttggtaggcatgggattttagctttggataatgtgcccattatcttatattatcaaggtgtagttggatactcagatttttgtctagaatctagatacaaaatgagacatgtttggcatattatgattttttgtgctagattctaagaatctcaacaaaccaaataggccccaagtagcatagcatgatagaagttgatttcatatgattatgaagtaggacctcgggcaataaaccagctagtcagctactgactttgatgttaagattttaagttgttataatgtcaaagatgttatgtaacttgtaacagctttgaaaaattatattttaaatttacatgttaacaatattgtattataacagccctgggagtgacaaattttataaaagacatagtaccatgtcaattatcgaattcatacatgttaagaatataaagatgttgtaatagtcgttatcctctcagaggtattataccatatataacagattttgaactttgatcttaacatgtatgatcagacatgctttgtaaattgtttaatgacaaatctaatcatacataataagtatgacagttatgagtatgataaattttagtttttttctttttcatgcaaatttggtatagctacaaaccatttgccagccatgcaaataaaaaaataatagctacatatatgatattgtccctgcatacatgtcgggcatgaggagtaccttcataattttaggagttgtggttaaatcatgttttgacattgaatagatttattgataagaaacatcaatattaacaactaatgtatgcatgacaatagaggtggtgatccaattacacccatcaccagaataaacgtttcttgtgcacaatgtttcacatatttcctcataccatattttctatgttcctaataattgttctatattgtagaaacttttagtttacttctcagcctacatatgtagaacacagatgcagataccgtatacgatggtgagctgaagtctttctctcttttttgagttagttaaatgtgcatcatatatattattcacagatgcagataccgtatatgttggtgagctgaagtctttctatctttttttagttagttaaatgtgcattatatatattattcgttttgagttagtataaactgatttctttctagcttccaggcaacgacgatggcgtactttatagtaattaatttagtcaacatcaccagtccgtatctgatctagtaatctgctgttcagctataactctttaggatggatctggcgctgcgatgtcacattcagtaaaagtttcggagaagatgaaggttgtagggaggaggagaatggctcataccttttcgaagcatcaacccaggtcgcccagcccagccctcgcgcgtactgaagcatccgaatcaacgtccctcgcagtctccgtcttgctccgcggttggcaccagcaccgcaacgaagaggcacctgaagacgctgacactgctgtgcgcggagggggcgaggagccgaggagtgacatcgtgagagtcatgggcggggcccacccgaacgcgacgagggacggggagggcacggacgacgaagcatagccggagctggaggaggtgacccaacaccagatcccgagaatggggcggaggagcctgcgagcggcggcggggcagcgggcaagacggtggtggcaatggcaggctgaggcggagcgtgagagccagcgggagcgccatagagaacatgacggcggtgaggcggcagcaggagcatgcggacggcgggacggggtggaacggtggagatttgac

SEQ ID NO: 23190 - DNA, 413 bp, Zea Mays
cctgaaaacaaaatctccaacagaatactgttgcgctcgatttggacgggatccgatcacccggggcttcacctccaccctatataactcgagcctgcgcctcctctcgagccatctaaacgcagagagcatctcttccgaatgcctcaccacggtcagagagggcggagagagaagaagtcgccgccaccgtcaaaagccggagttctcctgggtcgctaggaacctgtacgcgaaggaatcaggcgcggtgaagactttgtacccagggtattgctcaacggagcaggatctccgccccggtgccgcgattcgccgtgaatcgaagcctccgcgccatcaggcgagcaagcaaccgaggacccccgtacccagcaggtggaaaatactgagcaggtgctcgttgaaggcaa

SEQ ID NO: 23191 - DNA, 1903 bp, Zea Mays
cctgaaaacaaaatctccaacagaatactgttgcgctcgatttggacgggatccgatcacccggggcttcacctccaccctatataactcgagcctgcgcctcctctcgagccatctaaacgcagagagcatctcttccgaatgcctcaccacggtcagagagggcggagagagaagaagtcgccgccaccgtcaaaagccggagttctcctgggtcgctaggaacctgtacgcgaaggaatcaggcgcggtgaagactttgtacccagggtattgctcaacggagcaggatctccgccccggtgccgcgattcgccgtgaatcgaagcctccgcgccatcaggaagggaggcataatcgatctacctgccaataaccgtcgcaggaagattgttaaccaacctcaaccagagatgaatccttcaccgaaccctccaccggctggagtagatctagtagctgccactcagatgcaactgctgcaacaaatggcaaacaccatgatagaaatggctcagatgcgacaagaatgtcaggagatgcgccaggagttgcaggaaatgcgacaggaactccggcaggaacgactggaacggcagcaacaacaaccactacctccaccaccaccagctccaccccgggacaagcaccgggaattcatgagtcacaagccacctacattctccaactctccagatcctcttcaggctgatgactggctaaagacagtagataaaatgctcaacattgctcaatgtactgatcaggagaaagtgctctatgcgtcgggtcgtctcactggccccgctgctgattggtgggactcttactgtgctgcccatgctgctgccaacactatcacctgggcagaattctctacacaattcaggaactatcatattcctgcaagcttgatgaaaattaaaaagaaggaattcttgtcacttaagcaaggcaacatgacagttagtgaataccatgataaattcattcagctgtcaaggtatgctcccgacgaggttgctgatgatgaaaggaagcaggagcagttcatggagggactcattgggccactccagtaccagctggtatctcacaccttctcatctttccagaggcttctggacaaggctatagctgttgaacacaaacgtgttcagctaggcgagatgaaaaggaagactattacccagggacaggggagcagtagcgtccgccgtcgctatgttccaccccagggtacaccagctcgtcctggaggagggcaacagtcctaccagcgacctgctcagcagacaccacaggcgacaccgcagactccgcatactcgtcaggatgcccccactgtcaccccggcgagacctacaggacagggcactgctacagacaccatatgcttcaagtgtggcgagattggtcactatgctaatgtttgtccgaagaggaaccccaacacaccggctcgtggtaattctcaagtcaagcagacacagactctaggaagcaaccgtggctatagcatcgctaaggttaatcaaatcaatgttgaagctactgaggatggtcctaacatcgtcattggtacattcttcattaattccatgctagctactatacttttttattctggagcttcgcattcattcatatctgctcgttatgttcttgcaaatagtctaccttaccttgccctgcatagacctatgatagtcattacacctaaaggggcttatgaagcaacatatatgagtcatagaatagaattaacaattttaggaagaaagttttgggctatgcctgtagtgctagaagaaagtataatagacttaatccttggcatgaactggttaaaacagtggaatgcagtaatacattgtgctagaggaacagtagaactttctag

SEQ ID NO: 23192 - DNA, 507 bp, Zea Mays
cctgaaaacaaaatctccaacagaatactgttgcgctcgatttggacgggatccgatcacccggggcttcacctccaccctatataactcgagcctgcgcctcctctcgagccatctaaacgcagagagcatctcttccgaatgcctcaccacggtcagagagggcggagagagaagaagtcgccgccaccgtcaaaagccggagttctcctgggtcgctaggaacctgtacgcgaaggaatcaggcgcggtgaagactttgtacccagggtattgctcaacggagcaggatctccgccccggtgccgcgattcgccgtgaatcgaagcctccgcgccatcaggtgaagagcaggtagtccaagaggaagtctacaacgaggagtacgagcttatctaggtggcatctccgagtcagcttgatggcgccaatgaataattattagttcgctttattgttatcatttatttttgtaagacacttccgctatgtaataatatttgtgac

SEQ ID NO: 23193 - DNA, 233 bp, Zea Mays
cctcccctcgctccctcgaacacagcgcggacgtcatcctcatcgccataggccgcaagttgagaggataattcgacggcgtagtacctctggtgtcgggtctagggcttggcctatcgtgtgcctagagcttggtgcactgcggggtcgtcgttggcgaggcacttgtcatcgtggacaggcagaccctaccgacgcgctcatctacgtgaggtctcgagaacctaaagatc

SEQ ID NO: 23194 - DNA, 1925 bp, Zea Mays
gtctcaagcgtccgattttgagcgcaaggtccggattgcttaccatggaagcgaacgcgagtagaagcgaaggggccaaggcccaagggggccaagagcgcaagctctgccacccccaagaaagcgaggacgacggctcgccctcgcgcggcgccttcatcatgctcccgccgttcggcaacccgctctgggtaccggaggacatggacgaccagcagcagcacgcgcctccgccgacgcccatggagttgctgacggtgccggcgcaggggcacgaggagcagaacctcctagccctggcctcggccgccgccgttgccggggccggatgtgttttcagctcaccggcgatgctcgatgacgactggtacttcgaccccgtggctgcggccgccgccaccggcgcgcaggggcacctgctcctggcgccgccggggccggtgcccggccccggcgccggctcgcagatgttctccctcttcaacgttggcggcgccgcgacgttcgacgtccatgggttcgacattggcctcggcacgctcggcggcgggtccggtggcgacctggtcccgttggcgggtgcagggaacacatcgaattccgcgtccttttccatgtccctgaacgccggcctcctcgcctcctcgttcggcggctttggcacagcgccggcgcaaatgccggacttcggcggcctgggcgggttcgacatgttcaacaacggcgccggctcctcctccgcggcgccccctcctgcctcggcgtcccttacggtgccgttctccgggcgcgggaagcccgccgtgctccgcccgctggagaccttcccgcccgtgggcgcgcagccgacgctgttccagaagcgcgcgctgcgccgcaacggcggcggggaggactacgacaagaagcgcaaggcggaggccaccgccgcggctgcgggagcttcgtcggcctgtggcggtgacgacgctgaggacgatgacggcgggagcatcgacgcgtccgggctcaactacgactcggaggacgcctgcaggggcgtcgaggatagtggaaagaaggacggcaagggttccaacgccaacagcgcgggcgacgggaaaggtaagaggaagaggttgccggccaagaacctcatggcggagcgccgtcgccggaagaagcttaatgaccggctctacatgctccgatccgtcgtgcccaagatcagcaagatggacagggcctccattctcggcgacgcgatcgagtacctgaaggagctgctgcggaagatcgaggagctccagaacgaggtggagtcatcagcatccccagcttccacggcctcgctgcctccgacgcccacgagcttccgccctctgactcccacgctgcccgccctaccatctcgcgtgaaggaagagctgtgcccgagcgcgttgcctagccctacttccaagcaaccaagggttgaggtgaggacgacgagggaagggcgggaggtgaacatccacatgctctgcgctcgcaggcctgggcttctgctcgctaccatgagggcaatcgaagggctcgggctcgacgtccagcaagctgttgccagttgcttcaacgggttttccttggacatcttcaaggctgagctgtgcaaggacggcccagcgctcctcctcctgccagaagaagagatcaagtccgtcctcctgcagtctgccgggctccatggcgtggcgccgtgacgccggacggcaggactgcgtgctcacccagccgccaaagaagaaaataaaaagggaacgatgtagcttctgtcagatctgtcccttctccctgtcctgtatacattggatggctctttctgtttgccgtggtggctggctctgcccggccaaaacagtcgcgtggttgtggttcgctgcagccgagagaactgttccctttct

SEQ ID NO: 23195 - DNA, 3478 bp, Zea Mays
gggagtcgggacgctgacgtggcgcagcgagtgcgccaggccgccagctactcgccgggcatcgtcgcccaccgccaggtggggccccgtcccaagcttcttcttagctgcttgcctgcttgacctgaggcctccgccggtcgcaacaacagtctacagtcaatcacagtccccgcttcccggcggccaccgctgcatcctccctttccacgctccactctcctagcgcgcccgccttcatgggccccgttcgactcgccctcctcctttccgtcgccgccgtcctcgccgccgcgggcgcggtgtacatcccctacaacacgtcggcgggggtggtgccggggaagctcaacgtgcacgtcgtgccgcacacccacgacgacgtcggatggctcaagaccgtagaccagtactacgtcggatccaacaactccatccagggggcatgcgtgcagaacgtgctggattcgctcatcccggcgcttctcaaggacgagaaccgaaagttcatctatgttgagcaggcattcttccaaagatggtggaggaaccagaatgacatgatcaaggatacagtgaaggggctcatcagctctggacggctggaattaataaatggtggcatgtgcatgcacgatgaggcggctgtacactatattgacatgatcgatcagactacacttggacacaagtacatcaaggaggagtttggccagatcccacggattggctggcagattgatccgtttgggcactctgcggttcaggcttaccttcttggcgcagaagtaggattcgatgctttctatttcttccggattgattaccaagaccgtgatacacggaaaggaacaaaagaactcgaggttgtatggaggggctccaagaccttgggctcatcggctgatatctttgctggcatctttccaaaaaactatgaaccacctcctggtgatttttattttgaagttgatgataattcccctgttgtccaggatgatccccttcttttcgattataatgttgaagaacgagttaatgattttgttgctgcagctgtagcacaggcaaatatcacgaggacaaatcatatcatgtttacaatgggaacagacttcaaataccaatacgcagagagttggttcagaaatatggacaagctaattcactatgtgaacaaggatggccgtatcaacgctctttattccacaccttcgatttataccgatgcaaaatatgctgcaaatgagcagtggcctctcaagaccaatgatttcttcccatatgcagacaacccaaatgcctattggacgggttactttacaagcagacctgccttaaaacgatatgtccgcatgatgagtgggtattacctggcagctagacagctggagttctttaaagggagatatagctcaggtctctcaacggatagtctaggtgatgctctagctcttgcacagcaccatgatgctgttacaggaacagagaaacaacatgttgcaaatgattatgcaaagagattgtcaattggatatacacaagcccaggagctcgtttcaacttctcttgcttgcttgacagagtctggctcaaaatcacgttgtgcatccccagtgacaaaattttcacaatgtcttctgctaaatgttacatattgccctccttctgagatggacttaacgaaaggaaaaagcttggttgttcttgtatacaactcgcttgggtggaaacgagaagacgtcattcgtataccagttttcagtgattcgattgtcgttcatgattctgaaggacgagaaattgaatcacaacttctgcctatagctacagcctcgttgaacataagagaaaaacatgtcaaggcttacctgggcacaacgccaggtgcaaagcccaagttttggcttgcttttcctgtgtctgttccacctcttggtttcaatacttattttgtctcaaacttgaagaaatcagcacatatttcttcgaagtccactcagtactcacctcaaggaagtgaaagtagtaatctacaagttggtcaaggcaacttgaaacttcaatataatgaagctggaaaattatccctgtactccgatagtaagactatggttcaagcaaactttgagcagaaatacaagtattatattggacaggatggaaatggaagtgatcctcaggcttctggagcatacatattccgccctaatggcacagttccaatcagtactgatgggcaggtttctctcacagttctgcgtgggcccatattggatgaagtgcaccagcagataaattcatggatttttcagattaccaggctttacaaggagaaggactttttggaaactgaatttatagttgggcccataccagtagatgatggaaatggaaaagaagtagcaactgaaattgttacaaacatggttacaaacaaaacattctacactgattccagtggacgtgatttcatcaaaagggttaatcttggcatctatgtggaggatggcagcaaagagctgtctgtactggtagacaggtcaattggaggttccagtataaaggatggacaaatagagctaatgctacacaggaggctactccatgatgatgggaaaggcgtcgccgaggcgctaaatgaaacagtctgtctcgataagcaatgtgaaggactcattatacaaggaaaatactatgtcaaaatagacccacaaggagaaggagctcggtggcgtcggacatttggccaggaaatatactcccctctccttcttgctttcacagagcaggatggaggcaactgggcgaattcacatgttgcaaaattctctgcgatggattcaacttacagcttgcctgataatgttgcaatgcttacccttcaggagcttgaagatggaagtgttctccttcggtttgctcatctatatgaggccggggaggacaaggatctttcgtctttagcgagtatcgacctcaagagagtgttcccggagaagaagattggcaaggtcatcgagacaagcttatcggcaaaccaagaacgcgcagccatggagaagaagcgtttgaaatggaaggcgcaaggttctgcggctgacgagaaggtggttcggggtggccctgtggatccttcgaagctcgtcgttgagctggggccaatggagatccgcacattcatcgtcagctttgatcacatcagtgacaagcaacagctataatcgtctccgactagacgactatgtctggatgaagttgtcttgcggcttccaaataaaaaaaataatgtggcctgctgtgtacctgtggttcaacccatgatatggcctgctgtgggtcagcacggttctaaagctaaggacgttttataaggcaaattttgctttagggtgtcactcctctcctcacgttgcaaaaatacagaaaaaaccagcgaaaacatgattgcaaacagatatacaacaaaataaatgaa

SEQ ID NO: 23196 - DNA, 638 bp, Zea Mays
cacgatatcatcaccgggactgcggcgatgtcgtcggccgccgcctcctcctctcccgccgccggtagcgaaggaagcggtggtgcggtggaagggcgggagatcgcgtacgtgagctacggaggggagcatcacctgccgctggtaatgtcgctggtcgacgaggagctcagcgagccctactccatcttcacataccgctacttcgtgtacctctggccgcagctcaccttcctgcaactgagctagttactagatcaattcgggtgatgatggagtctggctgtgaggaggtgacacttgaagcagaagttactaacaagggtgcccttgctctctatggtcgcctggggtttatccgagcaaaaagactgtacagggatgaccagaagatggattctccctacttgtgacagtaccctaatcagtatgtagaattgagttggagaccctgatcattcttttttgctctgtttcatgcttttatagctagcatgtaactgcatattgttgtactaacatataaattttcgaggtgttttatttcctcctgttctttgataaggatgtattaatcaacttcagatcaaacaataagaccgtgcagttcttttgctcaataaacaaaacgcatgccg

SEQ ID NO: 23197 - DNA, 753 bp, Zea Mays
accgggactgcggcgatgtcgtcggccgccgcctcctcctctcccgccgccggtagcgaaggaagcggtggtgcggtggaagggcgggagatcgcgtacgtgagctacggaggggagcatcacctgccgctggtaatgtcgctggtcgacgaggagctcagcgagccctactccatcttcacataccgctacttcgtgtacctctggccgcagctcaccttcctggcgttcgatgccagggatggcaagtgcgtggggacggtcgtgtgcaagatgggggagcaccggggtgcattcaggggctacatcgccatgctcgtcgtcctgaagccctaccgaggaaggggaatagcaactgagctagttactagatcaattcgggtgatgatggagtctggctgtgaggaggtgacacttgaagcagaagttactaacaagggtgcccttgctctctatggtcgcctggggtttatccgagcaaaaagactgtacagggatgaccagaagatggattctccctacttgtgacagtaccctaatcagtatgtagaattgagttggagaccctgatcattcttttttgctctgtttcatgcttttatagctagcatgtaactgcatattgttgtactaacatataaattttcgaggtgttttatttcctcctgttctttgataaggatgtattaatcaacttcagatcaaacaataagaccgtgcagttcttttgctcaataaacaaaacgcatgccg

SEQ ID NO: 23198 - DNA, 757 bp, Zea Mays
gcgatgtcgtcggccgccgcctcctcctctcccgccgccggtagcgaaggaagcggtggtgcggtggaagggcgggagatcgcgtacgtgagctacggaggggagcatcacctgccgctggtaatgtcgctggtcgacgaggagctcagcgagccctactccatcttcacataccgctacttcgtgtacctctggccgcagctcaccttcctggcgttcgatgccagggatggcaagtgcgtggggacggtcgtgtgcaagatgggggagcaccggggtgcattcaggggctacatcgccatgctcgtcgtcctgaagccctaccgaggaaggggaatagcaactgagctagttactagatcaattcgggtgatgatggagtctggctgtgaggagactgtacaggtactatttgaatggtgtagacgcttttcggctgaaacttctgtttccacgccctgatcctggcctgcctccaatgatggttggcaatgacagggatgaccagaagatggattctccctacttgtgacagtaccctaatcagtatgtagaattgagttggagaccctgatcattcttttttgctctgtttcatgcttttatagctagcatgtaactgcatattgttgtactaacatataaattttcgaggtgttttatttcctcctgttctttgataaggatgtattaatcaacttcagatcaaacaataagaccgtgcagttcttttgctcaataaacaaaacgcatgccg

SEQ ID NO: 23199 - DNA, 518 bp, Zea Mays
atgtcgtcggccgccgcctcctcctctcccgccgccggtagcgaaggaagcggtggtgcggtggaagggcgggagatcgcgtacgtgagctacggaggggagcatcacctgccgctgcaactgagctagttactagatcaattcgggtgatgatggagtctggctgtgaggaggtgacacttgaagcagaagttactaacaagggtgcccttgctctctatggtcgcctggggtttatccgagcaaaaagactgtacagggatgaccagaagatggattctccctacttgtgacagtaccctaatcagtatgtagaattgagttggagaccctgatcattcttttttgctctgtttcatgcttttatagctagcatgtaactgcatattgttgtactaacatataaattttcgaggtgttttatttcctcctgttctttgataaggatgtattaatcaacttcagatcaaacaataagaccgtgcagttcttttgctcaataaacaaaacgcatgccg

SEQ ID NO: 23200 - DNA, 3647 bp, Zea Mays
gtgacgtcttcccttccccaccgcgcccctgcccccactctcccacttcagatctcctcgtccactccgtcgccgtcgtcttcctctctcccctcccgccggccgatgcatcccaaaccctagccctccggcgcaaaaccctagatcccgcccccgcctgcatggatccctcatccggatccacgtcccgccacgggcgtctcctcatctcgccgtcgctatccaccccgaccttctccacccactccccgtccccctcatcggccgcgtcccccgcgccgcaccgcaactccacatcctctccgaagcccctcgtatctttcccctcaccctcttccgccaacaggccccgatcctcctacgtcggcgctggaccgcgcgctgccaccgcagcggcctcggcctcgggtccggcgttcgcccacaacgcgcgccttgcggcggccctggtccctgccgcggccttccttctcgaccttggcgggctccccgtcttcgccgtcctcgccatcggcctagcggcggcataccttctcgacgcgctccagctgcgccagggctccttcttcaccgtctgggcggcgctgctcgcggccgatgtcgcttttttcttctccgcctccctatcgtccgcggccgctgcctcgctgccgctgaccgtcctcgcgctgcttctctgcgctgagacctccttcctcattggcgtctgggcgtcgctgcagttccgatggatccagctcgagaacccgactattgttgctgccctggagcggctgctctttgcctgtgtgcccattgccgcccccgccctcttcacgtgggctctcgtgtctgcggtcggcatggccaatgcatcctactattttgccacgttctgcatggtgttctactggctgttctctataccccgtcggtccagcttcaatagccggaagcaggatgctccaatgctggacagtgatggcattcttggtcccttggagagctgtgtgcattctctgtatgtgctgttcgtgccggtgttgttccatgccgtgtcccatcgtgcaacactcttcacatcgttggccagtgtgtgtgaattgttgttgctgttcttcataccgttcttgttccagctgtatgcatccactcgtggtgcactgtggtggatcaccagggatgcacgcaccatggaccagataagaattgtgaatgggttcgtcgcactggtcgtggtggtgctttgccttgaggtgagagttgtgttccactcgtttggaaggtacattcatgctccaccaccgctgaattacctgcttgtaactgtcacaatgcttggtggcgctttgggtcttgcagcacatgctgcgggcaaggttggggatgctgctagttctgtggcttttacaggattggcagtgctagtcagtggagcaggagctgtagtcattggattccccatggtgttcctgccactgccgatgatttctggctattatgttgcaaggttctttactaagaaaagcttgtcatcatactttacctttgtggcacttgcaagcttgatggtcctttggtttgtggtgcacaattattgggatctgaatatttggattgctggcatgccattgaagtccttcacaaagtatgttgttgcagctgtcatcatggcaatggctgttcctggtttggcacttcttccaacaaaacttcggtttcttctggaacttggtcttattggtcatacattgttgctatgctacattgagaaccgattgtttaactatgcctccatgtattattatggatttgaagaggatatcatctatcctaattatatggtttttattacaacctttttgggcttggctcttgtaaggagattatatgttgatcagagactagggcccaaagctgcttggatcttaacttgtctatattcatcaaagttagcaatgctgtttatgacatcaagatcagttatatggttctcagctgttttgctacttgctgttaccccacctttacttctttacagagacaagtccaaaggagcttctaagatgaaggtctggcaagcttattttcatgcatctgtcatagcattttctgcctggctctgccgggaaacaatttttgaagctttacagtggtggaatggaagacctccttcagatggtctgttactgggttcatatattcttttgacaggagttgcatgcattccaatagtcgctctccatttccctcatgctcagtcagcgaagagattcctggtccttattgtggcaacaggccttctcttcgttgttatgcagcctcctattaagctatcatgggtataccggtcggattttatcacagcggcacatttatctgatgatgacatttcaatatatgggtttgtagcatctaagccctcatggccgtcatggctgctcattgcaactgtggtacttacactagcagcagttacatccatcatcccagtgaagtatgtcgttgagttaaggacttcatatgcagtggctgtggggattacactaggcatctacatctctgttcagtacttcttccaggcagttgttctgtatcctcttcttgttgcaacaattgtctctgcagcagtctttgtcgtattcacacatcttccttctgaatcaagcacaagggttttgccatgggtgttctctttcttggtagctttgttcccagtcacctatctgctcgaaggacacttaagagccaaaagttttgcagatgaggatgaagcagagaagttcaccaacatgttggctatagaaggggctagaatgtcacttttgggtctctatgctgccatcttcatgattattgcattagaaatcaagtttgagctgactttgctattgcgtgaaaaggctgcagacagaggtatgcatggtccatctagtcggagtgctgccttcccacccaaagcaaggctgctccagcaacgaagagctcatgctgcaccaacattcaccatcaagcggttggcagcagaggcagcatggatgcctgctataggatatgggaggagacttggcctggcaatggaggatgggctcttgatatcgggggcccgggctggctgtttgctgtgaagaactttgctcttcttgtgctcactttgccgaatcacatactcttcaaccgcttcatgtgggattatgtcagacagacagatgccaagctactgctgacgctacctctcaacttgccttcgattataatgacagacatacttactattcgggtgttaggattgctaggagctatgtactctcttgcccagtacatgatatcaaggcgcataagaattgctgggatgagatacatttgaaataggtcatgtaactttctgaggctgtcactatacatcaagttctttcaaaactcaggaacagatacttcattgcctgatcctctcgcagcaaaattgtgctatgtagcagagagaaacaagtgtcgaacgactttgctttttttgtactgaatgattgcatactgagtgtaggctaaaggtgttgtcgcatatatagatgtattttaacagcacagatgatgccatcaccttgggtcgtttatgttgaacttttgacggcgcaaagttttgcattcacctgagcagaagactttgatgt

SEQ ID NO: 23201 - DNA, 3852 bp, Zea Mays
gacgtcttcccttccccaccgcgcccctgcccccactctcccacttcagatctcctcgtccactccgtcgccgtcgtcttcctctctcccctcccgccggccgatgcatcccaaaccctagccctccggcgcaaaaccctagatcccgcccccgcctgcatggatccctcatccggatccacgtcccgccacgggcgtctcctcatctcgccgtcgctatccaccccgaccttctccacccactccccgtccccctcatcggccgcgtcccccgcgccgcaccgcaactccacatcctctccgaagcccctcgtatctttcccctcaccctcttccgccaacaggccccgatcctcctacgtcggcgctggaccgcgcgctgccaccgcagcggcctcggcctcgggtccggcgttcgcccacaacgcgcgccttgcggcggccctggtccctgccgcggccttccttctcgaccttggcgggctccccgtcttcgccgtcctcgccatcggcctagcggcggcataccttctcgacgcgctccagctgcgccagggctccttcttcaccgtctgggcggcgctgctcgcggccgatgtcgcttttttcttctccgcctccctatcgtccgcggccgctgcctcgctgccgctgaccgtcctcgcgctgcttctctgcgctgagacctccttcctcattggcgtctgggcgtcgctgcagttccgatggatccagctcgagaacccgactattgttgctgccctggagcggctgctctttgcctgtgtgcccattgccgcccccgccctcttcacgtgggctctcgtgtctgcggtcggcatggccaatgcatcctactattttgccacgttctgcatggtgttctactggctgttctctataccccgtcggtccagcttcaatagccggaagcaggatgctccaatgctggacagtgatggcattcttggtcccttggagagctgtgtgcattctctgtatgtgctgttcgtgccggtgttgttccatgccgtgtcccatcgtgcaacactcttcacatcgttggccagtgtgtgtgaattgttgttgctgttcttcataccgttcttgttccagctgtatgcatccactcgtggtgcactgtggtggatcaccagggatgcacgcaccatggaccagataagaattgtgaatgggttcgtcgcactggtcgtggtggtgctttgccttgaggtgagagttgtgttccactcgtttggaaggtacattcatgctccaccaccgctgaattacctgcttgtaactgtcacaatgcttggtggcgctttgggtcttgcagcacatgctgcgggcaaggttggggatgctgctagttctgtggcttttacaggattggcagtgctagtcagtggagcaggagctgtagtcattggattccccatggtgttcctgccactgccgatgatttctggctattatgttgcaaggttctttactaagaaaagcttgtcatcatactttacctttgtggcacttgcaagcttgatggtcctttggtttgtggtgcacaattattgggatctgaatatttggattgctggcatgccattgaagtccttcacaaagtatgttgttgcagctgtcatcatggcaatggctgttcctggtttggcacttcttccaacaaaacttcggtttcttctggaacttggtcttattggtcatacattgttgctatgctacattgagaaccgattgtttaactatgcctccatgtattattatggatttgaagaggatatcatctatcctaattatatggtttttattacaacctttttgggcttggctcttgtaaggagattatatgttgatcagagactagggcccaaagctgcttggatcttaacttgtctatattcatcaaagttagcaatgctgtttatgacatcaagatcagttatatggttctcagctgttttgctacttgctgttaccccacctttacttctttacagagacaagtccaaaggagcttctaagatgaaggtctggcaagcttattttcatgcatctgtcatagcattttctgcctggctctgccgggaaacaatttttgaagctttacagtggtggaatggaagacctccttcagatggtctgttactgggttcatatattcttttgacaggagttgcatgcattccaatagtcgctctccatttccctcatgctcagcgaagagattcctggtccttattgtggcaacaggccttctcttcgttgttatgcagcctcctattaagctatcatgggtataccggtcggattttatcacagcggcacatttatctgatgatgacatttcaatatatgggtttgtagcatctaagccctcatggccgtcatggctgctcattgcaactgtggtacttacactagcagcagttacatccatcatcccagtgaagtatgtcgttgagttaaggacttcatatgcagtggctgtggggattacactaggcatctacatctctgttcagtacttcttccaggcagttgttctgtatcctcttcttgttgcaacaattgtctctgcagcagtctttgtcgtattcacacatcttccttctgaatcaagcacaagggttttgccatgggtgttctctttcttggtagctttgttcccagtcacctatctgctcgaaggacacttaagagccaaaagttttgcagatgaggatgaagcagagaagttcaccaacatgttggctatagaaggggctagaatgtcacttttgggtctctatgctgccatcttcatgattattgcattagaaatcaagtttgagctgactttgctattgcgtgaaaaggctgcagacagaggtatgcatggtccatctagtcggagtgctgccttcccacccaaagcaaggctgctccagcaacgaagagctcatgctgcaccaacattcaccatcaagcggttggcagcagaggcagcatggatgcctgctataggcaatgtttctactgtgctgtgttttggcatctgcctggttctaaatctaacactcactggtggctcgaaccgtgctattttcttcctggcgccaatccttctgcttctgaaccaggattcagatatcttcgcagggtttggtgataggcagcgctatttcccagtaacagtttctatttctggctatttattgttgacagcgttgtataggatatgggaggagacttggcctggcaatggaggatgggctcttgatatcgggggcccgggctggctgtttgctgtgaagaactttgctcttcttgtgctcactttgccgaatcacatactcttcaaccgcttcatgtgggattatgtcagacagacagatgccaagctactgctgacgctacctctcaacttgccttcgattataatgacagacatacttactattcgggtgttaggattgctaggagctatgtactctcttgcccagtacatgatatcaaggcgcataagaattgctgggatgagatacatttgaaataggtcatgtaactttctgaggctgtcactatacatcaagttctttcaaaactcaggaacagatacttcattgcctgatcctctcgcagcaaaattgtgctatgtagcagagagaaacaagtgtcgaacgactttgctttttttgtactgaatgattgcatactgagtgtaggctaaaggtgttgtcgcatatatagatgtattttaacagcacagatgatgccatcaccttgggtcgtttatgttgaacttttgacggcgcaaagttttgcattcacctgagcagaagactttgatgt

SEQ ID NO: 23202 - DNA, 3849 bp, Zea Mays
gacgtcttcccttccccaccgcgcccctgcccccactctcccacttcagatctcctcgtccactccgtcgccgtcgtcttcctctctcccctcccgccggccgatgcatcccaaaccctagccctccggcgcaaaaccctagatcccgcccccgcctgcatggatccctcatccggatccacgtcccgccacgggcgtctcctcatctcgccgtcgctatccaccccgaccttctccacccactccccgtccccctcatcggccgcgtcccccgcgccgcaccgcaactccacatcctctccgaagcccctcgtatctttcccctcaccctcttccgccaacaggccccgatcctcctacgtcggcgctggaccgcgcgctgccaccgcagcggcctcggcctcgggtccggcgttcgcccacaacgcgcgccttgcggcggccctggtccctgccgcggccttccttctcgaccttggcgggctccccgtcttcgccgtcctcgccatcggcctagcggcggcataccttctcgacgcgctccagctgcgccagggctccttcttcaccgtctgggcggcgctgctcgcggccgatgtcgcttttttcttctccgcctccctatcgtccgcggccgctgcctcgctgccgctgaccgtcctcgcgctgcttctctgcgctgagacctccttcctcattggcgtctgggcgtcgctgcagttccgatggatccagctcgagaacccgactattgttgctgccctggagcggctgctctttgcctgtgtgcccattgccgcccccgccctcttcacgtgggctctcgtgtctgcggtcggcatggccaatgcatcctactattttgccacgttctgcatggtgttctactggctgttctctataccccgtcggtccagcttcaatagccggaagcaggatgctccaatgctggacagtgatggcattcttggtcccttggagagctgtgtgcattctctgtatgtgctgttcgtgccggtgttgttccatgccgtgtcccatcgtgcaacactcttcacatcgttggccagtgtgtgtgaattgttgttgctgttcttcataccgttcttgttccagctgtatgcatccactcgtggtgcactgtggtggatcaccagggatgcacgcaccatggaccagataagaattgtgaatgggttcgtcgcactggtcgtggtggtgctttgccttgaggtgagagttgtgttccactcgtttggaaggtacattcatgctccaccaccgctgaattacctgcttgtaactgtcacaatgcttggtggcgctttgggtcttgcagcacatgctgcgggcaaggttggggatgctgctagttctgtggcttttacaggattggcagtgctagtcagtggagcaggagctgtagtcattggattccccatggtgttcctgccactgccgatgatttctggctattatgttgcaaggttctttactaagaaaagcttgtcatcatactttacctttgtggcacttgcaagcttgatggtcctttggtttgtggtgcacaattattgggatctgaatatttggattgctggcatgccattgaagtccttcacaaagtatgttgttgcagctgtcatcatggcaatggctgttcctggtttggcacttcttccaacaaaacttcggtttcttctggaacttggtcttattggtcatacattgttgctatgctacattgagaaccgattgtttaactatgcctccatgtattattatggatttgaagaggatatcatctatcctaattatatggtttttattacaacctttttgggcttggctcttgtaaggagattatatgttgatcagagactagggcccaaagctgcttggatcttaacttgtctatattcatcaaagttagcaatgctgtttatgacatcaagatcagttatatggttctcagctgttttgctacttgctgttaccccacctttacttctttacagagacaagtccaaaggagcttctaagatgaaggtctggcaagcttattttcatgcatctgtcatagcattttctgcctggctctgccgggaaacaatttttgaagctttacagtggtggaatggaagacctccttcagatggagttgcatgcattccaatagtcgctctccatttccctcatgctcagtcagcgaagagattcctggtccttattgtggcaacaggccttctcttcgttgttatgcagcctcctattaagctatcatgggtataccggtcggattttatcacagcggcacatttatctgatgatgacatttcaatatatgggtttgtagcatctaagccctcatggccgtcatggctgctcattgcaactgtggtacttacactagcagcagttacatccatcatcccagtgaagtatgtcgttgagttaaggacttcatatgcagtggctgtggggattacactaggcatctacatctctgttcagtacttcttccaggcagttgttctgtatcctcttcttgttgcaacaattgtctctgcagcagtctttgtcgtattcacacatcttccttctgaatcaagcacaagggttttgccatgggtgttctctttcttggtagctttgttcccagtcacctatctgctcgaaggacacttaagagccaaaagttttgcagatgaggatgaagcagagaagttcaccaacatgttggctatagaaggggctagaatgtcacttttgggtctctatgctgccatcttcatgattattgcattagaaatcaagtttgagctgactttgctattgcgtgaaaaggctgcagacagaggtatgcatggtccatctagtcggagtgctgccttcccacccaaagcaaggctgctccagcaacgaagagctcatgctgcaccaacattcaccatcaagcggttggcagcagaggcagcatggatgcctgctataggcaatgtttctactgtgctgtgttttggcatctgcctggttctaaatctaacactcactggtggctcgaaccgtgctattttcttcctggcgccaatccttctgcttctgaaccaggattcagatatcttcgcagggtttggtgataggcagcgctatttcccagtaacagtttctatttctggctatttattgttgacagcgttgtataggatatgggaggagacttggcctggcaatggaggatgggctcttgatatcgggggcccgggctggctgtttgctgtgaagaactttgctcttcttgtgctcactttgccgaatcacatactcttcaaccgcttcatgtgggattatgtcagacagacagatgccaagctactgctgacgctacctctcaacttgccttcgattataatgacagacatacttactattcgggtgttaggattgctaggagctatgtactctcttgcccagtacatgatatcaaggcgcataagaattgctgggatgagatacatttgaaataggctgtcactatacatcaagttctttcaaaactcaggaacagatacttcattgcctgatcctctcgcagcaaaattgtgctatgtagcagagagaaacaagtgtcgaacgactttgctttttttgtactgaatgattgcatactgagtgtaggctaaaggtgttgtcgcatatatagatgtattttaacagcacagatgatgccatcaccttgggtcgtttatgttgaacttttgacggcgcaaagttttgcattcacctgagcagaagactttgatgtaactgttgatttcgttttttttttttacttacatatatcatgaa

SEQ ID NO: 23203 - DNA, 4003 bp, Zea Mays
gacgtcttcccttccccaccgcgcccctgcccccactctcccacttcagatctcctcgtccactccgtcgccgtcgtcttcctctctcccctcccgccggccgatgcatcccaaaccctagccctccggcgcaaaaccctagatcccgcccccgcctgcatggatccctcatccggatccacgtcccgccacgggcgtctcctcatctcgccgtcgctatccaccccgaccttctccacccactccccgtccccctcatcggccgcgtcccccgcgccgcaccgcaactccacatcctctccgaagcccctcgtatctttcccctcaccctcttccgccaacaggccccgatcctcctacgtcggcgctggaccgcgcgctgccaccgcagcggcctcggcctcgggtccggcgttcgcccacaacgcgcgccttgcggcggccctggtccctgccgcggccttccttctcgaccttggcgggctccccgtcttcgccgtcctcgccatcggcctagcggcggcataccttctcgacgcgctccagctgcgccagggctccttcttcaccgtctgggcggcgctgctcgcggccgatgtcgcttttttcttctccgcctccctatcgtccgcggccgctgcctcgctgccgctgaccgtcctcgcgctgcttctctgcgctgagacctccttcctcattggcgtctgggcgtcgctgcagttccgatggatccagctcgagaacccgactattgttgctgccctggagcggctgctctttgcctgtgtgcccattgccgcccccgccctcttcacgtgggctctcgtgtctgcggtcggcatggccaatgcatcctactattttgccacgttctgcatggtgttctactggctgttctctataccccgtcggtccagcttcaatagccggaagcaggatgctccaatgctggacagtgatggcattcttggtcccttggagagctgtgtgcattctctgtatgtgctgttcgtgccggtgttgttccatgccgtgtcccatcgtgcaacactcttcacatcgttggccagtgtgtgtgaattgttgttgctgttcttcataccgttcttgttccagctgtatgcatccactcgtggtgcactgtggtggatcaccagggatgcacgcaccatggaccagataagaattgtgaatgggttcgtcgcactggtcgtggtggtgctttgccttgaggtgagagttgtgttccactcgtttggaaggtacattcatgctccaccaccgctgaattacctgcttgtaactgtcacaatgcttggtggcgctttgggtcttgcagcacatgctgcgggcaaggttggggatgctgctagttctgtggcttttacaggattggcagtgctagtcagtggagcaggagctgtagtcattggattccccatggtgctgggtacctgaatacttacacccttataatccctctacttttcatgtcatcctcaccacaatatctcaatgatgttgcttagtacttgaattatggctgtggcgctgtgcgaagctagtgagttccttggcagagttcctgccactgccgatgatttctggctattatgttgcaaggttctttactaagaaaagcttgtcatcatactttacctttgtggcacttgcaagcttgatggtcctttggtttgtggtgcacaattattgggatctgaatatttggattgctggcatgccattgaagtccttcacaaagtatgttgttgcagctgtcatcatggcaatggctgttcctggtttggcacttcttccaacaaaacttcggtttcttctggaacttggtcttattggtcatacattgttgctatgctacattgagaaccgattgtttaactatgcctccatgtattattatggatttgaagaggatatcatctatcctaattatatggtttttattacaacctttttgggcttggctcttgtaaggagattatatgttgatcagagactagggcccaaagctgcttggatcttaacttgtctatattcatcaaagttagcaatgctgtttatgacatcaagatcagttatatggttctcagctgttttgctacttgctgttaccccacctttacttctttacagagacaagtccaaaggagcttctaagatgaaggtctggcaagcttattttcatgcatctgtcatagcattttctgcctggctctgccgggaaacaatttttgaagctttacagtggtggaatggaagacctccttcagatggagttgcatgcattccaatagtcgctctccatttccctcatgctcagtcagcgaagagattcctggtccttattgtggcaacaggccttctcttcgttgttatgcagcctcctattaagctatcatgggtataccggtcggattttatcacagcggcacatttatctgatgatgacatttcaatatatgggtttgtagcatctaagccctcatggccgtcatggctgctcattgcaactgtggtacttacactagcagcagttacatccatcatcccagtgaagtatgtcgttgagttaaggacttcatatgcagtggctgtggggattacactaggcatctacatctctgttcagtacttcttccaggcagttgttctgtatcctcttcttgttgcaacaattgtctctgcagcagtctttgtcgtattcacacatcttccttctgaatcaagcacaagggttttgccatgggtgttctctttcttggtagctttgttcccagtcacctatctgctcgaaggacacttaagagccaaaagttttgcagatgaggatgaagcagagaagttcaccaacatgttggctatagaaggggctagaatgtcacttttgggtctctatgctgccatcttcatgattattgcattagaaatcaagtttgagctgactttgctattgcgtgaaaaggctgcagacagaggtatgcatggtccatctagtcggagtgctgccttcccacccaaagcaaggctgctccagcaacgaagagctcatgctgcaccaacattcaccatcaagcggttggcagcagaggcagcatggatgcctgctataggcaatgtttctactgtgctgtgttttggcatctgcctggttctaaatctaacactcactggtggctcgaaccgtgctattttcttcctggcgccaatccttctgcttctgaaccaggattcagatatcttcgcagggtttggtgataggcagcgctatttcccagtaacagtttctatttctggctatttattgttgacagcgttgtataggatatgggaggagacttggcctggcaatggaggatgggctcttgatatcgggggcccgggctggctgtttgctgtgaagaactttgctcttcttgtgctcactttgccgaatcacatactcttcaaccgcttcatgtgggattatgtcagacagacagatgccaagctactgctgacgctacctctcaacttgccttcgattataatgacagacatacttactattcgggtgttaggattgctaggagctatgtactctcttgcccagtacatgatatcaaggcgcataagaattgctgggatgagatacatttgaaataggtcatgtaactttctgaggctgtcactatacatcaagttctttcaaaactcaggaacagatacttcattgcctgatcctctcgcagcaaaattgtgctatgtagcagagagaaacaagtgtcgaacgactttgctttttttgtactgaatgattgcatactgagtgtaggctaaaggtgttgtcgcatatatagatgtattttaacagcacagatgatgccatcaccttgggtcgtttatgttgaacttttgacggcgcaaagttttgcattcacctgagcagaagactttgatgtaactgttgatttcgttttttttttttacttacatatatcatgaa

SEQ ID NO: 23204 - DNA, 3761 bp, Zea Mays
gacgtcttcccttccccaccgcgcccctgcccccactctcccacttcagatctcctcgtccactccgtcgccgtcgtcttcctctctcccctcccgccggccgatgcatcccaaaccctagccctccggcgcaaaaccctagatcccgcccccgcctgcatggatccctcatccggatccacgtcccgccacgggcgtctcctcatctcgccgtcgctatccaccccgaccttctccacccactccccgtccccctcatcggccgcgtcccccgcgccgcaccgcaactccacatcctctccgaagcccctcgtatctttcccctcaccctcttccgccaacaggccccgatcctcctacgtcggcgctggaccgcgcgctgccaccgcagcggcctcggcctcgggtccggcgttcgcccacaacgcgcgccttgcggcggccctggtccctgccgcggccttccttctcgaccttggcgggctccccgtcttcgccgtcctcgccatcggcctagcggcggcataccttctcgacgcgctccagctgcgccagggctccttcttcaccgtctgggcggcgctgctcgcggccgatgtcgcttttttcttctccgcctccctatcgtccgcggccgctgcctcgctgccgctgaccgtcctcgcgctgcttctctgcgctgagacctccttcctcattggcgtctgggcgtcgctgcagttccgatggatccagctcgagaacccgactattgttgctgccctggagcggctgctctttgcctgtgtgcccattgccgcccccgccctcttcacgtgggctctcgtgtctgcggtcggcatggccaatgcatcctactattttgccacgttctgcatggtgttctactggctgttctctataccccgtcggtccagcttcaatagccggaagcaggatgctccaatgctggacagtgatggcattcttggtcccttggagagctgtgtgcattctctgtatgtgctgttcgtgccggtgttgttccatgccgtgtcccatcgtgcaacactcttcacatcgttggccagtgtgtgtgaattgttgttgctgttcttcataccgttcttgttccagctgtatgcatccactcgtggtgcactgtggtggatcaccagggatgcacgcaccatggaccagataagaattgtgaatgggttcgtcgcactggtcgtggtggtgctttgccttgagcacatgctgcgggcaaggttggggatgctgctagttctgtggcttttacaggattggcagtgctagtcagtggagcaggagctgtagtcattggattccccatggtgttcctgccactgccgatgatttctggctattatgttgcaaggttctttactaagaaaagcttgtcatcatactttacctttgtggcacttgcaagcttgatggtcctttggtttgtggtgcacaattattgggatctgaatatttggattgctggcatgccattgaagtccttcacaaagtatgttgttgcagctgtcatcatggcaatggctgttcctggtttggcacttcttccaacaaaacttcggtttcttctggaacttggtcttattggtcatacattgttgctatgctacattgagaaccgattgtttaactatgcctccatgtattattatggatttgaagaggatatcatctatcctaattatatggtttttattacaacctttttgggcttggctcttgtaaggagattatatgttgatcagagactagggcccaaagctgcttggatcttaacttgtctatattcatcaaagttagcaatgctgtttatgacatcaagatcagttatatggttctcagctgttttgctacttgctgttaccccacctttacttctttacagagacaagtccaaaggagcttctaagatgaaggtctggcaagcttattttcatgcatctgtcatagcattttctgcctggctctgccgggaaacaatttttgaagctttacagtggtggaatggaagacctccttcagatggagttgcatgcattccaatagtcgctctccatttccctcatgctcagtcagcgaagagattcctggtccttattgtggcaacaggccttctcttcgttgttatgcagcctcctattaagctatcatgggtataccggtcggattttatcacagcggcacatttatctgatgatgacatttcaatatatgggtttgtagcatctaagccctcatggccgtcatggctgctcattgcaactgtggtacttacactagcagcagttacatccatcatcccagtgaagtatgtcgttgagttaaggacttcatatgcagtggctgtggggattacactaggcatctacatctctgttcagtacttcttccaggcagttgttctgtatcctcttcttgttgcaacaattgtctctgcagcagtctttgtcgtattcacacatcttccttctgaatcaagcacaagggttttgccatgggtgttctctttcttggtagctttgttcccagtcacctatctgctcgaaggacacttaagagccaaaagttttgcagatgaggatgaagcagagaagttcaccaacatgttggctatagaaggggctagaatgtcacttttgggtctctatgctgccatcttcatgattattgcattagaaatcaagtttgagctgactttgctattgcgtgaaaaggctgcagacagaggtatgcatggtccatctagtcggagtgctgccttcccacccaaagcaaggctgctccagcaacgaagagctcatgctgcaccaacattcaccatcaagcggttggcagcagaggcagcatggatgcctgctataggcaatgtttctactgtgctgtgttttggcatctgcctggttctaaatctaacactcactggtggctcgaaccgtgctattttcttcctggcgccaatccttctgcttctgaaccaggattcagatatcttcgcagggtttggtgataggcagcgctatttcccagtaacagtttctatttctggctatttattgttgacagcgttgtataggatatgggaggagacttggcctggcaatggaggatgggctcttgatatcgggggcccgggctggctgtttgctgtgaagaactttgctcttcttgtgctcactttgccgaatcacatactcttcaaccgcttcatgtgggattatgtcagacagacagatgccaagctactgctgacgctacctctcaacttgccttcgattataatgacagacatacttactattcgggtgttaggattgctaggagctatgtactctcttgcccagtacatgatatcaaggcgcataagaattgctgggatgagatacatttgaaataggtcatgtaactttctgaggctgtcactatacatcaagttctttcaaaactcaggaacagatacttcattgcctgatcctctcgcagcaaaattgtgctatgtagcagagagaaacaagtgtcgaacgactttgctttttttgtactgaatgattgcatactgagtgtaggctaaaggtgttgtcgcatatatagatgtattttaacagcacagatgatgccatcaccttgggtcgtttatgttgaacttttgacggcgcaaagttttgcattcacctgagcagaagactttgatgtaactgttgatttcgttttttttttttacttacatatatcatgaa

SEQ ID NO: 23205 - DNA, 2454 bp, Zea Mays
cttgaattatggctgtggcgctgtgcgaagctattcctgccactgccgatgatttctggctattatgttgcaaggttctttactaagaaaagcttgtcatcatactttacctttgtggcacttgcaagcttgatggtcctttggtttgtggtgcacaattattgggatctgaatatttggattgctggcatgccattgaagtccttcacaaagtatgttgttgcagctgtcatcatggcaatggctgttcctggtttggcacttcttccaacaaaacttcggtttcttctggaacttggtcttattggtcatacattgttgctatgctacattgagaaccgattgtttaactatgcctccatgtattattatggatttgaagaggatatcatctatcctaattatatggtttttattacaacctttttgggcttggctcttgtaaggagattatatgttgatcagagactagggcccaaagctgcttggatcttaacttgtctatattcatcaaagttagcaatgctgtttatgacatcaagatcagttatatggttctcagctgttttgctacttgctgttaccccacctttacttctttacagagacaagtccaaaggagcttctaagatgaaggtctggcaagcttattttcatgcatctgtcatagcattttctgcctggctctgccgggaaacaatttttgaagctttacagtggtggaatggaagacctccttcagatggagttgcatgcattccaatagtcgctctccatttccctcatgctcagtcagcgaagagattcctggtccttattgtggcaacaggccttctcttcgttgttatgcagcctcctattaagctatcatgggtataccggtcggattttatcacagcggcacatttatctgatgatgacatttcaatatatgggtttgtagcatctaagccctcatggccgtcatggctgctcattgcaactgtggtacttacactagcagcagttacatccatcatcccagtgaagtatgtcgttgagttaaggacttcatatgcagtggctgtggggattacactaggcatctacatctctgttcagtacttcttccaggcagttgttctgtatcctcttcttgttgcaacaattgtctctgcagcagtctttgtcgtattcacacatcttccttctgaatcaagcacaagggttttgccatgggtgttctctttcttggtagctttgttcccagtcacctatctgctcgaaggacacttaagagccaaaagttttgcagatgaggatgaagcagagaagttcaccaacatgttggctatagaaggggctagaatgtcacttttgggtctctatgctgccatcttcatgattattgcattagaaatcaagtttgagctgactttgctattgcgtgaaaaggctgcagacagaggtatgcatggtccatctagtcggagtgctgccttcccacccaaagcaaggctgctccagcaacgaagagctcatgctgcaccaacattcaccatcaagcggttggcagcagaggcagcatggatgcctgctataggcaatgtttctactgtgctgtgttttggcatctgcctggttctaaatctaacactcactggtggctcgaaccgtgctattttcttcctggcgccaatccttctgcttctgaaccaggattcagatatcttcgcagggtttggtgataggcagcgctatttcccagtaacagtttctatttctggctatttattgttgacagcgttgtataggatatgggaggagacttggcctggcaatggaggatgggctcttgatatcgggggcccgggctggctgtttgctgtgaagaactttgctcttcttgtgctcactttgccgaatcacatactcttcaaccgcttcatgtgggattatgtcagacagacagatgccaagctactgctgacgctacctctcaacttgccttcgattataatgacagacatacttactattcgggtgttaggattgctaggagctatgtactctcttgcccagtacatgatatcaaggcgcataagaattgctgggatgagatacatttgaaataggtcatgtaactttctgaggctgtcactatacatcaagttctttcaaaactcaggaacagatacttcattgcctgatcctctcgcagcaaaattgtgctatgtagcagagagaaacaagtgtcgaacgactttgctttttttgtactgaatgattgcatactgagtgtaggctaaaggtgttgtcgcatatatagatgtattttaacagcacagatgatgccatcaccttgggtcgtttatgttgaacttttgacggcgcaaagttttgcattcacctgagcagaagactttgatgtaactgttgatttcgttttttttttttacttacatatatcatgaa

SEQ ID NO: 23206 - DNA, 2480 bp, Zea Mays
atcacgtagagttgtggaatagcagacttttgttcagcagagagatgttcctttacatgttcctgccactgccgatgatttctggctattatgttgcaaggttctttactaagaaaagcttgtcatcatactttacctttgtggcacttgcaagcttgatggtcctttggtttgtggtgcacaattattgggatctgaatatttggattgctggcatgccattgaagtccttcacaaagtatgttgttgcagctgtcatcatggcaatggctgttcctggtttggcacttcttccaacaaaacttcggtttcttctggaacttggtcttattggtcatacattgttgctatgctacattgagaaccgattgtttaactatgcctccatgtattattatggatttgaagaggatatcatctatcctaattatatggtttttattacaacctttttgggcttggctcttgtaaggagattatatgttgatcagagactagggcccaaagctgcttggatcttaacttgtctatattcatcaaagttagcaatgctgtttatgacatcaagatcagttatatggttctcagctgttttgctacttgctgttaccccacctttacttctttacagagacaagtccaaaggagcttctaagatgaaggtctggcaagcttattttcatgcatctgtcatagcattttctgcctggctctgccgggaaacaatttttgaagctttacagtggtggaatggaagacctccttcagatggagttgcatgcattccaatagtcgctctccatttccctcatgctcagtcagcgaagagattcctggtccttattgtggcaacaggccttctcttcgttgttatgcagcctcctattaagctatcatgggtataccggtcggattttatcacagcggcacatttatctgatgatgacatttcaatatatgggtttgtagcatctaagccctcatggccgtcatggctgctcattgcaactgtggtacttacactagcagcagttacatccatcatcccagtgaagtatgtcgttgagttaaggacttcatatgcagtggctgtggggattacactaggcatctacatctctgttcagtacttcttccaggcagttgttctgtatcctcttcttgttgcaacaattgtctctgcagcagtctttgtcgtattcacacatcttccttctgaatcaagcacaagggttttgccatgggtgttctctttcttggtagctttgttcccagtcacctatctgctcgaaggacacttaagagccaaaagttttgcagatgaggatgaagcagagaagttcaccaacatgttggctatagaaggggctagaatgtcacttttgggtctctatgctgccatcttcatgattattgcattagaaatcaagtttgagctgactttgctattgcgtgaaaaggctgcagacagaggtatgcatggtccatctagtcggagtgctgccttcccacccaaagcaaggctgctccagcaacgaagagctcatgctgcaccaacattcaccatcaagcggttggcagcagaggcagcatggatgcctgctataggcaatgtttctactgtgctgtgttttggcatctgcctggttctaaatctaacactcactggtggctcgaaccgtgctattttcttcctggcgccaatccttctgcttctgaaccaggattcagatatcttcgcagggtttggtgataggcagcgctatttcccagtaacagtttctatttctggctatttattgttgacagcgttgtataggatatgggaggagacttggcctggcaatggaggatgggctcttgatatcgggggcccgggctggctgtttgctgtgaagaactttgctcttcttgtgctcactttgccgaatcacatactcttcaaccgcttcatgtgggattatgtcagacagacagatgccaagctactgctgacgctacctctcaacttgccttcgattataatgacagacatacttactattcgggtgttaggattgctaggagctatgtactctcttgcccagtacatgatatcaaggcgcataagaattgctgggatgagatacatttgaaataggtcatgtaactttctgaggctgtcactatacatcaagttctttcaaaactcaggaacagatacttcattgcctgatcctctcgcagcaaaattgtgctatgtagcagagagaaacaagtgtcgaacgactttgctttttttgtactgaatgattgcatactgagtgtaggctaaaggtgttgtcgcatatatagatgtattttaacagcacagatgatgccatcaccttgggtcgtttatgttgaacttttgacggcgcaaagttttgcattcacctgagcagaagactttgatgtaactgttgatttcgttttttttttttacttacatatatcatgaa

SEQ ID NO: 23207 - DNA, 984 bp, Zea Mays
cctagcagccacgtccatgacgttctcccgtttcgcccgccgtcggtcagcctgtgtccgtggctctcgcctgccacccaagcagccatggcggccgcgctgctccgccgtgcgctccacctccgccgcgtgctcccctcgcttccgcacagcgcctctcccccgccttctcggccactccgaccccgaagacctcccagcagaacgccgccaccaccacgatcgacctctcctccgacgagagtcgccgccgcctcctcaacaggttggtgtaccggagcaagcagcggggtttcctggagctcgacctggtgctgggcacctgggtcgaacagcacgtgcacgccatggacgagcccaacatccgcgcccttctacaagtgctcgacctcgaaaacccagatttgtggaaatggttgactagtcaggagcagccaccagaggatctgatttctaatccggtgttttctgccatcaaatcaaaggtcacagataacctgatcaagcatgcttctcccgagacccgatcaacacctggccaaccttgggttagaggatgggatgacataaagaaaggcaaagatggacctaactatggaaatcagtgacatgttccttgaaatggggatgacagctttacatcctaaataatccccccccccccccccatgttttgtgttcgtgtagattaaggtgaactgtgaccggcatgtgagaagtttgttaaatcgatattggagaatcagcttgtaactacagatggcactcctgatgtgtccctggcagtttgtctgcaactggaaagatggtatacatagcattgtgttacttatggcaatccttgaagcatttggactgaaacttaaatattgaaaatgtggacgacaaacatcatcagaaagaagtgtatttcttgctgcccttattattaaattttaaatgatagtttgtgtaaagaagcctttggtgcaaactcctgtgtat

SEQ ID NO: 23208 - DNA, 1760 bp, Zea Mays
cttggagcttgtgattagatgcatctattatgggtcaaagcttcatatatggctgcatgcctcctcaatttttggtgtctcttttctgttctatgcaattgtctgctctcttcttagcagagcagcagacacagccaaaattctcatcagatgcgtcacctggtttcagtaaaatgatgatgcatcacttctacggacagaatgtgaaaggtaccagcttctctggtctcttcagggcagtgatattcatccatacatttgttcacacactgaagatcctttttttaaaatgaaacatccgaatttcgcatgaattgaactttgttagtcgttaggagaggactgttgggaggaaaaaatacttacggtttacgccactttacggaaaagtaaatctatcgtactggaaaaagaacatgtaaatacacgatactgaggcttcttaaatttcaagaaaatctaggtagccaggtccactgcccaatcagatcccttctcctgtacaaaaacaggaacatgatttacttttagtttatgcgcgtatgcatctgaagctttgcccttctttagctggccttctgacaactgaagattctggtgagaaataaagagagattttcttcgatgcccttccaggtgtagaataaacaaaccaactgattccctgaccaatctgggtccagaactgtttcgttgatcagcaatatcaattttttttcttctgttggatggccatgtcaccaggaatgaattgaccatgttgtcaagaacttttatatgcaatgttaatcttgtgctatctgtgattaggcggcaaatggactgcctgcttaaggttctgatcgacacaatgatctgaaactgatcacaaacaaagcccgactctgacagaaatatcggcagacaaaaaaaaacggattggtaccatttctgaccttccaatgacctgttctctggggctattttaatgcctgaaatgcgtctcttctggttgatgctgtgtggggttcctgccacgaaaacattttagtagaatagaatgttaagctgaccttttggaacatcttaaaattgcagtcaaggctcagaagtagaatggcacacatggctagtctcttagtcccagctgtcacactttttctagggattgaatatgagcctaatcatcgatacccacaagcacattcagatcccactccatcatgtaaaatataaaattatatatcaatcagaatggggggttaagctacatgctccctgcactgttacatcatctgataacttgagttggttctttatttgggaaatcggttaaatcaaatgtgaggtgacttgtttagtcagtgcggacagctagaagatttagagagatcatgaggtcaggcttgcgccagctgtccacataaacaaacttaaaagatttgtcatgcttccatgggaaagatctgggattgtcagccatgtcgacctcatcaaattggcatcacaaactgtgcctactttcatcaaaattgttcatctttccatgtttttctaataaacttgttgctctgttcaaagacagagttgttagaaggtgccagataacaaagcaactgcgctggttgtggcagtcaaacgcactgtgtgacaaggcgttgatacaactgtacacactcgtgtccttaagagcccttctggtcaccgagattgccagccaattgtctgtccagctgatttgcaattggcattcaggttggcatccaagaggagcatgtttg

SEQ ID NO: 23209 - DNA, 1134 bp, Zea Mays
atctattatgggtcaaagcttcatatatggctgcatgcctcctcaatttttggtgtctcttttctgttctatgcaattgtctgctctcttcttagcagagcagcagacacagccaaaattctcatcagatgcgtcacctggtttcagtaaaatgatgatgcatcacttctacggacagaatgtgaaaggtaccagcttctctggtctcttcagggcagtgatattcatccatacatttgttcacacactgaagatcctttttttaaaatgaaacatccgaatttcgcatgaattgaactttgttagtcgttaggagaggactgttgggaggaaaaaatacttacggtttacgccactttacggaaaagtaaatctatcgtactggaaaaagaacatgtaaatacacgatactgaggcttcttaaatttcaagaaaatctaggtagccaggtccactgcccaatcagatcccttctcctgtacaaaaacaggaacatgatttacttttagtttatgcgcgtatgcatctgaagctttgcccttctttagctggccttctgacaactgaagattctggtgagaaataaagagagattttcttcgatgcccttccaggtgtagaataaacaaaccaactgattccctgaccaatctgggtccagaactgtttcgttgatcagcaatatcaattttttttcttctgttggatggccatgtcaccaggaatgaattgaccatgttgtcaagaacttttatatgcaatgttaatcttgtgctatctgtgattaggcggcaaatggactgcctgcttaaggttctgatcgacacaatgatctgaaactgatcacaaacaaagcccgactctgacagaaatatcggcagacaaaaaaaaacggattggtaccatttctgaccttccaatgacctgttctctggggctattttaatgcctgaaatgcgtctcttctggttgatgctgtgtggggttccataccaacgcagcggccgatcgcagcagggcggccggagagccggggacgacgccgacgaaggatgctcgcggcaggcggcagcggcggggaggcagggccagggacgatgtcggtagcacaccaaaggagcaggtgcagtcagg

SEQ ID NO: 23210 - DNA, 2288 bp, Zea Mays
gttttttgaactgagatgggcaattggggcatgcaccgggaggcgacaggcgagaggataagaacggctgatcctttcgcctgcttcttaaaaaaagaagaagaaaaaaaagctaaggtgtatttgtttcgttctacctacgtacgtgaacttgcctctcaactgacaccctatacgtacggtatatacgtagtatattaccgacgcaacagggcgcggatggagaggttgacctgcgtttatttattttggagcgcacacgacaccccaagctagtctagctcccaaccaaaacaacaacaacaacaactactcgcaggtcgcaacgccgccgcagcagcctatggaggaggaagccggcagaagctggacgacggatgagagaggagacgacgacggcgaccagctgcgcgggacgacgacggcgacgggcagccggagggtggccgccgccgccgccggcgctagcggcgagatcgagatgctacagacggaggccgccgccacggtcgtcgtcgtcggtggcggggcgtcggcgtcggcgtcggtccagcagggaggaggcgacgcggatgacgaatgcggtatccagcagataccaatatggaagagatttctaacacatgctggacctggtttcctggtttccttggcctacatcgaccccagcaatgtgcaaactgatttgcaggctggatcaagtcacaaatttgagttactatgggttctattctttggattctttttcgtattggttatacaatctttggcagcaaaactgggcatcatcacaggaaggaatcttgctcagatgtgtatgtatgaatatccaaagttagtgaaatatggcctttggttgctcattgaggttggcgtgattgctgccactataccaggagttttaggaacagctttggcatacaacatattgctcaacatcccttttttggttggtgttctgatatgtggagcaagcacgttcctgcttctagctttacagatctatggggttaggaaaatagagctcataggagttatttttatgctccttatcgccatttccttctttgttgaactgagtactgtcaatcctcctatgggtgaggtaattcaaggtctatttatcccgagattgcgaggggtttatgctgtgtcagatgcaattgcactatttagcgtcctcgttgtgccgcataatctcttcctgcattcatcactggtggtatcaagaaaaatatcaccttctccaaaaggatttaaggacacttcaacgttcttcttgattgagaacgcatttgctatgcttcttgtgctacttgtaaatgtagcaattgtgtcaactacagggactatatgtgccaataatactcagctggttgacaacaacaatgcatgtagtggtcttacactgaactcagcgtcagtattattgaagaatatgtttggcagatcaacttcaaaaatatacggcttagcattattagcttctggtcagagtaacacaatgactactagctattcaggacaatacattatgcagggtttctccgggatgaggaaatgcatcgtttttatcattgctccctgtttcaccgtcatacctagtttgataatttgcagtgttgctggtgcccctcacgttcgacaactcatcaacgtgtctgcgatcatcttagcttttgtattgccattttccctagttcccctcctaaaattcagcagcagttgcgcggtgaagattgtccaagtcgcgtggattctctccattgtaattatggggatcaatatttatttcttctgcaatagcttcataagttggcttgtgcacagtgaactcccaaggatagtcaatgttataattagcacccttgtcttccctttcatggcggcatatattgcagctttaatctacttggctttcagaaaagttaatgctgctggcatattcccttccgtgtcagcttccactgggactgaagtagaagcatggaggcaagatggcaacattgatgatattggtgtacattgatatgtttgaaacacagtatataaatatactctttcattaaaaaaatattttgttcatacaccacacattagggaagacgtcaaaccattattgaaagatgtatatagttatacatatagttttatggttagatttgttgtccctttaggaatgtagtataagcaatttaagttttttttttatctacggtggtatctaatataaggatttatctgtccttggtggtttcccatattgaaaggatcaagatccataagag

SEQ ID NO: 23211 - DNA, 2100 bp, Zea Mays
atcattgctaagaatgaccaccactaaaggaccgagtcatggtggccctagacgcttggcctaagcccttggattactgccccgtgagctacctctctccagacaagcttggagaaaagacattccatgaacagttactatgggttctattctttggattctttttcgtattggttatacaatctttggcagcaaaactgggcatcatcacaggaaggaatcttgctcagatgtgtatgtatgaatatccaaagttagtgaaatatggcctttggttgctcattgaggttggcgtgattgctgccactataccaggagttttaggaacagctttggcatacaacatattgctcaacatcccttttttggttggtgttctgatatgtggagcaagcacgttcctgcttctagctttacagatctatggggttaggaaaatagagctcataggagttatttttatgctccttatcgccatttccttctttgttgaactgagtactgtcaatcctcctatgggtgaggtaattcaaggtctatttatcccgagattgcgaggggtttatgctgtgtcagatgcaattgcactatttagcgtcctcgttgtgccgtaagtatatgtaattttcaattaggatcttgatgtgaaataatccatcttttccaaaaatatgtcacaataagatttaaaatttgtcccacaatcttgtcattgtaggttatggatgactaatttggctatcaatattcattccaacccttttgcatgtgtctaatctgacgatcactgtctctcataccgagtagctcatatgcatacacgaaatggggaagattaaacctttcttatttcttagtgctagaaacaatatactatcactacaatagctaaggcacctagataaattacctttagtgctaacctatcttaatattgttgtactgatgtattttgggatgaggggatatcaaatatgcatctctcactactttttatcattaggcataatctcttcctgcattcatcactggtggtatcaagaaaaatatcaccttctccaaaaggatttaaggacacttcaacgttcttcttgattgagaacgcatttgctatgcttcttgtgctacttgtaaatgtagcaattgtgtcaactacagggactatatgtgccaataatactcagctggttgacaacaacaatgcatgtagtggtcttacactgaactcagcgtcagtattattgaagaatatgtttggcagatcaacttcaaaaatatacggcttagcattattagcttctggtcagagtaacacaatgactactagctattcaggacaatacattatgcagggtttctccgggatgaggaaatgcatcgtttttatcattgctccctgtttcaccgtcatacctagtttgataatttgcagtgttgctggtgcccctcacgttcgacaactcatcaacgtgtctgcgatcatcttagcttttgtattgccattttccctagttcccctcctaaaattcagcagcagttgcgcggtgaagattgtccaagtcgcgtggattctctccattgtaattatggggatcaatatttatttcttctgcaatagcttcataagttggcttgtgcacagtgaactcccaaggatagtcaatgttataattagcacccttgtcttccctttcatggcggcatatattgcagctttaatctacttggctttcagaaaagttaatgctgctggcatattcccttccgtgtcagcttccactgggactgaagtagaagcatggaggcaagatggcaacattgatgatattggtgtacattgatatgtttgaaacacagtatataaatatactctttcattaaaaaaatattttgttcatacaccacacattagggaagacgtcaaaccattattgaaagatgtatatagttatacatatagttttatggttagatttgttgtccctttaggaatgtagtataagcaatttaagttttttttttatctacggtggtatctaatataaggatttatctgtccttggtggtttcccatattgaaaggatcaagatccataagag

SEQ ID NO: 23212 - DNA, 1731 bp, Zea Mays
atcattgctaagaatgaccaccactaaaggaccgagtcatggtggccctagacgcttggcctaagcccttggattactgccccgtgagctacctctctccagacaagcttggagaaaagacattccatgaacagttactatgggttctattctttggattctttttcgtattggttatacaatctttggcagcaaaactgggcatcatcacaggaaggaatcttgctcagatgtgtatgtatgaatatccaaagttagtgaaatatggcctttggttgctcattgaggttggcgtgattgctgccactataccaggagttttaggaacagctttggcatacaacatattgctcaacatcccttttttggttggtgttctgatatgtggagcaagcacgttcctgcttctagctttacagatctatggggttaggaaaatagagctcataggagttatttttatgctccttatcgccatttccttctttgttgaactgagtactgtcaatcctcctatgggtgaggtaattcaaggtctatttatcccgagattgcgaggggtttatgctgtgtcagatgcaattgcactatttagcgtcctcgttgtgccgcataatctcttcctgcattcatcactggtggtatcaagaaaaatatcaccttctccaaaaggatttaaggacacttcaacgttcttcttgattgagaacgcatttgctatgcttcttgtgctacttgtaaatgtagcaattgtgtcaactacagggactatatgtgccaataatactcagctggttgacaacaacaatgcatgtagtggtcttacactgaactcagcgtcagtattattgaagaatatgtttggcagatcaacttcaaaaatatacggcttagcattattagcttctggtcagagtaacacaatgactactagctattcaggacaatacattatgcagggtttctccgggatgaggaaatgcatcgtttttatcattgctccctgtttcaccgtcatacctagtttgataatttgcagtgttgctggtgcccctcacgttcgacaactcatcaacgtgtctgcgatcatcttagcttttgtattgccattttccctagttcccctcctaaaattcagcagcagttgcgcggtgaaggtaccatacaagaactcagcttgtattgtccaagtcgcgtggattctctccattgtaattatggggatcaatatttatttcttctgcaatagcttcataagttggcttgtgcacagtgaactcccaaggatagtcaatgttataattagcacccttgtcttccctttcatggcggcatatattgcagctttaatctacttggctttcagaaaagttaatgctgctggcatattcccttccgtgtcagcttccactgggactgaagtagaagcatggaggcaagatggcaacattgatgatattggtgtacattgatatgtttgaaacacagtatataaatatactctttcattaaaaaaatattttgttcatacaccacacattagggaagacgtcaaaccattattgaaagatgtatatagttatacatatagttttatggttagatttgttgtccctttaggaatgtagtataagcaatttaagttttttttttatctacggtggtatctaatataaggatttatctgtccttggtggtttcccatattgaaaggatcaagatccataagag

SEQ ID NO: 23213 - DNA, 192 bp, Zea Mays
atgaactcaacagtaccattacaaaagcaatcagcaatgaagtcacaacatgagacatacctgaaggataagccacatatgtcaaatcacttgcagcacactgaatatgggatcatcagtctgatggagaagctggaaatatacagtacaaaagtagcagaaacagagaagtacttaaaaatgagaatataa

SEQ ID NO: 23214 - DNA, 3260 bp, Zea Mays
cctcttcaagttccaactccagatgccccgggcatccccgtagcctcgcggcctcggcgtccccgtccctccatggccgccccaccgccttacaccccgccggcggcggttccccagcccctcgtcctcctccaccacccgccagctttggtcctccacgtccgcctccgaccccgcagcctccgcctcgcgagagcgcccgccgccacggccaccgcagccgcggcctccgtcgcccccgacgacatctcgcagctcaactaccgcctccgcgccatagttcgccgccgcgaaggcgccgctgcccaaggcgccacctcgtcctcccccgtcgacccggcccaggccgaggcgtacctccgcatgatccgcgaccagcagcggctcggcctgcgccagctccgccgggaggaacaggaaggagagggcgacggagacgaggaaggccccgacggggagcgagccaggaagggagtggcggcggggagctcgctggggcatcgggtggacccgcgggagctggagcccggcgagtatgtcgtgcacaagaaggtcggcgtcgggaaattcgcctgcatcagcgccgaggacggcgccgactacgtcttcattcagtacgctgacggcatggccaagcttgctgttgaccaggccgcgcgcatgctctacagatacaacctgcctcacgagaagaggaggccacggaatttgagcaaactgaacgatccttccacctgggagaagcggaggctgaaagggaagcttgctgttcagaagatggttgtcaacctgatggaactgtatttgcaaaggatgaggctgggaagatctccgtacccaaagcctgcatccatggatgactttgctgctgaatttccttatgagcctactccggaccaatgccaggcctttatagatgttgagaaagatctgacagaaagggaaacaccaatggatagattaatttgtggagatgtgggctttggcaaaacagaagtcgcaatgcgtgctatattcattgttgtgtctgcaggatttcaagctatggttcttgctccaacaataatacttgctaagcaacattatgatgtaatgactgagcgctttgccaactatccagagatgaaggtcgcaatatttagtggtgctcagagcaaagaggagaaagatgagctaataacaatgattaagaatggagatttacacattattgttggcactcatgcccttcttacggaaaggatggtctatagcaatcttggtctcctagtggtggatgaagaacaaaagtttggtgtccaacaaaaggagaagattgcctcatacaagtcttctattgatgttcttacactttctgcaacacccattccacgtaccctgtatctggctttgacgggtttccgtgatgcaagtttgatgtctacaccacctcctgaaagagttgctgtaaagacatatgtgtcagcatttagtaaagaaagggccctatcagctatcaagtttgagctgcaacgtggtggtcaagtcttttatgttgtgcctcgaataaaagcaatagacgatgtgttgcagtttctcaaggactctctgcctgatgtaccaattgctgttgctcatggaaagaaattgtcaaagaacatacaacttgctatggaagattttactagcgggaaagtcaaaattcttgtctgcacacatatcattgaaagtggaatagatattgcacatgccaatacaatgattatccagtttgctgaactatatggacttgcccagctgtatcagttacgaggaagagtaggaagatcaggtacagaaggcttcgcataccttttctacactgataagtctttgctctcaagagttgcaacggatagactcggagctattgaggagcattcagagcttggccaaggtttccatgttgcagagaaggatatgggtatcaggggatttggaagcttgtttggtgagcaacagtctggagatgttgcaaatgttggcatcgatttattctttgatatgctttttgatagcttgtcaaaggttgaccagttttgcctagtcccagtaccatacaaagatgttcagttatctggaaaatcctgttgagttgctcaatgaagcggcaaaagctgcagagaaagatctatggaccttgatacagtttacagaagacctccgtcgacgatacggaaaggagccccgtgatatggagttactactgaaaaagctctatgtaaggcggatggctgcagatcttggtatcagtcggatatatccatctggcaagatgatattcatgaaaacaaacatgaacaagaaggtatttaggctcatgacagaagcaatgacttctgagacacatcggaattccctatcatttgctgaaaaggaaattaaggctgaactcctcgtgaatttgccagataccctacttctgaactggcttttccattgcttatcggactgctatactgtaataccagcccttgtgaagtactagattattgttactatttcataagaactgaaggcttctgctgcccaccatgaaaggggacaatatgtccatgcttgaagagaatgatctatcagagaaatcagtcttggctctttgattcatctgtgatggatgactcttcgttatgttggtattggcagtcaggctctggcaggccaaagcaagcccatacacactactgctttaggaaaaggtccgccaaaattgtcaacattacaagcatacttcaatgctatacacgaactggagaatgctccacagacacattgcagttttctacattcgctaacatcaataggatgagtgtctgatgcataattgctaaattcaggtgcaatgcaagtatgaaacatgaaatcaggaagctcagaggacctagttcagatgtacctgacaatagattacatttcaaaattcttctaggtttttttgacatgaactatcaaaatattgctcgagtagatagggaactagggatggcgttaacaatagaccatttgtttgacaataaaacattaggaatttttgaccaattggtcagagttaatatttgttgtaaatctattcaaacagattgtgacattgacaataactataatagttgaaaaaaatcacggaactacaagtatttttatatagggagaatgtatccaatgcactggacccatccgtacacgtatccaaagggcatgtacaatttaattaattaaatgaagggtctctcgaaatgtatata

SEQ ID NO: 23215 - DNA, 3303 bp, Zea Mays
ccagatgccccgggcatccccgtagcctcgcggcctcggcgtccccgtccctccatggccgccccaccgccttacaccccgccggcggcggttccccagcccctcgtcctcctccaccacccgccagctttggtcctccacgtccgcctccgaccccgcagcctccgcctcgcgagagcgcccgccgccacggccaccgcagccgcggcctccgtcgcccccgacgacatctcgcagctcaactaccgcctccgcgccatagttcgccgccgcgaaggcgccgctgcccaaggcgccacctcgtcctcccccgtcgacccggcccaggccgaggcgtacctccgcatgatccgcgaccagcagcggctcggcctgcgccagctccgccgggaggaacaggaaggagagggcgacggagacgaggaaggccccgacggggagcgagccaggaagggagtggcggcggggagctcgctggggcatcgggtggacccgcgggagctggagcccggcgagtatgtcgtgcacaagaaggtcggcgtcgggaaattcgcctgcatcagcgccgaggacggcgccgactacgtcttcattcagtacgctgacggcatggccaagcttgctgttgaccaggccgcgcgcatgctctacagatacaacctactgatctcttttgtaggcctcacgagaagaggaggccacggaatttgagcaaactgaacgatccttccacctgggagaagcggaggctgaaagggaagcttgctgttcagaagatggttgtcaacctgatggaactgtatttgcaaaggatgaggctgggaagatctccgtacccaaagcctgcatccatggatgactttgctgctgaatttccttatgagcctactccggaccaatgccaggcctttatagatgttgagaaagatctgacagaaagggaaacaccaatggatagattaatttgtggagatgtgggctttggcaaaacagaagtcgcaatgcgtgctatattcattgttgtgtctgcaggatttcaagctatggttcttgctccaacaataatacttgctaagcaacattatgatgtaatgactgagcgctttgccaactatccagagatgaaggtcgcaatatttagtggtgctcagagcaaagaggagaaagatgagctaataacaatgattaagaatggagatttacacattattgttggcactcatgcccttcttacggaaaggatggtctatagcaatcttggtctcctagtggtggatgaagaacaaaagtttggtgtccaacaaaaggagaagattgcctcatacaagtcttctattgatgttcttacactttctgcaacacccattccacgtaccctgtatctggctttgacgggtttccgtgatgcaagtttgatgtctacaccacctcctgaaagagttgctgtaaagacatatgtgtcagcatttagtaaagaaagggccctatcagctatcaagtttgagctgcaacgtggtggtcaagtcttttatgttgtgcctcgaataaaagcaatagacgatgtgttgcagtttctcaaggactctctgcctgatgtaccaattgctgttgctcatggaaagaaattgtcaaagaacatacaacttgctatggaagattttactagcgggaaagtcaaaattcttgtctgcacacatatcattgaaagtggaatagatattgcacatgccaatacaatgattatccagtttgctgaactatatggacttgcccagctgtatcagttacgaggaagagtaggaagatcaggtacagaaggcttcgcataccttttctacactgataagtctttgctctcaagagttgcaacggatagactcggagctattgaggagcattcagagcttggccaaggtttccatgttgcagagaaggatatgggtatcaggggatttggaagcttgtttggtgagcaacagtctggagatgttgcaaatgttggcatcgatttattctttgatatgctttttgatagcttgtcaaaggttgaccagttttgcctagtcccagtaccatacaaagatgttcagctggatataaacatttctccacgtctctcttctgaatacataagttatctggaaaatcctgttgagttgctcaatgaagcggcaaaagctgcagagaaagatctatggaccttgatacagtttacagaagacctccgtcgacgatacggaaaggagccccgtgatatggagttactactgaaaaagctctatgtaaggcggatggctgcagatcttggtatcagtcggatatatccatctggcaagatgatattcatgaaaacaaacatgaacaagaaggtatttaggctcatgacagaagcaatgacttctgagacacatcggaattccctatcatttgctgaaaaggaaattaaggctgaactcctcgtgaatttgccagataccctacttctgaactggcttttccattgcttatcggactgctatactgtaataccagcccttgtgaagtactagattattgttactatttcataagaactgaaggcttctgctgcccaccatgaaaggggacaatatgtccatgcttgaagagaatgatctatcagagaaatcagtcttggctctttgattcatctgtgatggatgactcttcgttatgttggtattggcagtcaggctctggcaggccaaagcaagcccatacacactactgctttaggaaaaggtccgccaaaattgtcaacattacaagcatacttcaatgctatacacgaactggagaatgctccacagacacattgcagttttctacattcgctaacatcaataggatgagtgtctgatgcataattgctaaattcaggtgcaatgcaagtatgaaacatgaaatcaggaagctcagaggacctagttcagatgtacctgacaatagattacatttcaaaattcttctaggtttttttgacatgaactatcaaaatattgctcgagtagatagggaactagggatggcgttaacaatagaccatttgtttgacaataaaacattaggaatttttgaccaattggtcagagttaatatttgttgtaaatctattcaaacagattgtgacattgacaataactataatagttgaaaaaaatcacggaactacaagtatttttatatagggagaatgtatccaatgcactggacccatccgtacacgtatccaaagggcatgtacaatttaattaattaaatgaagggtctctcgaaatgtatata

SEQ ID NO: 23216 - DNA, 3475 bp, Zea Mays
ccagatgccccgggcatccccgtagcctcgcggcctcggcgtccccgtccctccatggccgccccaccgccttacaccccgccggcggcggttccccagcccctcgtcctcctccaccacccgccagctttggtcctccacgtccgcctccgaccccgcagcctccgcctcgcgagagcgcccgccgccacggccaccgcagccgcggcctccgtcgcccccgacgacatctcgcagctcaactaccgcctccgcgccatagttcgccgccgcgaaggcgccgctgcccaaggcgccacctcgtcctcccccgtcgacccggcccaggccgaggcgtacctccgcatgatccgcgaccagcagcggctcggcctgcgccagctccgccgggaggaacaggaaggagagggcgacggagacgaggaaggccccgacggggagcgagccaggaagggagtggcggcggggagctcgctggggcatcgggtggacccgcgggagctggagcccggcgagtatgtcgtgcacaagaaggtcggcgtcgggaaattcgcctgcatcagcgccgaggacggcgccgactacgtcttcattcagtacgctgacggcatggccaagcttgctgttgaccaggccgcgcgcatgctctacagatacaacctgcctcacgagaagaggaggccacggaatttgagcaaactgaacgatccttccacctgggagaagcggaggctgaaagggaagcttgctgttcagaagatggttgtcaacctgatggaactgtatttgcaaaggatgaggctgggaagatctccgtacccaaagcctgcatccatggatgactttgctgctgaatttccttatgagcctactccggaccaatgccaggcctttatagatgttgagaaagatctgacagaaagggaaacaccaatggatagattaatttgtggagatgtgggctttggcaaaacagaagtcgcaatgcgtgctatattcattgttgtgtctgcaggatttcaagctatggttcttgctccaacaataatacttgctaagcaacattatgatgtaatgactgagcgctttgccaactatccagagatgaaggtcgcaatatttagtggtgctcagagcaaagaggagaaagatgagctaataacaatgattaagaatggagatttacacattattgttggcactcatgcccttcttacggaaaggatggtctatagcaatcttggtctcctagtggtggatgaagaacaaaagtttggtgtccaacaaaaggagaagattgcctcatacaagtcttctattgatgttcttacactttctgcaacacccattccacgtaccctgtatctggctttgacgggtttccgtgatgcaagtttgatgtctacaccacctcctgaaagagttgctgtaaagacatatgtgtcagcatttagtaaagaaagggccctatcagctatcaagtttgagctgcaacgtggtggtcaagtcttttatgttgtgcctcgaataaaagcaatagacgatgtgttgcagtttctcaaggactctctgcctgatgtaccaattgctgttgctcatggaaagaaattgtcaaagaacatacaacttgctatggaagattttactagcgggaaagtcaaaattcttgtctgcacacatatcattgaaagtggaatagatattgcacatgccaatacaatgattatccagtttgctgaactatatggacttgcccagctgtatcagttacgaggaagagtaggaagatcaggtacagaaggcttcgcataccttttctacactgataagtctttgctctcaagagttgcaacgactcggagctattgaggagcattcagagcttggccaaggtttccatgttgcagagaaggatatgggtatcaggggatttggaagcttgtttggtgagcaacagtctggagatgttgcaaatgttggcatcgatttattctttgatatgctttttgatagcttgtcaaaggttgaccagttttgcctagtcccagtaccatacaaagatgttcaggtgaacctgaaaattcttctcaatttgacttgcaagctttctgatgcgagcactaaatagtgatattttgcaattttgtatgagcattgtttgagtgaatcttttcttggggcagctggatataaacatttctccacgtctctcttctgaatacataagttatctggaaaatcctgttgagttgctcaatgaagcggcaaaagctgcagagaaagatctatggaccttgatacagtttacagaagacctccgtcgacgatacggaaaggagccccgtgatatggaggtgcttgtttatgctataatcaggactcatgaatcatgattagtggtttactctgttgtgttatttctttctcttgcagttactactgaaaaagctctatgtaaggcggatggctgcagatcttggtatcagtcggatatatccatctggcaagatgatattcatgaaaacaaacatgaacaagaaggtatttaggctcatgacagaagcaatgacttctgagacacatcggaattccctatcatttgctgaaaaggaaattaaggctgaactcctcgtgaatttgccagataccctacttctgaactggcttttccattgcttatcggactgctatactgtaataccagcccttgtgaagtactagattattgttactatttcataagaactgaaggcttctgctgcccaccatgaaaggggacaatatgtccatgcttgaagagaatgatctatcagagaaatcagtcttggctctttgattcatctgtgatggatgactcttcgttatgttggtattggcagtcaggctctggcaggccaaagcaagcccatacacactactgctttaggaaaaggtccgccaaaattgtcaacattacaagcatacttcaatgctatacacgaactggagaatgctccacagacacattgcagttttctacattcgctaacatcaataggatgagtgtctgatgcataattgctaaattcaggtgcaatgcaagtatgaaacatgaaatcaggaagctcagaggacctagttcagatgtacctgacaatagattacatttcaaaattcttctaggtttttttgacatgaactatcaaaatattgctcgagtagatagggaactagggatggcgttaacaatagaccatttgtttgacaataaaacattaggaatttttgaccaattggtcagagttaatatttgttgtaaatctattcaaacagattgtgacattgacaataactataatagttgaaaaaaatcacggaactacaagtatttttatatagggagaatgtatccaatgcactggacccatccgtacacgtatccaaagggcatgtacaatttaattaattaaatgaagggtctctcgaaatgtatata

SEQ ID NO: 23217 - DNA, 3266 bp, Zea Mays
ccagatgccccgggcatccccgtagcctcgcggcctcggcgtccccgtccctccatggccgccccaccgccttacaccccgccggcggcggttccccagcccctcgtcctcctccaccacccgccagctttggtcctccacgtccgcctccgaccccgcagcctccgcctcgcgagagcgcccgccgccacggccaccgcagccgcggcctccgtcgcccccgacgacatctcgcagctcaactaccgcctccgcgccatagttcgccgccgcgaaggcgccgctgcccaaggcgccacctcgtcctcccccgtcgacccggcccaggccgaggcgtacctccgcatgatccgcgaccagcagcggctcggcctgcgccagctccgccgggaggaacaggaaggagagggcgacggagacgaggaaggccccgacggggagcgagccaggaagggagtggcggcggggagctcgctggggcatcgggtggacccgcgggagctggagcccggcgagtatgtcgtgcacaagaaggtcggcgtcgggaaattcgcctgcatcagcgccgaggacggcgccgactacgtcttcattcagtacgctgacggcatggccaagcttgctgttgaccaggccgcgcgcatgctctacagatacaacctgcctcacgagaagaggaggccacggaatttgagcaaactgaacgatccttccacctgggagaagcggaggctgaaagggaagcttgctgttcagaagatggttgtcaacctgatggaactgtatttgcaaaggatgaggctgggaagatctccgtacccaaagcctgcatccatggatgactttgctgctgaatttccttatgagcctactccggaccaatgccaggcctttatagatgttgagaaagatctgacagaaagggaaacaccaatggatagattaatttgtggagatgtgggctttggcaaaacagaagtcgcaatgcgtgctatattcattgttgtgtctgcaggatttcaagctatggttcttgctccaacaataatacttgctaagcaacattatgatgtaatgactgagcgctttgccaactatccagagatgaaggtcgcaatatttagtggtgctcagagcaaagaggagaaagatgagctaataacaatgattaagaatggagatttacacattattgttggcactcatgcccttcttacggaaaggatggtctatagcaatcttggtctcctagtggtggatgaagaacaaaagtttggtgtccaacaaaaggagaagattgcctcatacaagtcttctattgatgttcttacactttctgcaacacccattccacgtaccctgtatctggctttgacgggtttccgtgatgcaagtttgatgtctacaccacctcctgaaagagttgctgtaaagacatatgtgtcagcatttagtaaagaaagggccctatcagctatcaagtttgagctgcaacgtggtggtcaagtcttttatgttgtgcctcgaataaaagtttctcaaggactctctgcctgatgtaccaattgctgttgctcatggaaagaaattgtcaaagaacatacaacttgctatggaagattttactagcgggaaagtcaaaattcttgtctgcacacatatcattgaaagtggaatagatattgcacatgccaatacaatgattatccagtttgctgaactatatggacttgcccagctgtatcagttacgaggaagagtaggaagatcaggtacagaaggcttcgcataccttttctacactgataagtctttgctctcaagagttgcaacggatagactcggagctattgaggagcattcagagcttggccaaggtttccatgttgcagagaaggatatgggtatcaggggatttggaagcttgtttggtgagcaacagtctggagatgttgcaaatgttggcatcgatttattctttgatatgctttttgatagcttgtcaaaggttgaccagttttgcctagtcccagtaccatacaaagatgttcagctggatataaacatttctccacgtctctcttctgaatacataagttatctggaaaatcctgttgagttgctcaatgaagcggcaaaagctgcagagaaagatctatggaccttgatacagtttacagaagacctccgtcgacgatacggaaaggagccccgtgatatggagttactactgaaaaagctctatgtaaggcggatggctgcagatcttggtatcagtcggatatatccatctggcaagatgatattcatgaaaacaaacatgaacaagaaggtatttaggctcatgacagaagcaatgacttctgagacacatcggaattccctatcatttgctgaaaaggaaattaaggctgaactcctcgtgaatttgccagataccctacttctgaactggcttttccattgcttatcggactgctatactgtaataccagcccttgtgaagtactagattattgttactatttcataagaactgaaggcttctgctgcccaccatgaaaggggacaatatgtccatgcttgaagagaatgatctatcagagaaatcagtcttggctctttgattcatctgtgatggatgactcttcgttatgttggtattggcagtcaggctctggcaggccaaagcaagcccatacacactactgctttaggaaaaggtccgccaaaattgtcaacattacaagcatacttcaatgctatacacgaactggagaatgctccacagacacattgcagttttctacattcgctaacatcaataggatgagtgtctgatgcataattgctaaattcaggtgcaatgcaagtatgaaacatgaaatcaggaagctcagaggacctagttcagatgtacctgacaatagattacatttcaaaattcttctaggtttttttgacatgaactatcaaaatattgctcgagtagatagggaactagggatggcgttaacaatagaccatttgtttgacaataaaacattaggaatttttgaccaattggtcagagttaatatttgttgtaaatctattcaaacagattgtgacattgacaataactataatagttgaaaaaaatcacggaactacaagtatttttatatagggagaatgtatccaatgcactggacccatccgtacacgtatccaaagggcatgtacaatttaattaattaaatgaagggtctctcgaaatgtatata

SEQ ID NO: 23218 - DNA, 3274 bp, Zea Mays
ccagatgccccgggcatccccgtagcctcgcggcctcggcgtccccgtccctccatggccgccccaccgccttacaccccgccggcggcggttccccagcccctcgtcctcctccaccacccgccagctttggtcctccacgtccgcctccgaccccgcagcctccgcctcgcgagagcgcccgccgccacggccaccgcagccgcggcctccgtcgcccccgacgacatctcgcagctcaactaccgcctccgcgccatagttcgccgccgcgaaggcgccgctgcccaaggcgccacctcgtcctcccccgtcgacccggcccaggccgaggcgtacctccgcatgatccgcgaccagcagcggctcggcctgcgccagctccgccgggaggaacaggaaggagagggcgacggagacgaggaaggccccgacggggagcgagccaggaagggagtggcggcggggagctcgctggggcatcgggtggacccgcgggagctggagcccggcgagtatgtcgtgcacaagaaggtcggcgtcgggaaattcgcctgcatcagcgccgaggacggcgccgactacgtcttcattcagtacgctgacggcatggccaagcttgctgttgaccaggccgcgcgcatgctctacagatacaacctgcctcacgagaagaggaggccacggaatttgagcaaactgaacgatccttccacctgggagaagcggaggctgaaagggaagcttgctgttcagaagatggttgtcaacctgatggaactgtatttgcaaaggatgaggctgggaagatctccgtacccaaagcctgcatccatggatgactttgctgctgaatttccttatgagcctactccggaccaatgccaggatttcaagctatggttcttgctccaacaataatacttgctaagcaacattatgatgtaatgactgagcgctttgccaactatccagagatgaaggtcgcaatatttagtggtgctcagagcaaagaggagaaagatgagctaataacaatgattaagaatggagatttacacattattgttggcactcatgcccttcttacggaaaggatggtctatagcaatcttggtctcctagtggtggatgaagaacaaaagtttggtgtccaacaaaaggagaagattgcctcatacaagtcttctattgatgttcttacactttctgcaacacccattccacgtaccctgtatctggctttgacgggtttccgtgatgcaagtttgatgtctacaccacctcctgaaagagttgctgtaaagacatatgtgtcagcatttagtaaagaaagggccctatcagctatcaagtttgagctgcaacgtggtggtcaagtcttttatgttgtgcctcgaataaaagcaatagacgatgtgttgcagtttctcaaggactctctgcctgatgtaccaattgctgttgctcatggaaagaaattgtcaaagaacatacaacttgctatggaagattttactagcgggaaagtcaaaattcttgtctgcacacatatcattgaaagtggaatagatattgcacatgccaatacaatgattatccagtttgctgaactatatggacttgcccagctgtatcagttacgaggaagagtaggaagatcaggtacagaaggcttcgcataccttttctacactgataagtctttgctctcaagagttgcaacggatagactcggagctattgaggagcattcagagcttggccaaggtttccatgttgcagagaaggatatgggtatcaggggatttggaagcttgtttggtgagcaacagtctggagatgttgcaaatgttggcatcgatttattctttgatatgctttttgatagcttgtcaaaggttgaccagttttgcctagtcccagtaccatacaaagatgttcaggtgaacctgaaaattcttctcaatttgacttgcaagctttctgatgcgagcactaaatagtgatattttgcaattttgtatgagcattgtttgagtgaatcttttcttggggcagctggatataaacatttctccacgtctctcttctgaatacataagttatctggaaaatcctgttgagttgctcaatgaagcggcaaaagctgcagagaaagatctatggaccttgatacagtttacagaagacctccgtcgacgatacggaaaggagccccgtgatatggagttactactgaaaaagctctatgtaaggcggatggctgcagatcttggtatcagtcggatatatccatctggcaagatgatattcatgaaaacaaacatgaacaagaaggtatttaggctcatgacagaagcaatgacttctgagacacatcggaattccctatcatttgctgaaaaggaaattaaggctgaactcctcgtgaatttgccagataccctacttctgaactggcttttccattgcttatcggactgctatactgtaataccagcccttgtgaagtactagattattgttactatttcataagaactgaaggcttctgctgcccaccatgaaaggggacaatatgtccatgcttgaagagaatgatctatcagagaaatcagtcttggctctttgattcatctgtgatggatgactcttcgttatgttggtattggcagtcaggctctggcaggccaaagcaagcccatacacactactgctttaggaaaaggtccgccaaaattgtcaacattacaagcatacttcaatgctatacacgaactggagaatgctccacagacacattgcagttttctacattcgctaacatcaataggatgagtgtctgatgcataattgctaaattcaggtgcaatgcaagtatgaaacatgaaatcaggaagctcagaggacctagttcagatgtacctgacaatagattacatttcaaaattcttctaggtttttttgacatgaactatcaaaatattgctcgagtagatagggaactagggatggcgttaacaatagaccatttgtttgacaataaaacattaggaatttttgaccaattggtcagagttaatatttgttgtaaatctattcaaacagattgtgacattgacaataactataatagttgaaaaaaatcacggaactacaagtatttttatatagggagaatgtatccaatgcactggacccatccgtacacgtatccaaagggcatgtacaatttaattaattaaatgaagggtctctcgaaatgtatata

SEQ ID NO: 23219 - DNA, 2884 bp, Zea Mays
ccagatgccccgggcatccccgtagcctcgcggcctcggcgtccccgtccctccatggccgccccaccgccttacaccccgccggcggcggttccccagcccctcgtcctcctccaccacccgccagctttggtcctccacgtccgcctccgaccccgcagcctccgcctcgcgagagcgcccgccgccacggccaccgcagccgcggcctccgtcgcccccgacgacatctcgcagctcaactaccgcctccgcgccatagttcgccgccgcgaaggcgccgctgcccaaggcgccacctcgtcctcccccgtcgacccggcccaggccgaggcgtacctccgcatgatccgcgaccagcagcggctcggcctgcgccagctccgccgggaggaacaggaaggagagggcgacggagacgaggaaggccccgacggggagcgagccaggaagggagtggcggcggggagctcgctggggcatcgggtggacccgcgggagctggagcccggcgagtatgtcgtgcacaagaaggtcggcgtcgggaaattcgcctgcatcagcgccgaggacggcgccgactacgtcttcattcagtacgctgacggcatggccaagcttgctgttgaccaggccgcgcgcatgctctacagatacaacctgcctcacgagaagaggaggccacggaatttgagcaaactgaacgatccttccacctgggagaagcggaggctgaaagggaagcttgctgttcagaagatggttgtcaacctgatggaactgtatttgcaaaggatgaggctgggaagatctccgtacccaaagcctgcatccatggatgactttgctgctgaatttccttatgagcctactccggaccaatgccaggcctttatagatgttgagaaagatctgacagaaagggaaacaccaatggatagattaatttgtggagatgtgggctttggcaaaacagaagtcgcaatgcgtgctatattcattgttgtgtctgcaggatttcaagctatggttcttgctccaacaataatacttgctaagcaacattatgatgtaatgactgagcgctttgccaactatccagagatgaaggtcgcaatatttagtggtgctcagagcaaagaggagaaagatgagctaataacaatgattaagaatggagatttacacattattgttggcactcatgcccttcttacggaaaggatggtctatagcaatcttggtctcctagtggtggatgaagaacaaaagtttggtgtccaacaaaaggagaagattgcctcatacaagtcttctattgatgttcttacactttctgcaacacccattccacgtaccctgtatctggctttgacgggtttccgtgatgcaagtttgatgtctacaccacctcctgaaagagttgctgtaaagacatatgtgtcagcatttagtaaagaaagggccctatcagctatcaagtttgagctgcaacgtggtggtcaagtcttttatgttgtgcctcgaataaaagcaatagacgatgtgttgcagtttctcaaggactctctgcctgatgtaccaattgctgttgctcatggaaagaaattgtcaaagaacatacaacttgctatggaagattttactagcgggaaagtcaaaattcttgtctgcacacatatcattgaaagtggaatagatattgcacatgccaatacaatgattatccagtttgctgaactatatggacttgcccagctgtatcagttacgaggaagagtaggaagatcaggtacagaaggcttcgcataccttttctacactgataagtctttgctctcaagagttgcaacggatagactcggagctattgaggagcattcagagcttggccaaggtttccatgttgcagagaaggatatgggtatcaggggatttggaagcttgtttggtgagcaacagtctggagatgttgcaaatgttggcatcgatttattctttgatatgctttttgatagcttgtcaaaggctgaactcctcgtgaatttgccagataccctacttctgaactggcttttccattgcttatcggactgctatactgtaataccagcccttgtgaagtactagattattgttactatttcataagaactgaaggcttctgctgcccaccatgaaaggggacaatatgtccatgcttgaagagaatgatctatcagagaaatcagtcttggctctttgattcatctgtgatggatgactcttcgttatgttggtattggcagtcaggctctggcaggccaaagcaagcccatacacactactgctttaggaaaaggtccgccaaaattgtcaacattacaagcatacttcaatgctatacacgaactggagaatgctccacagacacattgcagttttctacattcgctaacatcaataggatgagtgtctgatgcataattgctaaattcaggtgcaatgcaagtatgaaacatgaaatcaggaagctcagaggacctagttcagatgtacctgacaatagattacatttcaaaattcttctaggtttttttgacatgaactatcaaaatattgctcgagtagatagggaactagggatggcgttaacaatagaccatttgtttgacaataaaacattaggaatttttgaccaattggtcagagttaatatttgttgtaaatctattcaaacagattgtgacattgacaataactataatagttgaaaaaaatcacggaactacaagtatttttatatagggagaatgtatccaatgcactggacccatccgtacacgtatccaaagggcatgtacaatttaattaattaaatgaagggtctctcgaaatgtatata

SEQ ID NO: 23220 - DNA, 2615 bp, Zea Mays
gttagttcttgttgtcagagttgagggtctcatttgctatatcctagaatagtagaattctaatgtgtagagctctttagatgtggatctgtgtgggatctaaaagatatagaatcaactcatctgattgctgtacatctgcccaggattcttctatcccagtcctattaacttgaaaaactgcccggaagatcagaaattcagaattctattgcatgcctttatagatgttgagaaagatctgacagaaagggaaacaccaatggatagattaatttgtggagatgtgggctttggcaaaacagaagtcgcaatgcgtgctatattcattgttgtgtctgcaggatttcaagctatggttcttgctccaacaataatacttgctaagcaacattatgatgtaatgactgagcgctttgccaactatccagagatgaaggtcgcaatatttagtggtgctcagagcaaagaggagaaagatgagctaataacaatgattaagaatggagatttacacattattgttggcactcatgcccttcttacggaaaggatggtctatagcaatcttggtctcctagtggtggatgaagaacaaaagtttggtgtccaacaaaaggagaagattgcctcatacaagtcttctattgatgttcttacactttctgcaacacccattccacgtaccctgtatctggctttgacgggtttccgtgatgcaagtttgatgtctacaccacctcctgaaagagttgctgtaaagacatatgtgtcagcatttagtaaagaaagggccctatcagctatcaagtttgagctgcaacgtggtggtcaagtcttttatgttgtgcctcgaataaaagcaatagacgatgtgttgcagtttctcaaggactctctgcctgatgtaccaattgctgttgctcatggaaagaaattgtcaaagaacatacaacttgctatggaagattttactagcgggaaagtcaaaattcttgtctgcacacatatcattgaaagtggaatagatattgcacatgccaatacaatgattatccagtttgctgaactatatggacttgcccagctgtatcagttacgaggaagagtaggaagatcaggtacagaaggcttcgcataccttttctacactgataagtctttgctctcaagagttgcaacggatagactcggagctattgaggagcattcagagcttggccaaggtttccatgttgcagagaaggatatgggtatcaggggatttggaagcttgtttggtgagcaacagtctggagatgttgcaaatgttggcatcgatttattctttgatatgctttttgatagcttgtcaaaggttgaccagttttgcctagtcccagtaccatacaaagatgttcagctggatataaacatttctccacgtctctcttctgaatacataagttatctggaaaatcctgttgagttgctcaatgaagcggcaaaagctgcagagaaagatctatggaccttgatacagtttacagaagacctccgtcgacgatacggaaaggagccccgtgatatggagttactactgaaaaagctctatgtaaggcggatggctgcagatcttggtatcagtcggatatatccatctggcaagatgatattcatgaaaacaaacatgaacaagaaggtatttaggctcatgacagaagcaatgacttctgagacacatcggaattccctatcatttgctgaaaaggaaattaaggctgaactcctcgtgaatttgccagataccctacttctgaactggcttttccattgcttatcggactgctatactgtaataccagcccttgtgaagtactagattattgttactatttcataagaactgaaggcttctgctgcccaccatgaaaggggacaatatgtccatgcttgaagagaatgatctatcagagaaatcagtcttggctctttgattcatctgtgatggatgactcttcgttatgttggtattggcagtcaggctctggcaggccaaagcaagcccatacacactactgctttaggaaaaggtccgccaaaattgtcaacattacaagcatacttcaatgctatacacgaactggagaatgctccacagacacattgcagttttctacattcgctaacatcaataggatgagtgtctgatgcataattgctaaattcaggtgcaatgcaagtatgaaacatgaaatcaggaagctcagaggacctagttcagatgtacctgacaatagattacatttcaaaattcttctaggtttttttgacatgaactatcaaaatattgctcgagtagatagggaactagggatggcgttaacaatagaccatttgtttgacaataaaacattaggaatttttgaccaattggtcagagttaatatttgttgtaaatctattcaaacagattgtgacattgacaataactataatagttgaaaaaaatcacggaactacaagtatttttatatagggagaatgtatccaatgcactggacccatccgtacacgtatccaaagggcatgtacaatttaattaattaaatgaagggtctctcgaaatgtatata

SEQ ID NO: 23221 - DNA, 1558 bp, Zea Mays
ctcctttcaagccagtctattctttgtttgattcatcacgggtgcgcattattgtaattagaatcttcagagtactcgaaggatagttaaagctgtttggctagtccttcagattactgaaaatatagttaagaacatttgtattttgctatttcgatttccaacagtacaactattggggatgattgctttcctttataaaagcaatcaagtaatttcttagctaagttctagctataagttctgcatgacatgctattgcccatgataattctgacaggattgcttcaactctttcaggttgaccagttttgcctagtcccagtaccatacaaagatgttcagctggatataaacatttctccacgtctctcttctgaatacataagttatctggaaaatcctgttgagttgctcaatgaagcggcaaaagctgcagagaaagatctatggaccttgatacagtttacagaagacctccgtcgacgatacggaaaggagccccgtgatatggagttactactgaaaaagctctatgtaaggcggatggctgcagatcttggtatcagtcggatatatccatctggcaagatgatattcatgaaaacaaacatgaacaagaaggtatttaggctcatgacagaagcaatgacttctgagacacatcggaattccctatcatttgctgaaaaggaaattaaggctgaactcctcgtgaatttgccagataccctacttctgaactggcttttccattgcttatcggactgctatactgtaataccagcccttgtgaagtactagattattgttactatttcataagaactgaaggcttctgctgcccaccatgaaaggggacaatatgtccatgcttgaagagaatgatctatcagagaaatcagtcttggctctttgattcatctgtgatggatgactcttcgttatgttggtattggcagtcaggctctggcaggccaaagcaagcccatacacactactgctttaggaaaaggtccgccaaaattgtcaacattacaagcatacttcaatgctatacacgaactggagaatgctccacagacacattgcagttttctacattcgctaacatcaataggatgagtgtctgatgcataattgctaaattcaggtgcaatgcaagtatgaaacatgaaatcaggaagctcagaggacctagttcagatgtacctgacaatagattacatttcaaaattcttctaggtttttttgacatgaactatcaaaatattgctcgagtagatagggaactagggatggcgttaacaatagaccatttgtttgacaataaaacattaggaatttttgaccaattggtcagagttaatatttgttgtaaatctattcaaacagattgtgacattgacaataactataatagttgaaaaaaatcacggaactacaagtatttttatatagggagaatgtatccaatgcactggacccatccgtacacgtatccaaagggcatgtacaatttaattaattaaatgaagggtctctcgaaatgtatata

SEQ ID NO: 23222 - DNA, 2969 bp, Zea Mays
cgaccgaataccggcggcaaccggtgtccctctccgtcctcctcgcgtgcacggctgaccgcgctctccctcctccgctctgccgcacttctcgccgccctaccctgctaaaaaattcaggcatcgatcgctcgtcctcctcgggacctcggcctgctccaactgaccctaatggcggaggcgctgcttctcgcgtgccacctcgccctctctttctccctcctcgccgcctccctctcccacctcatcgtggccgccgtctcccaccgctcgccctcctccctccaccaccacctcatccgcctgctccgccacccgctcatccgcctcctcccgccgctcctcgcgctccccttcgccttcctcccgctcgcctccacgcccctactgccgcttctcctcctccctccactgctcccgctcctcccgctccccttcctccctccccacctcccgctcctccgcccgctcctcctcaccctgccgctcctcctgctcgcccgcgcggcagacctcctcgccgcctcgttccctgactcggacctccaggcgcacgcgctcgccgtcgcgcgcctcctcctcctcgccgcggcggcggcctctctcgtctcgtcgctctgcgcctccgcgccgaggggcacgacggcggccggcgcccacttcgtcgccgaggcggggctcgcctgcgcgggcgccgtgggcgggctctgggcggcgcagagcgggctcaatctttacgtcgacgcgtgcgtgcccacggggtgccaccgcctcctcgacaccggcagcaccgcagcgcccgccacgcggtgcgacgtcgacgaggctaggctcagggccgtcgctgtcatggatctcgccctgtccgtgcactgcgtcatcgtgactgccatcgtggcgggggtgctcctcggggtggcgaggtggtttggggttgacagcagcgctggtacggggaggaggcataatggatcctcctatgatgcattgcccacagtggcatctgctgggacaatggtggagatggagcatttgcaggggaagggtgttgttggcaagatggtggcgcaggagtgaaatatgtgcaatgtattggattaactaggtacatttcaaatgactcgagtatatgccagagatgtgaacccctgaaatgggtggggggatttggccggtccaaatggtggcagaatttgttctgtggaatgctgatcattagttgcaatgagagtatactagtcactgctgctgcagatgaattgcattgttcattggctgttggtgcccaatctatgtctggaccattgttgttggtggccggctgcactgatctgaatgctttatttatgtccatgatttgatatttggtagttttgtctacttcaggggaatttaatttgcattgttttttgtttattacttgatccttagttgtagttgttcatttgtagcacttgtgaagcagcatacatattcacatagtaccatttagggatttattagctgtatttgttcgcctgtgctgacttgtccttgagcaaatcagtcttgcatattctttcgtgaaaaacttgaacaattggtacttagttttagaagacatattgagggaagctgaaggaattgcacaaatgacctaacgatgatgatagttccataaatcagatgttatataagtctaagtggtgtaacagatgaacgatgaagccagaagttggagaatgtagaattcctttgaagtttgcaccacgagattatttagaatcagaacctcaggctgttgggactcctcttttaggttttcatctcatgatttgttaaattttatatcattacttctcagttatttgattaaaacgtgaaaaagtggttatccaacatactgaagctaatttggaatggttgacaagaaccatactcagtttcattttgattcactgaatcttattgagactaatcccaactagttcaaaggagtatatctgcagtctgctagtagtaggtttgtaatgatgtgtcaatatcaaacttaaatgctactaaatgatgaccatattcttccttcgtggagttagccaaatgattttttgcttttacatttatccttgaattttgcaaatgaattttactgtttttatctttatgccttttattttgttaacaatcattatatgactgaattagatagccaagagcggcaaacctgtgctgttttattcctgaaatattttatggttttggccaagctgttcttcttctgctcattaaatgataaagcaaatccaagtaatgatgtgttctcaggtcactgtgctgccaaatattattcggtagctgcaataatcttctattgacagttcgaataaaatcgtctattgacttatcagtgatatgctgggcagcaaaaggtgtcctctagagattctgacattgacaattaactacttgtcataccaactgtgatccatatttacacctttgtgaatctttctcttagtgcttctttagagaaaagagatttggctactccttaaaccaaaggtcacttagggaatctatattctatatctctgtccaataggtgattcttgacaattttcattagtctgtctgtgggtgaatacttctggattatggtcgaacttatgcagatgcgacaactgaacttcctatttcagaacatcttcaactgcatatgaatatctgctatgtgatttctccttgtgcttgtcattttgtgtagtgagtgagatttagatactaaagatagttccttgcccagaccatttgatatggctatccaagtatgctactttgatcagggcagcacatccactccttcgcaatttgattaatttatggaagcgcttgcatgctttatgtgtaaaatttgactcatcttcaaagaggctggtaaaccttgtgatgcggctaaactgttaaatctacccaacttatcaagaacttct

SEQ ID NO: 23223 - DNA, 2474 bp, Zea Mays
cgaaaacactcgactttgaattggaaaagaagaaaaaggcaaagaaaatcaatcctcgccgccgataaatccacagttcaaagatcaggccgacggctttccattgtgcgtcccgaggggagatatttattttccgttccgttttccccgtcagaaaggagtacttccaacaaactgctccgctttcagcacctgcccagcggaggaagagtgcggattgcggcggcgccggcggacgaaacaatggcgtcggcgagggacgagcatcttgatgggattcgcgcgctgatggcggcccactcgccgccgctccacgggctggtcgtcccctccgaggatgcccaccagagcgagtacgtgtcggagcaggataaacggcgggagttcatctccgggttcacagggagcgctggcttggctcttatcaccatgaaagaggcattgttgtggacggatggccgctacttcttgcaggcaacacagcaactgagcgatcgttggaaacttatgcgcatgggagaagatccaccagttgaagcatggattgctgataatctggctgatgaagctgtcattggaatcaatccatggtgcatctctgttgattctgctcaaagatatgagaactcattttcaaagaggcaccagactttgtttcagctttcttctgatttggtggatgaagtatggaaggatcgcccgctagttgaacctaggcctgtaattgtacacccagtagaatttgcagggcgcagtgtaccagaaaagatgaaggagctaagagaaaagcttgtgcatgaaaaagccactgccattataataactgctcttgatgaggttcagaaatacatgtctggaaatggtatcgaaataagagagtatgaaactgttcaatcagatgcaagtttgcttgcatctggcaagctacaaagttctgtacatgtggaaaagtatatggatgaggtggagagttcaaaaatttggattgattctggctcatgttgccttgcactctactcaaaattgagtccacatcaagttttgacgcttcaatcaccaattgcccttccaaaggctgttaagaaccccacagaactggatggattgaggaaggcgcatattcgagatggtgccgctgttgtacagtaccttgcttggctggataatcagatgcaggagaactatggagcttctggttatttcagtgagataaaagggtcgcataaaaatgaacatttagcaaccaaacttactgaggtgtctgtgagtgacaaacttgaaggcttccgtgcaacaaaagagaactttaaaggtttgagttttcctacaatttcatctgtgggaccaaatgcagcagttattcactataaacctgaagcaagcacatgttcggaaatggatgctgataaaatatatctttgtgactctggggcacagtacctggatggtacaacagacattacaagaactgtacattttggtaaaccctcagcacatgagaagtcatgctacacagcagttttgaaaggccacattgcactagacattgctgtgtttcctaatgggacgacaggacatgctcttgatattctttcacgagcaccactctggagagagggtcttgactatcggcatggtacaggccatggaattggatcttatttgaatgtccatgaaggtcctcatctaattagcttcagaccttctgctcgaaatgtaccgctgcaagcatcaatgactgtgacagatgagcctggttattatgaagatggggcctttggtataagattggagaatgtacttatttgcaaagacgccaatgctaagtttaattttggagataaaggttatttggcatttgaacatataacatgggctccataccagaccaagctgatagacaccgggcttctgacccctgttgagatcgactgggtgaacacgtaccactcagactgccggaagatcttggagcctcatctgaacgagcaggagaagcaatggctgatgaaagctactgagcccgtagctgcaagaggctgagccttttcgtcaacgttgcatgccaccgagcgccaggctcatcttctgcgtggcatacatataagattggctgcccccgctggttaaataataatagcggcgaaggaacaggatagcttgttctcaacgctgatcttcgccgctaaagtggagtgtttggcaggatgctattttctttcccattagggtacgttcgggttttacggaacggtaggtttttatacggaacggtgggtacaacaattcctagagccggattgtttctctaattatttatataaggtttgatcaattgaaataattttggatccattcttgacaacctaaggcccataagctgatttgtacagttattctgggaagtcgcttccaactgaatacgctgctaattgtttcgcccaaaccggatagccttctttgacgctaaataa

SEQ ID NO: 23224 - DNA, 2510 bp, Zea Mays
aaacactcgactttgaattggaaaagaagaaaaaggcaaagaaaatcaatcctcgccgccgataaatccacagttcaaagatcaggccgacggctttccattcacctgcccagcggaggaagagtgcggattgcggcggcgccggcggacgaaacaatggcgtcggcgagggacgagcatcttgatgggattcgcgcgctgatggcggcccactcgccgccgctccacgggctggtcgtcccctccgaggatgcccaccagagcgagtacgtgtcggagcaggataaacggcgggagttcatctccgggttcacagggagcgctggcttggctcttatcaccatgaaagaggcattgttgtggacggatggccgctacttcttgcaggcaacacagcaactgagcgatcgttggaaacttatgcgcatgggagaagatccaccagttgaagcatggattgctgataatctggctgatgaagctgtcattggaatcaatccatggtgcatctctgttgattctgctcaaagatatgagaactcattttcaaagaggcaccagactttgtttcagctttcttctgatttggtggatgaagtatggaaggatcgcccgctagttgaacctaggcctgtaattgtacacccagtagaatttgcagggcgcagtgtaccagaaaagatgaaggagctaagagaaaagcttgtgcatgaaaaagccactgccattataataactgctcttgatgaggttgcttggttgtacaacattcgaggaagtgatgtggattatagcccagtggttcactcttatgctattgtaacattgcacagtgctttcttttatgttgataagagaaaagtaactgtcgaggttcagaaatacatgtctggaaatggtatcgaaataagagagtatgaaactgttcaatcagatgcaagtttgcttgcatctggcaagctacaaagttctgtacatgtggaaaagtatatggatgaggtggagagttcaaaaatttggattgattctggctcatgttgccttgcactctactcaaaattgagtccacatcaagttttgacgcttcaatcaccaattgcccttccaaaggctgttaagaaccccacagaactggatggattgaggaaggcgcatattcgagatggtgccgctgttgtacagtaccttgcttggctggataatcagatgcaggagaactatggagcttctggttatttcagtgagataaaagggtcgcataaaaatgaacatttagcaaccaaacttactgaggtgtctgtgagtgacaaacttgaaggcttccgtgcaacaaaagagaactttaaaggtttgagttttcctacaatttcatctgtgggaccaaatgcagcagttattcactataaacctgaagcaagcacatgttcggaaatggatgctgataaaatatatctttgtgactctggggcacagtacctggatggtacaacagacattacaagaactgtacattttggtaaaccctcagcacatgagaagtcatgctacacagcagttttgaaaggccacattgcactagacattgctgtgtttcctaatgggacgacaggacatgctcttgatattctttcacgagcaccactctggagagagggtcttgactatcggcatggtacaggccatggaattggatcttatttgaatgtccatgaaggtcctcatctaattagcttcagaccttctgctcgaaatgtaccgctgcaagcatcaatgactgtgacagatgagcctggttattatgaagatggggcctttggtataagattggagaatgtacttatttgcaaagacgccaatgctaagtttaattttggagataaaggttatttggcatttgaacatataacatgggctccataccagaccaagctgatagacaccgggcttctgacccctgttgagatcgactgggtgaacacgtaccactcagactgccggaagatcttggagcctcatctgaacgagcaggagaagcaatggctgatgaaagctactgagcccgtagctgcaagaggctgagccttttcgtcaacgttgcatgccaccgagcgccaggctcatcttctgcgtggcatacatataagattggctgcccccgctggttaaataataatagcggcgaaggaacaggatagcttgttctcaacgctgatcttcgccgctaaagtggagtgtttggcaggatgctattttctttcccattagggtacgttcgggttttacggaacggtaggtttttatacggaacggtgggtacaacaattcctagagccggattgtttctctaattatttatataaggtttgatcaattgaaataattttggatccattcttgacaacctaaggcccataagctgatttgtacagttattctgggaagtcgcttccaactgaatacgctgctaattgtttcgcccaaaccggatagccttctttgacgctaaataa

SEQ ID NO: 23225 - DNA, 2113 bp, Zea Mays
gtcgcaggttcggagcagcctctccgcatttgtggaggaaggcttgcatcggtttatctcttccctagaatctggctgatgaagctgtcattggaatcaatccatggtgcatctctgttgattctgctcaaagatatgagaactcattttcaaagaggcaccagactttgtttcagctttcttctgatttggtggatgaagtatggaaggatcgcccgctagttgaacctaggcctgtaattgtacacccagtagaatttgcagggcgcagtgtaccagaaaagatgaaggagctaagagaaaagcttgtgcatgaaaaagccactgccattataataactgctcttgatgaggttgcttggttgtacaacattcgaggaagtgatgtggattatagcccagtggttcactcttatgctattgtaacattgcacagtgctttcttttatgttgataagagaaaagtaactgtcgaggttcagaaatacatgtctggaaatggtatcgaaataagagagtatgaaactgttcaatcagatgcaagtttgcttgcatctggcaagctacaaagttctgtacatgtggaaaagtatatggatgaggtggagagttcaaaaatttggattgattctggctcatgttgccttgcactctactcaaaattgagtccacatcaagttttgacgcttcaatcaccaattgcccttccaaaggctgttaagaaccccacagaactggatggattgaggaaggcgcatattcgagatggtgccgctgttgtacagtaccttgcttggctggataatcagatgcaggagaactatggagcttctggttatttcagtgagataaaagggtcgcataaaaatgaacatttagcaaccaaacttactgaggtgtctgtgagtgacaaacttgaaggcttccgtgcaacaaaagagaactttaaaggtttgagttttcctacaatttcatctgtgggaccaaatgcagcagttattcactataaacctgaagcaagcacatgttcggaaatggatgctgataaaatatatctttgtgactctggggcacagtacctggatggtacaacagacattacaagaactgtacattttggtaaaccctcagcacatgagaagtcatgctacacagcagttttgaaaggccacattgcactagacattgctgtgtttcctaatgggacgacaggacatgctcttgatattctttcacgagcaccactctggagagagggtcttgactatcggcatggtacaggccatggaattggatcttatttgaatgtccatgaaggtcctcatctaattagcttcagaccttctgctcgaaatgtaccgctgcaagcatcaatgactgtgacagatgagcctggttattatgaagatggggcctttggtataagattggagaatgtacttatttgcaaagacgccaatgctaagtttaattttggagataaaggttatttggcatttgaacatataacatgggctccataccagaccaagctgatagacaccgggcttctgacccctgttgagatcgactgggtgaacacgtaccactcagactgccggaagatcttggagcctcatctgaacgagcaggagaagcaatggctgatgaaagctactgagcccgtagctgcaagaggctgagccttttcgtcaacgttgcatgccaccgagcgccaggctcatcttctgcgtggcatacatataagattggctgcccccgctggttaaataataatagcggcgaaggaacaggatagcttgttctcaacgctgatcttcgccgctaaagtggagtgtttggcaggatgctattttctttcccattagggtacgttcgggttttacggaacggtaggtttttatacggaacggtgggtacaacaattcctagagccggattgtttctctaattatttatataaggtttgatcaattgaaataattttggatccattcttgacaacctaaggcccataagctgatttgtacagttattctgggaagtcgcttccaactgaatacgctgctaattgtttcgcccaaaccggatagccttctttgacgctaaataa

SEQ ID NO: 23226 - DNA, 2056 bp, Zea Mays
tccggcactggaatctggctgatgaagctgtcattggaatcaatccatggtgcatctctgttgattctgctcaaagatatgagaactcattttcaaagaggcaccagactttgtttcagctttcttctgatttggtggatgaagtatggaaggatcgcccgctagttgaacctaggcctgtaattgtacacccagtagaatttgcagggcgcagtgtaccagaaaagatgaaggagctaagagaaaagcttgtgcatgaaaaagccactgccattataataactgctcttgatgaggttgcttggttgtacaacattcgaggaagtgatgtggattatagcccagtggttcactcttatgctattgtaacattgcacagtgctttcttttatgttgataagagaaaagtaactgtcgaggttcagaaatacatgtctggaaatggtatcgaaataagagagtatgaaactgttcaatcagatgcaagtttgcttgcatctggcaagctacaaagttctgtacatgtggaaaagtatatggatgaggtggagagttcaaaaatttggattgattctggctcatgttgccttgcactctactcaaaattgagtccacatcaagttttgacgcttcaatcaccaattgcccttccaaaggctgttaagaaccccacagaactggatggattgaggaaggcgcatattcgagatggtgccgctgttgtacagtaccttgcttggctggataatcagatgcaggagaactatggagcttctggttatttcagtgagataaaagggtcgcataaaaatgaacatttagcaaccaaacttactgaggtgtctgtgagtgacaaacttgaaggcttccgtgcaacaaaagagaactttaaaggtttgagttttcctacaatttcatctgtgggaccaaatgcagcagttattcactataaacctgaagcaagcacatgttcggaaatggatgctgataaaatatatctttgtgactctggggcacagtacctggatggtacaacagacattacaagaactgtacattttggtaaaccctcagcacatgagaagtcatgctacacagcagttttgaaaggccacattgcactagacattgctgtgtttcctaatgggacgacaggacatgctcttgatattctttcacgagcaccactctggagagagggtcttgactatcggcatggtacaggccatggaattggatcttatttgaatgtccatgaaggtcctcatctaattagcttcagaccttctgctcgaaatgtaccgctgcaagcatcaatgactgtgacagatgagcctggttattatgaagatggggcctttggtataagattggagaatgtacttatttgcaaagacgccaatgctaagtttaattttggagataaaggttatttggcatttgaacatataacatgggctccataccagaccaagctgatagacaccgggcttctgacccctgttgagatcgactgggtgaacacgtaccactcagactgccggaagatcttggagcctcatctgaacgagcaggagaagcaatggctgatgaaagctactgagcccgtagctgcaagaggctgagccttttcgtcaacgttgcatgccaccgagcgccaggctcatcttctgcgtggcatacatataagattggctgcccccgctggttaaataataatagcggcgaaggaacaggatagcttgttctcaacgctgatcttcgccgctaaagtggagtgtttggcaggatgctattttctttcccattagggtacgttcgggttttacggaacggtaggtttttatacggaacggtgggtacaacaattcctagagccggattgtttctctaattatttatataaggtttgatcaattgaaataattttggatccattcttgacaacctaaggcccataagctgatttgtacagttattctgggaagtcgcttccaactgaatacgctgctaattgtttcgcccaaaccggatagccttctttgacgctaaataa

SEQ ID NO: 23227 - DNA, 689 bp, Zea Mays
atgctgatgcagatgtatagtgctcagatgggatctccaatgggaccccagttcacccgtccgtcacaatctggacaaaccccaaacaccaacgaaacacagggttctgaaaccggacaaggaaacccacagaatggacatttcagtggtcgatgcctcctagaggacagattcttcctcctcctcaaccaggtatgggatattggccgccaccaccatggggatatcctacacatccaatgggccttggggacgccccccatggccaacacagccacttccatcaccagcgacagatgtctcaattccagtggtgaagctacgaacaacaatccgatgtcctgatcgagagcgatggagctaatgtttgaacttgtgaactatggatgtgaacctgtgtgaatttgtgaacttatgtatttggacttatgtgaatttgcgaatttatatttggacttatgtgaatttgtgatatgaacatatatcaatgtgtttgaaatctgtattgtatgtgatatattgtgttgcatgtgatattatgagtgtctaattttacatttctgtattttttatttttttctggaaaagggttaagaacgtgggtacccacgttcttaaagttaagaacgtgggtaccgtcgaacttaatgggcagccctcaccgacccagcacgacccataagttcgac

SEQ ID NO: 23228 - DNA, 994 bp, Zea Mays
agatcatctggggcggacctataagatgtcaactcaaggtcatgagaatgttgccgctgagtactacaaacagcaggtggagatgttagagggttttagtgagatggacgcatttacagatcgtgctttcctacctgtaatgtccaaggaagaacacgaaaaagttgtcaggagtgaatcattagccatatggctgtctaatattgcaaatatggttctctttgctgcaaaagtgtatgcttcagtaaggagtggttcacttgctattatcgcatcaactttggattctcttctagacttgttgtcatgatatatcttgtggtttactgccttttcaatgcaaacgccaaatccctatagaaactcaattggaaaagcgtatgcagccgctggtgagttcttttttgccataacctgtacttccaaaaatgatggttgatgttgatatctagatctgttgtccagaatgttctgtactcttttctgcgaaaatgatttacttatcttttacgtaatctgaattattgtctctgcattttgaatagaatgagcattgctttccatgtttctttctgaggcaaacaataaagatctgaattgataggaaatcaataaacttactcaacactgtgtgctcactactcagtaattcctacttactggaatataaattacctgtctataaatactaattgttgagttcacgattgaagtcatagaaccatggaccctttttatccagtcacctctgtttgaattttctttaagttaatgatgaacttgttatgacttccaatctgacatttgcttttgagatgcgttgtcacttgttggggcaacttccatgtgtcaaacttttttttgtcatgccttttttcatattcttttttctttcaactttactgggattttctgatagatcacctcttagttatattgttgatttgtgatccttccaaaaccatactatcaactaaaaatgatcagttcatcc

SEQ ID NO: 23229 - DNA, 1111 bp, Zea Mays
cgacaaccttctatctatgaattatatgtcatgtctctttaattatctctatatcaatgtctacctatgtgatataagataccgtagcaacgcacgtgcacctaattagtgaatttggaagtgtgactttataaaaacaaatgagttatatgttcaagataatgttagtagtcatactatttaaagtccttttactttcttatttggatgagtcttttttcacatatcttccttcttaatgtaccattcatggttctattgatagctcaaggtcatgagaatgttgccgctgagtactacaaacagcaggtggagatgttagagggttttagtgagatggacgcatttacagatcgtgctttcctacctgtaatgtccaaggaagaacacgaaaaagttgtcaggagtgaatcattagccatatggctgtctaatattgcaaatatggttctctttgctgcaaaagtgtatgcttcaaaactcaattggaaaagcgtatgcagccgctggtgagttcttttttgccataacctgtacttccaaaaatgatggttgatgttgatatctagatctgttgtccagaatgttctgtactcttttctgcgaaaatgatttacttatcttttacgtaatctgaattattgtctctgcattttgaatagaatgagcattgctttccatgtttctttctgaggcaaacaataaagatctgaattgataggaaatcaataaacttactcaacactgtgtgctcactactcagtaattcctacttactggaatataaattacctgtctataaatactaattgttgagttcacgattgaagtcatagaaccatggaccctttttatccagtcacctctgtttgaattttctttaagttaatgatgaacttgttatgacttccaatctgacatttgcttttgagatgcgttgtcacttgttggggcaacttccatgtgtcaaacttttttttgtcatgccttttttcatattcttttttctttcaactttactgggattttctgatagatcacctcttagttatattgttgatttgtgatccttccaaaaccatactatcaactaaaaatgatcagttcatcc

SEQ ID NO: 23230 - DNA, 3005 bp, Zea Mays
caccgtccatccctcgcctcccgttcctcctcccctccctcgctgctgagtgctgacggaaagagggggtcgatcgccatgcataaccccaggccgggcggcggggacatcgtggagatgtcgtcgtcagccagcgcggcgggcgaggcgacgcaaaacgagcgcgtgatcccacatagcggctcgctgagcaagtccagcgcgcggaagagtgcggggttagaggagcccgtgacgacgccgctgtccgcgccaccgccgcgcgcctcgccgtcctccgccgccatgcacgcgctcaatgggctcatgttcatcagcagggccgagggcaccgtcggatgggaggctgtggagaggcgcttccacgagctcgccgagaacgggctcctccaccgctccaagttcggcgagtgcatcgggatgaaggaggtggtgttcgccggcgagctgttcgacgcgctgttgcggcgcagcaacatctcgggcgacaacatcgacaaggcggagctgctcaagttctgggaccaaatcaccgacaccagcttcaacggccgactgcagactttcttccacatggtggacgcggacgcggacggcaggatgtctgaggagaaggtcagacagaccatcacgcagagggcgtccgagaacaagctgtcgaagatcacagagcaggcggaggagtacgcccggctgatcatggaggagctggacccggacaaactcggctacatcgaggtgcgcaacctggagaggctgctggaggaccccagccagttggtgagcatcggcaccgccaaggacatgaggcagatgctgaggagccagagcctccgtccgacgcccgagccgaaccctctccggcgcacgcagtacttcctggaggacaactggcggcgcgtgtgggtggtgctcctgtggctgtccatctgcgtgggtctcttcgcctggaagtttgcccagtaccggcgccggtacgtgttccaggtgatggggtactgcgtgtgcgtggccaagggcggcgccgagacgctcaagttcaacatggcgctgatcctgctccctgtgtgccggaacaccatcacctggatccgcaaccacaccggcgtgggccgcgtggtgcccttcgacgacaacatcagcttccacatggtggtggccgcgggcatcgccgtcggcgccgggctccacgtggtgtcccacctgacgtgcgacttcccgcggctgctccgcgccacggacgccgcgtacgcgcccctggcgcagtacttcggggtgccccgcccgcgcaactactggtggttcgtgaagggcacggaggggtggacggggctcgccatgctcgtgctcatggccgtcgccttcaccctggcgatgccgtggttccgccgcggggagctcgcgctgacggacctgctgaagcggctggtaggcccgctgaagcggctgacggacacgctcaagctgacggacccgctgaagcggctgacgggccagctcaagcggctgactgcaggcccgcggaagcggccgacggacccgctcaagccgacggacccgctgaagcggctgacgggtttcaacgcgttctggtacacgcaccactgcttcgtggcggtgtacgcgctgctgctggtgcacgggcactacctgtacctgacgcacaagtggtacaagaagtcgacgtggatgtacctggccgtgcccatggtgctgtacgcgtgcgagcgcctcacgcgggcgctccgctccagggtccgcgccgtcaggatccgcaaggtgggcgtgtacccgggcgacgtgctctcgctccacttctccaagccgccgggcttcagctacaagagcggccagtacatgttcgtcaactgcgccgacgtctcaccgttcgagtggcacccgttctgcatcacgtcagccccacaggatgagtacctgagcgtccacatcaagaaacagggcgactggaccggcgagctccggaacgtcttctcgagggtgtgccggccgccgacggagggcaacagtcggctgctccgcgacggcagcgccaattctctatctctacgcttccccaaggtgaggatcgacggcccgtacggcgcgccggcgcaggactacaagcagtacgatgtcgtgcttctggtcgggcagggcattggcgctacgccgatgatctccatcatcaaggacatcatcaacaacatgaagcagctagatggcgacctggaggccgacgctggctcgggcttgggctccggcggtgtcgacgcgtcgtcgtcgtcgtcgctgccatccttccgcacgcagcgggcctacttctactgggtgacccgggagcagggctccttcgagtggttccatggcatcatggacgaggtggccgagaccgacaagaagggcatcatcgagctccacaaccactgcaccagcgtgtacaaggacggggacctccgctccagggtcatcgcccagcttcaaatgctcaaccaggccaagcacaacatcgacgttatttccggcacccgcgtcaagacccacttcgccaggcccgattggccaaacgtctacaagcacattgcggagaaccaccaaaaccaacgtgttggagtgttctactgtggcggtggcccggagccgctaaagacgctgcgcgaactcgccaaggatttctcgcggaaaaccaacaccaagttcgagttccacaaggagaacttctagcgtatatgcagcctcgatctaaaggttttcgcatgacaaacaattcggtacatactacagtcgtcggtgcatatgctgtcagtgacgaggagccattatggtttagtgtagcctaagccatccttagattttaaagagattatatcttccattataatcgtaaaagaagatgtggcgtgttgattaggctgttgtgttttaagctttttaggttgtgagctcagttcacattgttgtattttttctctttttctcaaccataccttatttttcttttgtcgtgt

SEQ ID NO: 23231 - DNA, 8344 bp, Zea Mays
attcaaacccttcaaggccataaaagcagcaaaaagcaaagcacatgatctaagatctaaatactatctatgatccactatgcctttcatcagcatagtgactacaagctaatgcatttcaggcatacctctagtgtgttccagatccaaaaacgaattatcaaaactgatcaagagtagataaaggatcaccagttgcatcatcaaatataacaagcggaactacagcagtatctttcttcggaaatgcctgtagagaagaatgtcaagtaatttgtggcaggtttagagctattgatgaagcatttcagtatcccaactaagccatgttcttgtaagctacttactgcatgcccaaccaaaatcaatgttcaagcttcaatgcaattatagaataaactacctactgctaattagtggaaactgcagaagcaggaaccatttgtggacaatttatcctgacaagttcctttttcctcaagtacgcaggagaactgcgataagaaacaaactaaaatcactttattacaaatttagagcacaataaattgaatttcaatgacaccatgttatataattgaaattagccctgttggtttccttaccttctaaaaataacattacagcgcagaggtcaaactaactcagatatcctccatctatcattctactgcctagttaatatgataccatccttacagtccacaaacaccaagtgaaccgacaaaaaagagcgctaactaaataacaatgttacattaggtgctaggcagtgaccttcagcctaaagcttaggcgaggcaagcctaggtgtttcacaaatagacaaacatatacaaatattacctcaaaggaaaagaaaaaacaggagattacaggcctagggttggatagaaaggcccatcaaaagcagcctagtccatcaaaaacagcctagcccaccttataccttcccagcttatccatccgctctctgccctgtcgcaccttcctctgctctcaggcgcctacttcctccctaccaccttgaccaccgccagcctcctctctgctgcctccagcaccacctgcctattccagccatgcctgccacctccaccactgactgcctccttccggccgcatctgctaccaccgccatcacccccgtccctgcctcccccgctaccaaactcagtgcccctgcctccgccaccggcactggcgcccactgctcccgccacgtccccatcaccaccctcttttcacctattcctgcctccttcctgctgctcaacatccctgcctgccgggatcggcacataggtacaccgggtcgctaccaagggctcacctacaccccaaggcgggtcgctaccaagggctcacctacaccccaaggcgcctacacctaaacctaatcgtgcgtaagtggccgcagaataccaccttttggaacactgctaaataatgatctaatactaaacaacttttaatcctgaaaatcaactgcggacaacatctatgccaatatagttagcctacatagcaaaaacaaaaaaaaataacaaacatttgcaaccataatatataattccaaccaacatatatgacatagtcctggctgtatgctcagtaagtggagcatgcggatgtgtgcccagcccagaccacctagattcaagttctcgtcaaggcaaatttatgtgcctattttcttctgaataataaaatggtacctaggtcctcctaggttgagctagtttttttaataatccttgaaataacttctctctgtgctcaaataaatagtcaaatacaaatcatgaatattttttctataactttgtgcttaggggcaaacccagtgccaaaggctcccacatattggcagagggataaacggagaagctgcttcaaaccagcgacctggtgaggcttgcccttctaatgacactactgtaactttgtgtttacatgggaaaactcttctgatagcacatctcaagtagcattcatgattttttaacaaaaataatttttactggtttctggggtgacgcgcacaatagttaatacaaactgatgtaaactttatgaaatggtactggtaatatttcacacatacccctcttttatttctttcatcacattctactgaggcaagttcacagttaaatggtggtttgaaaactaatttccagcaagaatataaatgctttgaatcacaacttctacaacaaatattacatcacagatattagttaattaaagaaactataattcaagtccaaaacaaactacaagagtaccttcaaaaaccggtcaacgtaggctgtaaaaagggcatagcatttcttagaagataccacatggaaaataaaaaaaaaccttcttgctcagaaacaatttaaatttgtagacataaagttacaaagaaatttgttatatcccatacattttttttacatgaaagacatgttgaaccttatatccttttcaagctcgacatatctaaagcgttcaactcagtttcttgggcgtctttacttgaggtcctgcagcacatggggtttggacgaaagtggtataacctgctctgccttcttctctccacctcctccacaaaacttctggttaatggtgtgcctggagaattcattctgcatcatcgggggctgaggcaagggggtcctttatccccagtgttgttcttgctagtcatggaggcattgaatgccttaatcactaaagctgtccaagcatatttcctacagccgctggctgttcagcaggctaagcaccggatttctttatatgtggatgatgccatcttgttcctcaggccaaatcgagatgatctgcttctcatatctcagctgttgaaggcttttggttatgcgtcaggcctccagaccaatctcgctaaaagctcagtgtgccccattaattgcacaattgaagacttgaaggtcatttctgagctcttggattgtgaaatcaggaatttaccttgcacctacctggggatacctcttactattcggaaaccaaccaagagtgcctgctgcctttgattgataaaatagcagcttgcctcccaaaatggaaggcttctctcatgagccgagccggttagcttgtgatggtccgtgctgttttttctgccatccctatccatgatatgctagctctggatctccccaaatgggtgatcaaagctattgataagctgtgacggggcttcttgtggggaggtcatcaaaatgctaatggaggcaattgccctgtgtcttgggagaaggttcaaatgccgttgcagtgtgatggcctaggggttctcaaccttgaaaaaatgggatgggccttacacatccgatggctttggctacaaaaaaaaaacagattcttcacggccttgggaagggctgcccattcaggttccctataaggcctgagctctctttcatgtggcggtgcaaacaaaggtcggaaatggtgttgataccaaattctggactgaccggtggctgcacggtagctctgtgggagaactggaccctaatctttttcagttaattcctaagagagcaagaagacaacgcgctgtttctcaagccctatctaacaggcgttgggtcactgacatccagggagccctcacagtccaggtgattgtcgaatacctgaagctttggatgttggtggaaggttttaccttgcaaccagcccttcctgatcatcacttttggaagttcacaagttcaggacagtattctagtaaatctgcttataacaccttttttcttgggaactgttacgattgaaccttgcaaaaatacttggaaaacttgggcacctctccggtgcaaattcttcatatggctggcaatcaagaacagagtttggacgacggatcgcttgctgaaacatgggttgccacatcctagtgtctgcctcctttgtgaccaggaagatgagtcagctcaacacattatagtgtcttgcgtcttctcccgggagacttggaccaaaatcctctgttttgttggactgcaggccgctgctccacaaattgagaaattttgctcgctggtggggatgtgcagtcaacaaagtgccaaagtagaagagaaaaggatttctctaatcattcttgttgcttggacaatttggagacataggaatgtgtgcgttttgagggtcttagtcctagtatttccttggtgtgtcaggaagtagcagaggagagtgagctctagtgtatggccacaaacacggccctccatgagctgctcagcaggaagccaaggctggaagcctgagcagccctgtgtggtcgttcttttaggtttagtgcgtggcgcgtatgttaccttttggtgatgtgttgcggggagggggggggcttctttccacccctcgggtgttgtatctttttcttcttaaatgaaatgacacgcaactctcctgtgtaattcgagaaaaaaaagatatgttgcagtgtgttaaccatagatgatttttttggggtagctgtacgtaaagctgcaatttcaaggaatacagacgcaactactgaatttaaacttgcaccttaagccacaatcgtctcatataacctaagtgattcacacacagctgtcagatattcaagtcgtatttatatctgtaatacttgcaaaatccaaaataatattgcacatatgtactctggaaaacagatggacaacagattgtcaaatagagctgaccttgtgacacattccagtgcaaatagcaactaaatcagcacaatttcattgttagcatcacagaagagttatgcaaagggtgcaacagtaaacatttgactctgtaggaaaaaataatgtagactgcatagtaaagcagatacttcccaccttttcttttcttcttgtagcctttgcgtatcaatagcattcttattctcttccaacccaaggtgggaactttgagatgcagtaactggagagctaatgacactcggactgctctttcttctgtaacgcttccgtgatggaggtggactattgcgcctcctaggagatggagaacagctctcacgccttctcggggatgggaaagggctcctccttctgcaagacaaagatgagcactgtaaggataaaattaggatcatcacaacaatagacaaggaattaccattatctcttgaagccctaaaacatgggcaaaagcagttaccttagacactgttacaggggtagagcattccacagcaatacagcacagagtaaaatctttgtagattccatgcgttttacgaaaacaactcttgttagtctgtataggcaggtaatgcaaaacatggcataactatatctaagcttcatctgctgatatattccatgctgcatcgaagcatttttattttaattctgtaatgcaaaagcatccaaatcattttccccttggaaatcagaaatcatggtgttatgaaatttgacgttcataatcatatttaattcaagtatgatatggcacaatatactaccacactatccacctctaacagtcacaaaccaagctatagtacaaaattcgaatgaaggcgatcagcatcgcctcaaattttttacagtacaaaccccaaaaaaataaaacgaagactcgccagatttctgtggcgtgtgtcgggagatgtggtcacctatacgaggggcgatagggggacctgctacggctagggcttcggtccctacggcccctccggccgcggtaccgctcgggtgatggcgaccgccgacgccggcgcggcggagacagcgaccgcgacaggtcgcgttgcatcgtgcgcgacgcgatctagagcctcagcggagccggatctggacgaaaccagacgatcggagccttcggagaggggcggagtctggcttgctggctggaaagcgggaggacgcaggccaggtcaggtagagtcgcccgccgccgcacgcgggggccgatgaggtgggggatgctcgcagcccgcggaatctatctgtgggaagttgtaattaacctccaaggctacgcccaggtatacaaggtgggcgctggggagaagcaaaagcaatcgggccaccaatcccacagcgtgatatgaccgcccggtccagctcagcccaggcccatgtgagtcgtccgacccggatgagtccagatccagacccaacgtgaccgcgagtccctcaagatcacacagtaccggcaggcggcagcaattggagtgtttacgccgagacttgaaaacggcatcagtagcaaacggaggcgaccacgagcgacggggccagccgcggtccccaacgtcagaggatctcgttccagctgcggcagggcggccaacaccggcacctcatgggcgccgacgacgaagccgccgccgccatggaggcgcaagagagggaggcggagatcgagaaggccatgcgcgcccgcgtcgcagacttcaagaagcaggccgactccttgactcttgaaggcgttaggagagcactggaaaaggacctggatttgaagatatattcacttgatgcacataaaaagtttataaagcaatgtgtagacaaatattataccaggtttttgctgaatctgctgatgaaaatgcaaatgatgatgcattagaggattctgatgctaaagatgatcatttatcaaaagaagggacagatgttgctaaaccaatgcctgtttcaaataaaatgtcctccaatgctgatgtcgtaacatccagcaagacaggaaaggatcctgaagaagaaaagaatcaaacttccagcagtgatattagtgaagacatgataaaagaagccattgaaaaaagggcatcttattttagaaagaactctgatactcttactttacaaggagttcggcgtactttggaagaagatctcaagcttcagaagaaagctttagatgcctataagaattttattactacaggattagacaagattttgcaagaacctgcaaatgggacaaagaaaaaaagtaaaaatggatcttccaaggatactgacaaaacaagtaaaggctctaaaagagtccatgaagaatcagatagctctgaattaaatgatagaaagagtgatatggataatagcgacgtggattcaaggccaagaaagaaaagggcagaaaaggctaaagtcaccaaaaaacagaaaatagttacaaatgagaggaaactgtcaactccaaaggctaaaaaggttgcaaaacaagatttgggtagcagtactgaagaacagggtggcaattcagcagaagaggataattctcattcatccgctgaggaagataataagagaaaacggcaacagactccagcttatgggaaacaagcagagcatctgaaatcgataatcaagtcttgtggaatgactattccacctactgtgtatcggagagtcaagcaagctgctgagaacaagcgtgaggcctgtttgataaaggagttacaggatatacttgaaaaggaaggattgtcaaaaaatccttctgaaaaagaaattaaagcagtgaagaagagaaaagaaagagcaaaggaacttgagggcatagacatgagtaatattattactagttcgcgtcggagaagtacatcaagtttcatacccctgccaccaccgccgcaaatagaagtggatagtgatgatgatgaagacgatgacgatgatgcagaaggcaatgatgcagaaggcgatgatgatgatgcagaaggcgatgatgaagacgatgcagaaggcgatgatgatgatgcggaaggcgatgatgcagaagacgatgatgaagttgatgaggagaatgtcaaaggtcgagatgaaggtgataatgatactgccgaagctgccaacggttctgctgatgatgctgaaaaggagaacaattgattccggccccagaataggttcagcttcatgttggcttcggcaagttggcctcgttcgtggatgtctggatgtagccagttgctcaggagttctcttctgacgtttatttatgtgtgcgtgatgggaacatttgttggcttcagctttgggtgaaacatgaggaacatattgtccttgtagtgatgtgcaatgtcacattcgtcctcttagcatcttgttcgcgattgtgtagattacaacaacagtcgcaaaacatataagttagcagtaatcaagtactgattggtttattagtttctgatatagtataaacctcgtaggtgaaagattggaattactatgcgcttcatgcttttgccttgttttttcttaggtagtgtttattttccgtggcatggtggcatctggggttttttgcagttctgattggcgttgtg

SEQ ID NO: 23232 - DNA, 6467 bp, Zea Mays
ctaagatctaaatactatctatgatccactatgcctttcatcagcatagtgactacaagctaatgcatttcaggcatacctctagtgtgttccagatccaaaaacgaattatcaaaactgatcaagagtagataaaggatcaccagttgcatcatcaaatataacaagcggaactacagcagtatctttcttcggaaatgcctgtagagaagaatgtcaagtaatttgtggcaggtttagagctattgatgaagcatttcagtatcccaactaagccatgttcttgtaagctacttactgcatgcccaaccaaaatcaatgttcaagcttcaatgcaattatagaataaactacctactgctaattagtggaaactgcagaagcaggaaccatttgtggacaatttatcctgacaagttcctttttcctcaagtacgcaggagaactgcgataagaaacaaactaaaatcactttattacaaatttagagcacaataaattgaatttcaatgacaccatgttatataattgaaattagccctgttggtttccttaccttctaaaaataacattacagcgcagaggtcaaactaactcagatatcctccatctatcattctactgcctagttaatatgataccatccttacagtccacaaacaccaagtgaaccgacaaaaaagagcgctaactaaataacaatgttacattaggtgctaggcagtgaccttcagcctaaagcttaggcgaggcaagcctaggtgtttcacaaatagacaaacatatacaaatattacctcaaaggaaaagaaaaaacaggagattacaggcctagggttggatagaaaggcccatcaaaagcagcctagtccatcaaaaacagcctagcccaccttataccttcccagcttatccatccgctctctgccctgtcgcaccttcctctgctctcaggcgcctacttcctccctaccaccttgaccaccgccagcctcctctctgctgcctccagcaccacctgcctattccagccatgcctgccacctccaccactgactgcctccttccggccgcatctgctaccaccgccatcacccccgtccctgcctcccccgctaccaaactcagtgcccctgcctccgccaccggcactggcgcccactgctcccgccacgtccccatcaccaccctcttttcacctattcctgcctccttcctgctgctcaacatccctgcctgccgggatcggcacataggtacaccgggtcgctaccaagggctcacctacaccccaaggcgggtcgctaccaagggctcacctacaccccaaggcgcctacacctaaacctaatcgtgcgtaagtggccgcagaataccaccttttggaacactgctaaataatgatctaatactaaacaacttttaatcctgaaaatcaactgcggacaacatctatgccaatatagttagcctacatagcaaaaacaaaaaaaaataacaaacatttgcaaccataatatataattccaaccaacatatatgacatagtcctggctgtatgctcagtaagtggagcatgcggatgtgtgcccagcccagaccacctagattcaagttctcgtcaaggcaaatttatgtgcctattttcttctgaataataaaatggtacctaggtcctcctaggttgagctagtttttttaataatccttgaaataacttctctctgtgctcaaataaatagtcaaatacaaatcatgaatattttttctataactttgtgcttaggggcaaacccagtgccaaaggctcccacatattggcagagggataaacggagaagctgcttcaaaccagcgacctggtgaggcttgcccttctaatgacactactgtaactttgtgtttacatgggaaaactcttctgatagcacatctcaagtagcattcatgattttttaacaaaaataatttttactggtttctggggtgacgcgcacaatagttaatacaaactgatgtaaactttatgaaatggtactggtaatatttcacacatacccctcttttatttctttcatcacattctactgaggcaagttcacagttaaatggtggtttgaaaactaatttccagcaagaatataaatgctttgaatcacaacttctacaacaaatattacatcacagatattagttaattaaagaaactataattcaagtccaaaacaaactacaagagtaccttcaaaaaccggtcaacgtaggctgtaaaaagggcatagcatttcttagaagataccacatggaaaataaaaaaaaaccttcttgctcagaaacaatttaaatttgtagacataaagttacaaagaaatttgttatatcccatacattttttttacatgaaagacatgttgaaccttatatccttttcaagctcgacatatctaaagcgttcaactcagtttcttgggcgtctttacttgaggtcctgcagcacatggggtttggacgaaagtggtataacctgctctgccttcttctctccacctcctccacaaaacttctggttaatggtgtgcctggagaattcattctgcatcatcgggggctgaggcaagggggtcctttatccccagtgttgttcttgctagtcatggaggcattgaatgccttaatcactaaagctgtccaagcatatttcctacagccgctggctgttcagcaggctaagcaccggatttctttatatgtggatgatgccatcttgttcctcaggccaaatcgagatgatctgcttctcatatctcagctgttgaaggcttttggttatgcgtcaggcctccagaccaatctcgctaaaagctcagtgtgccccattaattgcacaattgaagacttgaaggtcatttctgagctcttggattgtgaaatcaggaatttaccttgcacctacctggggatacctcttactattcggaaaccaaccaagagtgcctgctgcctttgattgataaaatagcagcttgcctcccaaaatggaaggcttctctcatgagccgagccggttagcttgtgatggtccgtgctgttttttctgccatccctatccatgatatgctagctctggatctccccaaatgggtgatcaaagctattgataagctgtgacggggcttcttgtggggaggtcatcaaaatgctaatggaggcaattgccctgtgtcttgggagaaggttcaaatgccgttgcagtgtgatggcctaggggttctcaaccttgaaaaaatgggatgggccttacacatccgatggctttggctacaaaaaaaaaacagattcttcacggccttgggaagggctgcccattcaggttccctataaggcctgagctctctttcatgtggcggtgcaaacaaaggtcggaaatggtgttgataccaaattctggactgaccggtggctgcacggtagctctgtgggagaactggaccctaatctttttcagttaattcctaagagagcaagaagacaacgcgctgtttctcaagccctatctaacaggcgttgggtcactgacatccagggagccctcacagtccaggtgattgtcgaatacctgaagctttggatgttggtggaaggttttaccttgcaaccagcccttcctgatcatcacttttggaagttcacaagttcaggacagtattctagtaaatctgcttataacaccttttttcttgggaactgttacgattgaaccttgcaaaaatacttggaaaacttgggcacctctccggtgcaaattcttcatatggctggcaatcaagaacagagtttggacgacggatcgcttgctgaaacatgggttgccacatcctagtgtctgcctcctttgtgaccaggaagatgagtcagctcaacacattatagtgtcttgcgtcttctcccgggagacttggaccaaaatcctctgttttgttggactgcaggccgctgctccacaaattgagaaattttgctcgctggtggggatgtgcagtcaacaaagtgccaaagtagaagagaaaaggatttctctaatcattcttgttgcttggacaatttggagacataggaatgtgtgcgttttgagggtcttagtcctagtatttccttggtgtgtcaggaagtagcagaggagagtgagctctagtgtatggccacaaacacggccctccatgagctgctcagcaggaagccaaggctggaagcctgagcagccctgtgtggtcgttcttttaggtttagtgcgtggcgcgtatgttaccttttggtgatgtgttgcggggagggggggggcttctttccacccctcgggtgttgtatctttttcttcttaaatgaaatgacacgcaactctcctgtgtaattcgagaaaaaaaagatatgttgcagtgtgttaaccatagatgatttttttggggtagctgtacgtaaagctgcaatttcaaggaatacagacgcaactactgaatttaaacttgcaccttaagccacaatcgtctcatataacctaagtgattcacacacagctgtcagatattcaagtcgtatttatatctgtaatacttgcaaaatccaaaataatattgcacatatgtactctggaaaacagatggacaacagattgtcaaatagagctgaccttgtgacacattccagtgcaaatagcaactaaatcagcacaatttcattgttagcatcacagaagagttatgcaaagggtgcaacagtaaacatttgactctgtaggaaaaaataatgtagactgcatagtaaagcagatacttcccaccttttcttttcttcttgtagcctttgcgtatcaatagcattcttattctcttccaacccaaggtgggaactttgagatgcagtaactggagagctaatgacactcggactgctctttcttctgtaacgcttccgtgatggaggtggactattgcgcctcctaggagatggagaacagctctcacgccttctcggggatgggaaagggctcctccttctgcaagacaaagatgagcactgtaaggataaaattaggatcatcacaacaatagacaaggaattaccattatctcttgaagccctaaaacatgggcaaaagcagttaccttagacactgttacaggggtagagcattccacagcaatacagcacagagtaaaatctttgtagattccatgcgttttacgaaaacaactcttgttagtctgtataggcaggtaatgcaaaacatggcataactatatctaagcttcatctgctgatatattccatgctgcatcgaagcatttttattttaattctgtaatgcaaaagcatccaaatcattttccccttggaaatcagaaatcatggtgttatgaaatttgacgttcataatcatatttaattcaagtatgatatggcacaatatactaccacactatccacctctaacagtcacaaaccaagctatagtacaaaattcgaatgaaggcgatcagcatcgcctcaaattttttacagtacaaaccccaaaaaaataaaacgaagactcgccagatttctgtggcgtgtgtcgggagatgtggtcacctatacgaggggcgatagggggacctgctacggctagggcttcggtccctacggcccctccggccgcggtaccgctcgggtgatggcgaccgccgacgccggcgcggcggagacagcgaccgcgacaggtcgcgttgcatcgtgcgcgacgcgatctagagcctcagcggagccggatctggacgaaaccagacgatcggagccttcggagaggggcggagtctggcttgctggctggaaagcgggaggacgcaggccaggtcaggtagagtcgcccgccgccgcacgcgggggccgatgaggtgggggatgctcgcagcccgcggaatctatctgtgggaagttgtaattaacctccaaggctacgcccaggtatacaaggtgggcgctggggagaagcaaaagcaatcgggccaccaatcccacagcgtgatatgaccgcccggtccagctcagcccaggcccatgtgagtcgtccgacccggatgagtccagatccagacccaacgtgaccgcgagtccctcaagatcacacagtaccggcaggcggcagcaattggagtgtttacgccgagacttgaaaacggcatcagtagcaaacggaggcgaccacgagcgacggggccagccgcggtccccaacgtcagaggatctcgttccagctgcggcagggcggccaacaccggcacctcatgggcgccgacgacgaagccgccgccgccatggaggcgcaagagagggaggcggagatcgagaaggccatgcgcgcccgcgtcgcagacttcaagaagcaggccgaattgtccagatcaccacccccacaatttccatgaagaagcacc

SEQ ID NO: 23233 - DNA, 7856 bp, Zea Mays
ctaagatctaaatactatctatgatccactatgcctttcatcagcatagtgactacaagctaatgcatttcaggcatacctctagtgtgttccagatccaaaaacgaattatcaaaactgatcaagagtagataaaggatcaccagttgcatcatcaaatataacaagcggaactacagcagtatctttcttcggaaatgcctgtagagaagaatgtcaagtaatttgtggcaggtttagagctattgatgaagcatttcagtatcccaactaagccatgttcttgtaagctacttactgcatgcccaaccaaaatcaatgttcaagcttcaatgcaattatagaataaactacctactgctaattagtggaaactgcagaagcaggaaccatttgtggacaatttatcctgacaagttcctttttcctcaagtacgcaggagaactgcgataagaaacaaactaaaatcactttattacaaatttagagcacaataaattgaatttcaatgacaccatgttatataattgaaattagccctgttggtttccttaccttctaaaaataacattacagcgcagaggtcaaactaactcagatatcctccatctatcattctactgcctagttaatatgataccatccttacagtccacaaacaccaagtgaaccgacaaaaaagagcgctaactaaataacaatgttacattaggtgctaggcagtgaccttcagcctaaagcttaggcgaggcaagcctaggtgtttcacaaatagacaaacatatacaaatattacctcaaaggaaaagaaaaaacaggagattacaggcctagggttggatagaaaggcccatcaaaagcagcctagtccatcaaaaacagcctagcccaccttataccttcccagcttatccatccgctctctgccctgtcgcaccttcctctgctctcaggcgcctacttcctccctaccaccttgaccaccgccagcctcctctctgctgcctccagcaccacctgcctattccagccatgcctgccacctccaccactgactgcctccttccggccgcatctgctaccaccgccatcacccccgtccctgcctcccccgctaccaaactcagtgcccctgcctccgccaccggcactggcgcccactgctcccgccacgtccccatcaccaccctcttttcacctattcctgcctccttcctgctgctcaacatccctgcctgccgggatcggcacataggtacaccgggtcgctaccaagggctcacctacaccccaaggcgggtcgctaccaagggctcacctacaccccaaggcgcctacacctaaacctaatcgtgcgtaagtggccgcagaataccaccttttggaacactgctaaataatgatctaatactaaacaacttttaatcctgaaaatcaactgcggacaacatctatgccaatatagttagcctacatagcaaaaacaaaaaaaaataacaaacatttgcaaccataatatataattccaaccaacatatatgacatagtcctggctgtatgctcagtaagtggagcatgcggatgtgtgcccagcccagaccacctagattcaagttctcgtcaaggcaaatttatgtgcctattttcttctgaataataaaatggtacctaggtcctcctaggttgagctagtttttttaataatccttgaaataacttctctctgtgctcaaataaatagtcaaatacaaatcatgaatattttttctataactttgtgcttaggggcaaacccagtgccaaaggctcccacatattggcagagggataaacggagaagctgcttcaaaccagcgacctggtgaggcttgcccttctaatgacactactgtaactttgtgtttacatgggaaaactcttctgatagcacatctcaagtagcattcatgattttttaacaaaaataatttttactggtttctggggtgacgcgcacaatagttaatacaaactgatgtaaactttatgaaatggtactggtaatatttcacacatacccctcttttatttctttcatcacattctactgaggcaagttcacagttaaatggtggtttgaaaactaatttccagcaagaatataaatgctttgaatcacaacttctacaacaaatattacatcacagatattagttaattaaagaaactataattcaagtccaaaacaaactacaagagtaccttcaaaaaccggtcaacgtaggctgtaaaaagggcatagcatttcttagaagataccacatggaaaataaaaaaaaaccttcttgctcagaaacaatttaaatttgtagacataaagttacaaagaaatttgttatatcccatacattttttttacatgaaagacatgttgaaccttatatccttttcaagctcgacatatctaaagcgttcaactcagtttcttgggcgtctttacttgaggtcctgcagcacatggggtttggacgaaagtggtataacctgctctgccttcttctctccacctcctccacaaaacttctggttaatggtgtgcctggagaattcattctgcatcatcgggggctgaggcaagggggtcctttatccccagtgttgttcttgctagtcatggaggcattgaatgccttaatcactaaagctgtccaagcatatttcctacagccgctggctgttcagcaggctaagcaccggatttctttatatgtggatgatgccatcttgttcctcaggccaaatcgagatgatctgcttctcatatctcagctgttgaaggcttttggttatgcgtcaggcctccagaccaatctcgctaaaagctcagtgtgccccattaattgcacaattgaagacttgaaggtcatttctgagctcttggattgtgaaatcaggaatttaccttgcacctacctggggatacctcttactattcggaaaccaaccaagagtgcctgctgcctttgattgataaaatagcagcttgcctcccaaaatggaaggcttctctcatgagccgagccggttagcttgtgatggtccgtgctgttttttctgccatccctatccatgatatgctagctctggatctccccaaatgggtgatcaaagctattgataagctgtgacggggcttcttgtggggaggtcatcaaaatgctaatggaggcaattgccctgtgtcttgggagaaggttcaaatgccgttgcagtgtgatggcctaggggttctcaaccttgaaaaaatgggatgggccttacacatccgatggctttggctacaaaaaaaaaacagattcttcacggccttgggaagggctgcccattcaggttccctataaggcctgagctctctttcatgtggcggtgcaaacaaaggtcggaaatggtgttgataccaaattctggactgaccggtggctgcacggtagctctgtgggagaactggaccctaatctttttcagttaattcctaagagagcaagaagacaacgcgctgtttctcaagccctatctaacaggcgttgggtcactgacatccagggagccctcacagtccaggtgattgtcgaatacctgaagctttggatgttggtggaaggttttaccttgcaaccagcccttcctgatcatcacttttggaagttcacaagttcaggacagtattctagtaaatctgcttataacaccttttttcttgggaactgttacgattgaaccttgcaaaaatacttggaaaacttgggcacctctccggtgcaaattcttcatatggctggcaatcaagaacagagtttggacgacggatcgcttgctgaaacatgggttgccacatcctagtgtctgcctcctttgtgaccaggaagatgagtcagctcaacacattatagtgtcttgcgtcttctcccgggagacttggaccaaaatcctctgttttgttggactgcaggccgctgctccacaaattgagaaattttgctcgctggtggggatgtgcagtcaacaaagtgccaaagtagaagagaaaaggatttctctaatcattcttgttgcttggacaatttggagacataggaatgtgtgcgttttgagggtcttagtcctagtatttccttggtgtgtcaggaagtagcagaggagagtgagctctagtgtatggccacaaacacggccctccatgagctgctcagcaggaagccaaggctggaagcctgagcagccctgtgtggtcgttcttttaggtttagtgcgtggcgcgtatgttaccttttggtgatgtgttgcggggagggggggggcttctttccacccctcgggtgttgtatctttttcttcttaaatgaaatgacacgcaactctcctgtgtaattcgagaaaaaaaagatatgttgcagtgtgttaaccatagatgatttttttggggtagctgtacgtaaagctgcaatttcaaggaatacagacgcaactactgaatttaaacttgcaccttaagccacaatcgtctcatataacctaagtgattcacacacagctgtcagatattcaagtcgtatttatatctgtaatacttgcaaaatccaaaataatattgcacatatgtactctggaaaacagatggacaacagattgtcaaatagagctgaccttgtgacacattccagtgcaaatagcaactaaatcagcacaatttcattgttagcatcacagaagagttatgcaaagggtgcaacagtaaacatttgactctgtaggaaaaaataatgtagactgcatagtaaagcagatacttcccaccttttcttttcttcttgtagcctttgcgtatcaatagcattcttattctcttccaacccaaggtgggaactttgagatgcagtaactggagagctaatgacactcggactgctctttcttctgtaacgcttccgtgatggaggtggactattgcgcctcctaggagatggagaacagctctcacgccttctcggggatgggaaagggctcctccttctgcaagacaaagatgagcactgtaaggataaaattaggatcatcacaacaatagacaaggaattaccattatctcttgaagccctaaaacatgggcaaaagcagttaccttagacactgttacaggggtagagcattccacagcaatacagcacagagtaaaatctttgtagattccatgcgttttacgaaaacaactcttgttagtctgtataggcaggtaatgcaaaacatggcataactatatctaagcttcatctgctgatatattccatgctgcatcgaagcatttttattttaattctgtaatgcaaaagcatccaaatcattttccccttggaaatcagaaatcatggtgttatgaaatttgacgttcataatcatatttaattcaagtatgatatggcacaatatactaccacactatccacctctaacagtcacaaaccaagctatagtacaaaattcgaatgaaggcgatcagcatcgcctcaaattttttacagtacaaaccccaaaaaaataaaacgaagactcgccagatttctgtggcgtgtgtcgggagatgtggtcacctatacgaggggcgatagggggacctgctacggctagggcttcggtccctacggcccctccggccgcggtaccgctcgggtgatggcgaccgccgacgccggcgcggcggagacagcgaccgcgacaggtcgcgttgcatcgtgcgcgacgcgatctagagcctcagcggagccggatctggacgaaaccagacgatcggagccttcggagaggggcggagtctggcttgctggctggaaagcgggaggacgcaggccaggtcaggtagagtcgcccgccgccgcacgcgggggccgatgaggtgggggatgctcgcagcccgcggaatctatctgtgggaagttgtaattaacctccaaggctacgcccaggtatacaaggtgggcgctggggagaagcaaaagcaatcgggccaccaatcccacagcgtgatatgaccgcccggtccagctcagcccaggcccatgtgagtcgtccgacccggatgagtccagatccagacccaacgtgaccgcgagtccctcaagatcacacagtaccggcaggcggcagcaattggagtgtttacgccgagacttgaaaacggcatcagtagcaaacggaggcgaccacgagcgacggggccagccgcggtccccaacgtcagaggatctcgttccagctgcggcagggcggccaacaccggcacctcatgggcgccgacgacgaagccgccgccgccatggaggcgcaagagagggaggcggagatcgagaaggccatgcgcgcccgcgtcgcagacttcaagaagcaggccgactccttgactcttgaaggcgttaggagagcactggaaaaggacctggatttgaagatatattcacttgatgcacataaaaagtttataaagcaatgtgtagacaaagtttttgctgaatctgctgatgaaaatgcaaatgatgatgcattagaggattctgatgctaaagatgatcatttatcaaaagaagggacagatgttgctaaaccaatgcctgtttcaaataaaatgtcctccaatgctgatgtcgtaacatccagcaagacaggaaaggatcctgaagaagaaaagaatcaaacttccagcagtgatattagtgaagacatgataaaagaagccattgaaaaaagggcatcttattttagaaagaactctgatactcttactttacaaggagttcggcgtactttggaagaagatctcaagcttcagaagaaagctttagatgcctataagaattttattactacaggattagacaagattttgcaagaacctgcaaatgggacaaagaaaaaaagtaaaaatggatcttccaaggatactgacaaaacaagtaaaggctctaaaagagtccatgaagaatcagatagctctgaattaaatgatagaaagagtgatatggataatagcgacgtggattcaaggccaagaaagaaaagggcagaaaaggctaaagtcaccaaaaaacagaaaatagttacaaatgagaggaaactgtcaactccaaaggctaaaaaggttgcaaaacaagatttgggtagcagtactgaagaacagggtggcaattcagcagaagaggataattctcattcatccgctgaggaagataataagagaaaacggcaacagactccagcttatgggaaacaagcagagcatctgaaatcgataatcaagtcttgtggaatgactattccacctactgtgtatcggagagtcaagcaagctgctgagaacaagcgtgaggcctgtttgataaaggagttacaggatatacttgaaaaggaaggattgtcaaaaaatccttctgaaaaagaaattaaagcagtgaagaagagaaaagaaagagcaaaggaacttgagggcatagacatgagtaatattattactagttcgcgtcggagaagtacatcaagtttcatacccctgccaccaccgccgcaaatagaagtggatagtgatgatgatgaagacgatgacgatgatgcagaaggcaatgatgcagaaggcgatgatgatgatgcagaaggcgatgatgaagacgatgcagaaggcgatgatgatgatgcggaaggcgatgatgcagaagacgatgatgaagttgatgaggagaatgtcaaaggtcgagatgaaggtgataatgatactgccgaagctgccaacggttctgctgatgggaaaaagcacgtcatccctgacttagctttt

SEQ ID NO: 23234 - DNA, 3226 bp, Zea Mays
ctcacgccttctcggggatgggaaagggctcctccttctgcaagacaaagatgagcactgtaaggataaaattaggatcatcacaacaatagacaaggaattaccattatctcttgaagccctaaaacatgggcaaaagcagttaccttagacactgttacaggggtagagcattccacagcaatacagcacagagtaaaatctttgtagattccatgcgttttacgaaaacaactcttgttagtctgtataggcaggtaatgcaaaacatggcataactatatctaagcttcatctgctgatatattccatgctgcatcgaagcatttttattttaattctgtaatgcaaaagcatccaaatcattttccccttggaaatcagaaatcatggtgttatgaaatttgacgttcataatcatatttaattcaagtatgatatggcacaatatactaccacactatccacctctaacagtcacaaaccaagctatagtacaaaattcgaatgaaggcgatcagcatcgcctcaaattttttacagtacaaaccccaaaaaaataaaacgaagactcgccagatttctgtggcgtgtgtcgggagatgtggtcacctatacgaggggcgatagggggacctgctacggctagggcttcggtccctacggcccctccggccgcggtaccgctcgggtgatggcgaccgccgacgccggcgcggcggagacagcgaccgcgacaggtcgcgttgcatcgtgcgcgacgcgatctagagcctcagcggagccggatctggacgaaaccagacgatcggagccttcggagaggggcggagtctggcttgctggctggaaagcgggaggacgcaggccaggtcaggtagagtcgcccgccgccgcacgcgggggccgatgaggtgggggatgctcgcagcccgcggaatctatctgtgggaagttgtaattaacctccaaggctacgcccaggtatacaaggtgggcgctggggagaagcaaaagcaatcgggccaccaatcccacagcgtgatatgaccgcccggtccagctcagcccaggcccatgtgagtcgtccgacccggatgagtccagatccagacccaacgtgaccgcgagtccctcaagatcacacagtaccggcaggcggcagcaattggagtgtttacgccgagacttgaaaacggcatcagtagcaaacggaggcgaccacgagcgacggggccagccgcggtccccaacgtcagaggatctcgttccagctgcggcagggcggccaacaccggcacctcatgggcgccgacgacgaagccgccgccgccatggaggcgcaagagagggaggcggagatcgagaaggccatgcgcgcccgcgtcgcagacttcaagaagcaggccgactccttgactcttgaaggcgttaggagagcactggaaaaggacctggatttgaagatatattcacttgatgcacataaaaagtttataaagcaatgtgtagacaaagtttttgctgaatctgctgatgaaaatgcaaatgatgatgcattagaggattctgatgctaaagatgatcatttatcaaaagaagggacagatgttgctaaaccaatgcctgtttcaaataaaatgtcctccaatgctgatgtcgtaacatccagcaagacaggaaaggatcctgaagaagaaaagaatcaaacttccagcagtgatattagtgaagacatgataaaagaagccattgaaaaaagggcatcttattttagaaagaactctgatactcttactttacaaggagttcggcgtactttggaagaagatctcaagcttcagaagaaagctttagatgcctataagaattttattactacaggattagacaagattttgcaagaacctgcaaatgggacaaagaaaaaaagtaaaaatggatcttccaaggatactgacaaaacaagtaaaggctctaaaagagtccatgaagaatcagatagctctgaattaaatgatagaaagagtgatatggataatagcgacgtggattcaaggccaagaaagaaaagggcagaaaaggctaaagtcaccaaaaaacagaaaatagttacaaatgagaggaaactgtcaactccaaaggctaaaaaggttgcaaaacaagatttgggtagcagtactgaagaacagggtggcaattcagcagaagaggataattctcattcatccgctgaggaagataataagagaaaacggcaacagactccagcttatgggaaacaagcagagcatctgaaatcgataatcaagtcttgtggaatgactattccacctactgtgtatcggagagtcaagcaagctgctgagaacaagcgtgaggcctgtttgataaaggagttacaggatatacttgaaaaggaaggattgtcaaaaaatccttctgaaaaagaaattaaagcagtgaagaagagaaaagaaagagcaaaggaacttgagggcatagacatgagtaatattattactagttcgcgtcggagaagtacatcaagtttcatacccctgccaccaccgccgcaaatagaagtggatagtgatgatgatgaagacgatgacgatgatgcagaaggcaatgatgcagaaggcgatgatgatgatgcggaaggcgatgatgcagaagacgatgatgaagttgatgaggagaatgtcaaaggtcgagatgaaggtgataatgatactgccgaagctgccaacggttctgctgatgatgctgaaaaggagaacaattgattccggccccagaataggttcagcttcatgttggcttcggcaagttggcctcgttcgtggatgtctggatgtagccagttgctcaggagttctcttctgacgtttatttatgtgtgcgtgatgggaacatttgttggcttcagctttgggtgaaacatgaggaacatattgtccttgtagtgatgtgcaatgtcacattcgtcctcttagcatcttgttcgcgattgtgtagattacaacaacagtcgcaaaacatataagttagcagtaatcaagtactgattggtttattagtttctgatatagtataaacctcgtaggtgaaagattggaattactatgcgcttcatgcttttgccttgttttttcttaggtagtgtttattttccgtggcatggtggcatctggggttttttgcagttctgattggcgttgtg

SEQ ID NO: 23235 - DNA, 3322 bp, Zea Mays
cacgccttctcggggatgggaaagggctcctccttctgcaagacaaagatgagcactgtaaggataaaattaggatcatcacaacaatagacaaggaattaccattatctcttgaagccctaaaacatgggcaaaagcagttaccttagacactgttacaggggtagagcattccacagcaatacagcacagagtaaaatctttgtagattccatgcgttttacgaaaacaactcttgttagtctgtataggcaggtaatgcaaaacatggcataactatatctaagcttcatctgctgatatattccatgctgcatcgaagcatttttattttaattctgtaatgcaaaagcatccaaatcattttccccttggaaatcagaaatcatggtgttatgaaatttgacgttcataatcatatttaattcaagtatgatatggcacaatatactaccacactatccacctctaacagtcacaaaccaagctatagtacaaaattcgaatgaaggcgatcagcatcgcctcaaattttttacagtacaaaccccaaaaaaataaaacgaagactcgccagatttctgtggcgtgtgtcgggagatgtggtcacctatacgaggggcgatagggggacctgctacggctagggcttcggtccctacggcccctccggccgcggtaccgctcgggtgatggcgaccgccgacgccggcgcggcggagacagcgaccgcgacaggtcgcgttgcatcgtgcgcgacgcgatctagagcctcagcggagccggatctggacgaaaccagacgatcggagccttcggagaggggcggagtctggcttgctggctggaaagcgggaggacgcaggccaggtcaggtagagtcgcccgccgccgcacgcgggggccgatgaggtgggggatgctcgcagcccgcggaatctatctgtgggaagttgtaattaacctccaaggctacgcccaggtatacaaggtgggcgctggggagaagcaaaagcaatcgggccaccaatcccacagcgtgatatgaccgcccggtccagctcagcccaggcccatgtgagtcgtccgacccggatgagtccagatccagacccaacgtgaccgcgagtccctcaagatcacacagtaccggcaggcggcagcaattggagtgtttacgccgagacttgaaaacggcatcagtagcaaacggaggcgaccacgagcgacggggccagccgcggtccccaacgtcagaggatctcgttccagctgcggcagggcggccaacaccggcacctcatgggcgccgacgacgaagccgccgccgccatggaggcgcaagagagggaggcggagatcgagaaggccatgcgcgcccgcgtcgcagacttcaagaagcaggccgactccttgactcttgaaggcgttaggagagcactggaaaaggacctggatttgaagatatattcacttgatgcacataaaaagtttataaagcaatgtgtagacaaagtttttgctgaatctgctgatgaaaatgcaaatgatgatgcattagaggattctgatgctaaagatgatcatttatcaaaagaagggacagatgttgctaaaccaatgcctgtttcaaataaaatgtcctccaatgctgatgtcgtaacatccagcaagacaggaaaggatcctgaagaagaaaagaatcaaacttccagcagtgatattagtgaagacatgataaaagaagccattgaaaaaagggcatcttattttagaaagaactctgatactcttactttacaaggagttcggcgtactttggaagaagatctcaagcttcagaagaaagctttagatgcctataagaattttattactacaggattagacaagattttgcaagaacctgcaaatgggacaaagaaaaaaagtaaaaatggatcttccaaggatactgacaaaacaagtaaaggctctaaaagagtccatgaagaatcagatagctctgaattaaatgatagaaagagtgatatggataatagcgacgtggattcaaggccaagaaagaaaagggcagaaaaggctaaagtcaccaaaaaacagaaaatagttacaaatgagaggaaactgtcaactccaaaggctaaaaaggttgcaaaacaagatttgggtagcagtactgaagaacagggtggcaattcagcagaagaggataattctcattcatccgctgaggaagataataagagaaaacggcaacagactccagcttatgggaaacaagcagagcatctgaaatcgataatcaagtcttgtggaatgactattccacctactgtgtatcggagagtcaagcaagctgctgagaacaagcgtgaggcctgtttgataaaggagttacaggatatacttgaaaaggaaggattgtcaaaaaatccttctgaaaaaggaacctttatcatggtctcaaacttttgatactacataaggtgattctgtaagaaattaaagcagtgaagaagagaaaagaaagagcaaaggaacttgagggcatagacatgagtaatattattactagttcgcgtcggagaagtacatcaagtttcatacccctgccaccaccgccgcaaatagaagtggatagtgatgatgatgaagacgatgacgatgatgcagaaggcaatgatgcagaaggcgatgatgatgatgcagaaggcgatgatgaagacgatgcagaaggcgatgatgatgatgcggaaggcgatgatgcagaagacgatgatgaagttgatgaggagaatgtcaaaggtcgagatgaaggtgataatgatactgccgaagctgccaacggttctgctgatgatgctgaaaaggagaacaattgattccggccccagaataggttcagcttcatgttggcttcggcaagttggcctcgttcgtggatgtctggatgtagccagttgctcaggagttctcttctgacgtttatttatgtgtgcgtgatgggaacatttgttggcttcagctttgggtgaaacatgaggaacatattgtccttgtagtgatgtgcaatgtcacattcgtcctcttagcatcttgttcgcgattgtgtagattacaacaacagtcgcaaaacatataagttagcagtaatcaagtactgattggtttattagtttctgatatagtataaacctcgtaggtgaaagattggaattactatgcgcttcatgcttttgccttgttttttcttaggtagtgtttattttccgtggcatggtggcatctggggttttttgcagttctgattggcgttgtg

SEQ ID NO: 23236 - DNA, 3199 bp, Zea Mays
ttaggatcatcacaacaatagacaaggaattaccattatctcttgaagccctaaaacatgggcaaaagcagttaccttagacactgttacaggggtagagcattccacagcaatacagcacagagtaaaatctttgtagattccatgcgttttacgaaaacaactcttgttagtctgtataggcaggtaatgcaaaacatggcataactatatctaagcttcatctgctgatatattccatgctgcatcgaagcatttttattttaattctgtaatgcaaaagcatccaaatcattttccccttggaaatcagaaatcatggtgttatgaaatttgacgttcataatcatatttaattcaagtatgatatggcacaatatactaccacactatccacctctaacagtcacaaaccaagctatagtacaaaattcgaatgaaggcgatcagcatcgcctcaaattttttacagtacaaaccccaaaaaaataaaacgaagactcgccagatttctgtggcgtgtgtcgggagatgtggtcacctatacgaggggcgatagggggacctgctacggctagggcttcggtccctacggcccctccggccgcggtaccgctcgggtgatggcgaccgccgacgccggcgcggcggagacagcgaccgcgacaggtcgcgttgcatcgtgcgcgacgcgatctagagcctcagcggagccggatctggacgaaaccagacgatcggagccttcggagaggggcggagtctggcttgctggctggaaagcgggaggacgcaggccaggtcaggtagagtcgcccgccgccgcacgcgggggccgatgaggtgggggatgctcgcagcccgcggaatctatctgtgggaagttgtaattaacctccaaggctacgcccaggtatacaaggtgggcgctggggagaagcaaaagcaatcgggccaccaatcccacagcgtgatatgaccgcccggtccagctcagcccaggcccatgtgagtcgtccgacccggatgagtccagatccagacccaacgtgaccgcgagtccctcaagatcacacagtaccggcaggcggcagcaattggagtgtttacgccgagacttgaaaacggcatcagtagcaaacggaggcgaccacgagcgacggggccagccgcggtccccaacgtcagaggatctcgttccagctgcggcagggcggccaacaccggcacctcatgggcgccgacgacgaagccgccgccgccatggaggcgcaagagagggaggcggagatcgagaaggccatgcgcgcccgcgtcgcagacttcaagaagcaggccgactccttgactcttgaaggcgttaggagagcactggaaaaggacctggatttgaagatatattcacttgatgcacataaaaagtttataaagcaatgtgtagacaaagtttttgctgaatctgctgatgaaaatgcaaatgatgatgcattagaggattctgatgctaaagatgatcatttatcaaaagaagggacagatgttgctaaaccaatgcctgtttcaaataaaatgtcctccaatgctgatgtcgtaacatccagcaagacaggaaaggatcctgaagaagaaaagaatcaaacttccagcagtgatattagtgaagacatgataaaagaagccattgaaaaaagggcatcttattttagaaagaactctgatactcttactttacaaggagttcggcgtactttggaagaagatctcaagcttcagaagaaagctttagatgcctataagaattttattactacaggattagacaagattttgcaagaacctgcaaatgggacaaagaaaaaaagtaaaaatggatcttccaaggatactgacaaaacaagtaaaggctctaaaagagtccatgaagaatcagatagctctgaattaaatgatagaaagagtgatatggataatagcgacgtggattcaaggccaagaaagaaaagggcagaaaaggctaaagtcaccaaaaaacagaaaatagttacaaatgagaggaaactgtcaactccaaaggctaaaaaggttgcaaaacaagatttgggtagcagtactgaagaacagggtggcaattcagcagaagaggataattctcattcatccgctgaggaagataataagagaaaacggcaacagactccagcttatgggaaacaagcagagcatctgaaatcgataatcaagtcttgtggaatgactattccacctactgtgtatcggagagtcaagcaagctgctgagaacaagcgtgaggcctgtttgataaaggagttacaggatatacttgaaaaggaaggattgtcaaaaaatccttctgaaaaagaattaaagcagtgaagaagagaaaagaaagagcaaaggaacttgagggcatagacatgagtaatattattactagttcgcgtcggagaagtacatcaagtttcatacccctgccaccaccgccgcaaatagaagtggatagtgatgatgatgaagacgatgacgatgatgcagaaggcaatgatgcagaaggcgatgatgatgatgcagaaggcgatgatgaagacgatgcagaaggcgatgatgatgatgcggaaggcgatgatgcagaagacgatgatgaagttgatgaggagaatgtcaaaggtcgagatgaaggtgataatgatactgccgaagctgccaacggttctgctgatgatgctgaaaaggagaacaattgattccggccccagaataggttcagcttcatgttggcttcggcaagttggcctcgttcgtggatgtctggatgtagccagttgctcaggagttctcttctgacgtttatttatgtgtgcgtgatgggaacatttgttggcttcagctttgggtgaaacatgaggaacatattgtccttgtagtgatgtgcaatgtcacattcgtcctcttagcatcttgttcgcgattgtgtagattacaacaacagtcgcaaaacatataagttagcagtaatcaagtactgattggtttattagtttctgatatagtataaacctcgtaggtgaaagattggaattactatgcgcttcatgcttttgccttgttttttcttaggtagtgtttattttccgtggcatggtggcatctggggttttttgcagttctgattggcgttgtg

SEQ ID NO: 23237 - DNA, 1468 bp, Zea Mays
agaacttatcctgtttcccagtagaacctccttgactcttgaaggcgttaggagagcactggaaaaggacctggatttgaagatatattcacttgatgcacataaaaagtttataaagcaatgtgtagacaaagtttttgctgaatctgctgatgaaaatgcaaatgatgatgcattagaggattctgatgctaaagatgatcatttatcaaaagaagggacagatgttgctaaaccaatgcctgtttcaaataaaatgtcctccaatgctgatgtcgtaacatccagcaagacaggaaaggatcctgaagaagaaaagaatcaaacttccagcagtgatattagtgaagacatgataaaagaagccattgaaaaaagggcatcttattttagaaagaactctgatactcttactttacaaggagttcggcgtactttggaagaagatctcaagcttcagaagaaagctttagatgcctataagaattttattactacaggattagacaagattttgcaagaacctgcaaatgggacaaagaaaaaaagtaaaaatggatcttccaaggatactgacaaaacaagtaaaggctctaaaagagtccatgaagaatcagatagctctgaattaaatgatagaaagagtgatatggataatagcgacgtggattcaaggccaagaaagaaaagggcagaaaaggctaaagtcaccaaaaaacagaaaatagttacaaatgagaggaaactgtcaactccaaaggctaaaaaggttgcaaaacaagatttgggtagcagtactgaagaacagggtggcaattcagcagaagaggataattctcattcatccgctgaggaagataataagagaaaacggcaacagactccagcttatgggaaacaagcagagcatctgaaatcgataatcaagtcttgtggaatgactattccacctactgtgtatcggagagtcaagcaagctgctgagaacaagcgtgaggcctgtttgataaaggagttacaggatatacttgaaaaggaaggattgtcaaaaaatccttctgaaaaagaaattaaagcagtgaagaagagaaaagaaagagcaaaggaacttgagggcatagacatgagtaatattattactagttcgcgtcggagaagtacatcaagtttcatacccctgccaccaccgccgcaaatagaagtggatagtgatgatgatgaagacgatgacgatgatgcagaaggcaatgatgcagaaggcgatgatgatgatgcagaaggcgatgatgaagacgatgcagaaggcgatgatgatgatgcggaaggcgatgatgcagaagacgatgatgaagttgatgaggagaatgtcaaaggtcgagatgaaggtgataatgatactgccgaagctgccaacggttctgctgatgggaacctcaccagcattgcaagggaagtgggcacaagtgca

SEQ ID NO: 23238 - DNA, 1887 bp, Zea Mays
agaacttatcctgtttcccagtagaacctccttgactcttgaaggcgttaggagagcactggaaaaggacctggatttgaagatatattcacttgatgcacataaaaagtttataaagcaatgtgtagacaaagtttttgctgaatctgctgatgaaaatgcaaatgatgatgcattagaggattctgatgctaaagatgatcatttatcaaaagaagggacagatgttgctaaaccaatgcctgtttcaaataaaatgtcctccaatgctgatgtcgtaacatccagcaagacaggaaaggatcctgaagaagaaaagaatcaaacttccagcagtgatattagtgaagacatgataaaagaagccattgaaaaaagggcatcttattttagaaagaactctgatactcttactttacaaggagttcggcgtactttggaagaagatctcaagcttcagaagaaagctttagatgcctataagaattttattactacaggattagacaagattttgcaagaacctgcaaatgggacaaagaaaaaaagtaaaaatggatcttccaaggatactgacaaaacaagtaaaggctctaaaagagtccatgaagaatcagatagctctgaattaaatgatagaaagagtgatatggataatagcgacgtggattcaaggccaagaaagaaaagggcagaaaaggctaaagtcaccaaaaaacagaaaatagttacaaatgagaggaaactgtcaactccaaaggctaaaaaggttgcaaaacaagatttgggtagcagtactgaagaacagggtggcaattcagcagaagaggataattctcattcatccgctgaggaagataataagagaaaacggcaacagactccagcttatgggaaacaagcagagcatctgaaatcgataatcaagtcttgtggaatgactattccacctactgtgtatcggagagtcaagcaagctgctgagaacaagcgtgaggcctgtttgataaaggagttacaggatatacttgaaaaggaaggattgtcaaaaaatccttctgaaaaagaaattaaagcagtgaagaagagaaaagaaagagcaaaggaacttgagggcatagacatgagtaatattattactagttcgcgtcggagaagtacatcaagtttcatacccctgccaccaccgccgcaaatagaagtggatagtgatgatgatgaagacgatgacgatgatgcagaaggcaatgatgcagaaggcgatgatgatgatgcagaaggcgatgatgaagacgatgcagaaggcgatgatgatgatgcggaaggcgatgatgcagaagacgatgatgaagttgatgaggagaatgtcaaaggtcgagatgaaggtgataatgatactgccgaagctgccaacggttctgctgatgatgctgaaaaggagaacaattgattccggccccagaataggttcagcttcatgttggcttcggcaagttggcctcgttcgtggatgtctggatgtagccagttgctcaggagttctcttctgacgtttatttatgtgtgcgtgatgggaacatttgttggcttcagctttgggtgaaacatgaggaacatattgtccttgtagtgatgtgcaatgtcacattcgtcctcttagcatcttgttcgcgattgtgtagattacaacaacagtcgcaaaacatataagttagcagtaatcaagtactgattggtttattagtttctgatatagtataaacctcgtaggtgaaagattggaattactatgcgcttcatgcttttgccttgttttttcttaggtagtgtttattttccgtggcatggtggcatctggggttttttgcagttctgattggcgttgtg

SEQ ID NO: 23239 - DNA, 1046 bp, Zea Mays
ataggatggtgctcactgctcagacattatgttctgcacagtaaattcaaaatattataccaggtttttgctgaatctgctgatgaaaatgcaaatgatgatgcattagaggattctgatgctaaagatgatcatttatcaaaagaagggacagatgttgctaaaccaatgcctgtttcaaataaaatgtcctccaatgctgatgtcgtaacatccagcaagacaggaaaggatcctgaagaagaaaagaatcaaacttccagcagtgatattagtgaagacatgataaaagaagccattgaaaaaagggcatcttattttagaaagaactctgatactcttactttacaaggagttcggcgtactttggaagaagatctcaagcttcagaagaaagctttagatgcctataagaattttattactacaggattagacaagattttgcaagaacctgcaaatgggacaaagaaaaaaagtaaaaatggatcttccaaggatactgacaaaacaagtaaaggctctaaaagagtccatgaagaatcagatagctctgaattaaatgatagaaagagtgatatggataatagcgacgtggattcaaggccaagaaagaaaagggcagaaaaggctaaagtcaccaaaaaacagaaaatagttacaaatgagaggaaactgtcaactccaaaggctaaaaaggttgcaaaacaagatttgggtagcagtactgaagaacagggtggcaattcagcagaagaggataattctcattcatccgctgaggaagataataagagaaaacggcaacagactccagcttatgggaaacaagcagagcatctgaaatcgataatcaagtcttgtggaatgactattccacctactgtgtatcggagagtcaagcaagctgctgagaacaagcgtgaggcctgtttgataaaggagttacaggatatacttgaaaaggaaggattgtcaaaaaatccttctgaaaaagccaatgctaccaagtcaccacctccaacaatgagcagctcggaccttag

SEQ ID NO: 23240 - DNA, 1803 bp, Zea Mays
ggatggtgctcactgctcagacattatgttctgcacagtaaattcaaaagtttttgctgaatctgctgatgaaaatgcaaatgatgatgcattagaggattctgatgctaaagatgatcatttatcaaaagaagggacagatgttgctaaaccaatgcctgtttcaaataaaatgtcctccaatgctgatgtcgtaacatccagcaagacaggaaaggatcctgaagaagaaaagaatcaaacttccagcagtgatattagtgaagacatgataaaagaagccattgaaaaaagggcatcttattttagaaagaactctgatactcttactttacaaggagttcggcgtactttggaagaagatctcaagcttcagaagaaagctttagatgcctataagaattttattactacaggattagacaagattttgcaagaacctgcaaatgggacaaagaaaaaaagtaaaaatggatcttccaaggatactgacaaaacaagtaaaggctctaaaagagtccatgaagaatcagatagctctgaattaaatgatagaaagagtgatatggataatagcgacgtggattcaaggccaagaaagaaaagggcagaaaaggctaaagtcaccaaaaaacagaaaatagttacaaatgagaggaaactgtcaactccaaaggctaaaaaggttgcaaaacaagatttgggtagcagtactgaagaacagggtggcaattcagcagaagaggataattctcattcatccgctgaggaagataataagagaaaacggcaacagactccagcttatgggaaacaagcagagcatctgaaatcgataatcaagtcttgtggaatgactattccacctactgtgtatcggagagtcaagcaagctgctgagaacaagcgtgaggcctgtttgataaaggagttacaggatatacttgaaaaggaaggattgtcaaaaaatccttctgaaaaagaaattaaagcagtgaagaagagaaaagaaagagcaaaggaacttgagggcatagacatgagtaatattattactagttcgcgtcggagaagtacatcaagtttcatacccctgccaccaccgccgcaaatagaagtggatagtgatgatgatgaagacgatgacgatgatgcagaaggcaatgatgcagaaggcgatgatgatgatgcagaaggcgatgatgaagacgatgcagaaggcgatgatgatgatgcggaaggcgatgatgcagaagacgatgatgaagttgatgaggagaatgtcaaaggtcgagatgaaggtgataatgatactgccgaagctgccaacggttctgctgatgatgctgaaaaggagaacaattgattccggccccagaataggttcagcttcatgttggcttcggcaagttggcctcgttcgtggatgtctggatgtagccagttgctcaggagttctcttctgacgtttatttatgtgtgcgtgatgggaacatttgttggcttcagctttgggtgaaacatgaggaacatattgtccttgtagtgatgtgcaatgtcacattcgtcctcttagcatcttgttcgcgattgtgtagattacaacaacagtcgcaaaacatataagttagcagtaatcaagtactgattggtttattagtttctgatatagtataaacctcgtaggtgaaagattggaattactatgcgcttcatgcttttgccttgttttttcttaggtagtgtttattttccgtggcatggtggcatctggggttttttgcagttctgattggcgttgtg

SEQ ID NO: 23241 - DNA, 1460 bp, Zea Mays
gcgggcggatgacgtcgcggtggggcgctgctgcgcgcttgctctcctgccttgtgcgtgcgttggaacgtggaagaataacgacaacgcctaataacgagaaaagaaaacccaagacttcgtcgtcaccaaaaaaataaagcagaaaaaaacagagagtagtagactacgacagcgtccgtcgaaccggagggtcggaggcggaggcgaagatgaggaagaagctcggcacccggttccccgcgggtctacgtctatcgagagttcggattctcgttgctcaacagaggacatcgacaattaattatccggcttctgcactcgtgttgtgttgagcgggtggacggtggagagatttgtggccgctcgcggctgactagatcactgctgatgaaatttggctcgaatcaaaaagataatgcaagcagatgaggatgttggaaagattgcattagcagtgcctgttttagtctcgagggctcttgaattgtttttacaagatttaattgaccggacttatgaaattactcttcaaagtggagcaaagacactgaattccttccacctgaagcaatgtgtgaagaggtacagttcttttgatttcctaactgaagttgtcagcaaggtaccagatcttggtggtgctgattcatgtggagatgaaagagtgttacctagaagaagaaagtcaaatggcagtgacccagagaatgatgaatcaagatctagtaaaatggctataagaaatgcaaataccagccccagaggacgtgggaggggtcgaggcagagggcgaggtcggccaccaaccaagagaaaggaagttggttacgtacaatttgaagatgagagcagcatgtttgctgaacaaggtgaaaccttaccaggagagggaacagttccagagatcaacagcggcaacgagattacgcctcaaagcacgcaacctccgctaacagcccctgcgcaagctacaaattctaaggtggaagaagcaagcaccgatcatcagtcagattggcctatgccagatgccactggaaacatcggtgttgggccatctggttttggacatctgacagtgcaggttgatgaagatgaggactacgacaatgaggactagtcagggccatcctctcactgtatgcgctaacaggactgttctggtgttgtaaaatgtaaatatagcttgaagtagctgccgcagcttagctatgattgtctgttatgaggttatgtagttgccctgtgtaacttctgtaattgctttttagttgccttttctctacatgattgactgtcaaagcgttttgtcatatttaacccagtatgtttgagcaggggtcgactatttctaagtattttgactttattcgactagtatttgagcagtcatctgatgctccgcaggtttttgttgacttgtggtgcagtcagctgctagtatgaaaattggtagg

SEQ ID NO: 23242 - DNA, 2289 bp, Zea Mays
gcgggcggatgacgtcgcggtggggcgctgctgcgcgcttgctctcctgccttgtgcgtgcgttggaacgtggaagaataacgacaacgcctaataacgagaaaagaaaacccaagacttcgtcgtcaccaaaaaaataaagcagaaaaaaacagagagtagtagactacgacagcgtccgtcgaaccggagggtcggaggcggaggcgaagatgaggaagaagctcggcacccggttccccgcgatcctcgctcttccgggcgggatccggtggacgcagcccgccgttaacgcgcggcttctctttttggttccgtgggcggggatttggctgggttcttggtggggggcgccgtgggtggaggcgggctcgggctcagatcggctcctgtgctcgcgcgtgcgcggggaagtaatttcgtttcgttttgttttgttttcattctttccttccacttttttgagggtctacgtctatcgagagttcggattctcgttgctcaacagaggacatcgacaattaattatccggcttctgcactcgtgttgtgttgagcgggtggacggtggagagatttgtggccgctcgcggctgactagatcactgctgatgaaatttggtgagtgttagtccgtgtgaacgggacgccctgatgtgatctctatgccctgttgtgtagatgcaagggatgaggtagatcctgctgccgtgcatgtggtttggttgcaagatctccagatcttgcgagcatgtattgcgggccccatgtatttctggggatactcaacatgtgatctggtgcaggagtactttagcagtagaatttgtgtgagtccctcatcatgggggtttttattatggtctggtaggtgtactggagtggagtttgaaaccacagtaacttccattgttatgttggtctacatatgtgtttggtgatggaactatttgttggagtctgatgttgtagtgctgtaggttctggtgttttcccttggttggagttccaaggtgcgaaaggtgttctggtttagttctgccaccatgctttattagtttattgttacaaggactcctgaacatgccagcatttctttcttgagatcctaattttttttctggatttcagcatttattgtattccttcaggctggttttgaatcttcaaaacctcttgttctgttgtcatggaaacaacgtggttgaagttccaagctacacacatctgctcgaatcaaaaagataatgcaagcagatgaggatgttggaaagattgcattagcagtgcctgttttagtctcgagggctcttgaattgtttttacaagatttaattgaccggacttatgaaattactcttcaaagtggagcaaagacactgaattccttccacctgaagcaatgtgtgaagaggtacagttcttttgatttcctaactgaagttgtcagcaaggtaccagatcttggtggtgctgattcatgtggagatgaaagagtgttacctagaagaagaaagtcaaatggcagtgacccagagaatgatgaatcaagatctagtaaaatggctataagaaatgcaaataccagccccagaggacgtgggaggggtcgaggcagagggcgaggtcggccaccaaccaagagaaaggaagttggttacgtacaatttgaagatgagagcagcatgtttgctgaacaaggtgaaaccttaccaggagagggaacagttccagagatcaacagcggcaacgagattacgcctcaaagcacgcaacctccgctaacagcccctgcgcaagctacaaattctaaggtggaagaagcaagcaccgatcatcagtcagattggcctatgccagatgccactggaaacatcggtgttgggccatctggttttggacatctgacagtgcaggttgatgaagatgaggactacgacaatgaggactagtcagggccatcctctcactgtatgcgctaacaggactgttctggtgttgtaaaatgtaaatatagcttgaagtagctgccgcagcttagctatgattgtctgttatgaggttatgtagttgccctgtgtaacttctgtaattgctttttagttgccttttctctacatgattgactgtcaaagcgttttgtcatatttaacccagtatgtttgagcaggggtcgactatttctaagtattttgactttattcgactagtatttgagcagtcatctgatgctccgcaggtttttgttgacttgtggtgcagtcagctgctagtatgaaaattggtagg

SEQ ID NO: 23243 - DNA, 1126 bp, Zea Mays
cccatgtatttctggggatactcaacatgtgatctggtgcaggagtactttagcagtagaatttgtgctcgaatcaaaaagataatgcaagcagatgaggatgttggaaagattgcattagcagtgcctgttttagtctcgagggctcttgaattgtttttacaagatttaattgaccggacttatgaaattactcttcaaagtggagcaaagacactgaattccttccacctgaagcaatgtgtgaagaggtacagttcttttgatttcctaactgaagttgtcagcaaggtaccagatcttggtggtgctgattcatgtggagatgaaagagtgttacctagaagaagaaagtcaaatggcagtgacccagagaatgatgaatcaagatctagtaaaatggctataagaaatgcaaataccagccccagaggacgtgggaggggtcgaggcagagggcgaggtcggccaccaaccaagagaaaggaagttggttacgtacaatttgaagatgagagcagcatgtttgctgaacaaggtgaaaccttaccaggagagggaacagttccagagatcaacagcggcaacgagattacgcctcaaagcacgcaacctccgctaacagcccctgcgcaagctacaaattctaaggtggaagaagcaagcaccgatcatcagtcagattggcctatgccagatgccactggaaacatcggtgttgggccatctggttttggacatctgacagtgcaggttgatgaagatgaggactacgacaatgaggactagtcagggccatcctctcactgtatgcgctaacaggactgttctggtgttgtaaaatgtaaatatagcttgaagtagctgccgcagcttagctatgattgtctgttatgaggttatgtagttgccctgtgtaacttctgtaattgctttttagttgccttttctctacatgattgactgtcaaagcgttttgtcatatttaacccagtatgtttgagcaggggtcgactatttctaagtattttgactttattcgactagtatttgagcagtcatctgatgctccgcaggtttttgttgacttgtggtgcagtcagctgctagtatgaaaattggtagg

SEQ ID NO: 23244 - DNA, 1085 bp, Zea Mays
agctggaaagataatttctggataggctcgaatcaaaaagataatgcaagcagatgaggatgttggaaagattgcattagcagtgcctgttttagtctcgagggctcttgaattgtttttacaagatttaattgaccggacttatgaaattactcttcaaagtggagcaaagacactgaattccttccacctgaagcaatgtgtgaagaggtacagttcttttgatttcctaactgaagttgtcagcaaggtaccagatcttggtggtgctgattcatgtggagatgaaagagtgttacctagaagaagaaagtcaaatggcagtgacccagagaatgatgaatcaagatctagtaaaatggctataagaaatgcaaataccagccccagaggacgtgggaggggtcgaggcagagggcgaggtcggccaccaaccaagagaaaggaagttggttacgtacaatttgaagatgagagcagcatgtttgctgaacaaggtgaaaccttaccaggagagggaacagttccagagatcaacagcggcaacgagattacgcctcaaagcacgcaacctccgctaacagcccctgcgcaagctacaaattctaaggtggaagaagcaagcaccgatcatcagtcagattggcctatgccagatgccactggaaacatcggtgttgggccatctggttttggacatctgacagtgcaggttgatgaagatgaggactacgacaatgaggactagtcagggccatcctctcactgtatgcgctaacaggactgttctggtgttgtaaaatgtaaatatagcttgaagtagctgccgcagcttagctatgattgtctgttatgaggttatgtagttgccctgtgtaacttctgtaattgctttttagttgccttttctctacatgattgactgtcaaagcgttttgtcatatttaacccagtatgtttgagcaggggtcgactatttctaagtattttgactttattcgactagtatttgagcagtcatctgatgctccgcaggtttttgttgacttgtggtgcagtcagctgctagtatgaaaattggtagg

SEQ ID NO: 23245 - DNA, 1874 bp, Zea Mays
cgctgccactcccgtccttttcttaggcggttactgaccagcaggccccacgggctcggcccccctcctcccccgaggccccgagttcgctgcgcttccgccttccggtgacaagcgagtgaccgatctaccccgacccaccacccaccgcaccacgcgagccgcgagcgagatctctcggctccagggtaggctccctcctatggatctccgccgcctcgcggtgtttgcggccgccctcgccgccgggtggtggtcccgcggcgcggaggcgtcgatccacacctacgaccgggagcccttccgcgaggtttgtgaatgttacattttggagaaccccagaagctgcggaatcacacgcaaaaatggcacatagtacaggcttggtacaggctatcctatttgaagttgtggacagggataacatcgggggatctgcctatggcggacagaggtccatatgttgtaccccagatcttgctaaactagagggctgcaagcaaggggaagtaatcaggaggccatcctctgatgatccagattggcccttcgtgctagacacacacttcagtgctaatcacctttcagtgaagttagaagatgagccagtgcgcattacaaagacaggcatgtacaacttgttcttcatatcctgtgatccaaaactgagaggccttactatgagtggcaagactatctggaagaatcctggtgggtatctaccgggacgaatggcgcctttgatgaaattttatgttctcatgtcgctggcgtatctgttggtaatgattgtttggtttagccagtacgtaaggttctggagggatatattgccaatacagaattggatcactctaatcattgcacttggtctgtttgagatgacactatggtactttgagtacttgaacttcaacagcagtggtgtgaggccagttggaatcacaacttgggtggtcactgttggagctatcagaaaaacagtttcacgtctactcatcctttctatctcaatgggttatggtgttgttcgtccaactttgggaggtctcacttccaaggtgttgctactcggacttacatatttcctggcgtctgagttgctggacattgcagaaaatgttggaacaattaatgatatatcaggcaaagcaaggcttttcctggtccttcctgatgcatttttggatgcttttctcatactctggattttcacttctctttcccgcacactagagaagctacaggcaaggaggagttctgtgaaattggatatatacagaaagttcacaaatgcattggctgtttctgtgatagcttcagttgcctggattggttatgaggtctatttcaaagcgacagaccccttcagtgagaggtggcagagcgcatggatcataactgccttctgggatgtccttgcgtttgtgttgcttcttgtgatttgttatctgtgggcaccttcccaaagctcgcaaagatatgcatattctggtgaagctgctgacgatgacgatgaggaatctcaatctctgacgaaaggagatggtgaagtagggatggtaaaaattgacaaggacagaaatgctggtgtcagcagtgctttcggcttagaagatgaggctgaggaggacaagcgggaatagccatttcttgttcctgatgtcccctaggtcccagaaacaatcgatattttggagcagcaatattgcaagaatacttctttttcaagttacatgtggttgctgtagaagtgcttggtattgtaaacatgcgaactctatttaaaagaaaaggattaggaattctaatccaaaggcaaaaactaacgtgcaattaagctttacatacaaccgtgctgcaattaaactatc

SEQ ID NO: 23246 - DNA, 969 bp, Zea Mays
tcttaagtcaagtggctgctattgttcacaatgacttttaccatttgtcccaagaaattctgggccttgcatttcagtaccgtgcagattttcctagtgatctacagaaacaggttgtttttgtggatttagccccaatcttctcccagatggcggatgctatattgagaagacaaatacaactcactgttgatactataagctatagatggtgctgaaggttttcagaacacacaccaacctcagcattatgaatccgcaaaatttagtattgagcaggtctgttccactgttaaagagtatgagctttttgaaccctgaaaaatgatgttgactgcatacatagttacttcacatttagtatcgagcaggtctgttccattgttaaagagtatgggctttttgaaccttgaaaaatgatggggacttcattttgggaattactctaattgagacagccccttgcatatcagaaaactaattgaagttgggaagagcatctttaactgtcttcttgttcactagtcgattaggcaccatatcaagcactacaggagctaagtctttaatgcacctctcccccagccacctatccttccagaaaaggtattggtgccacctccaatctcagtgataaccgttacagccatcaacttctgaaccacatcatagacttgaattgggaaatcgacccatggtatgtttggattcgttttctgcaaccaaggccaccgagccctcaaaacccagctatggttccttaagtcaccatgagtgaccttagaccaagccaacagacaatggcctccttcttcctctccaaagaaaacccttcagcagcttatcaatcgctttgatggcctaaattttgaagtaaacatgtatgaagtccccatcatattgctatgatggagacttcgtacatgtacttcaaaatttagtctgcttgttcattgagctaattacttg

SEQ ID NO: 23247 - DNA, 2014 bp, Zea Mays
cacacctcgttcacgcagcaaacaccatttccacccaaccagaactcctcacgatcctctgcgccacccacaaccgtgcgaccgtccgtgctgccggcgaccccgatccgccgacccgtcccgtcccaccacaccctaccgccgctcgcagctatgtcgccgtcggagccgacgcgggaggagagcgtgtacatggccaagctggcagagcaggcggagcggtacgaggagatggtcgagttcatggagcgcgtcgcgcgctccgccggcggcgccggcggaggggaggagctatccgtggaggagcgcaacctgctgtccgtcgcctacaagaacgtcatcggcgcccgcagggcctcgtggcggatcatctcctccatcgagcagaaggaggagggccgcgggaacgaggcgcacgccgcctccatccgcgcctaccgctccaagatcgagaccgagctcgcccgcatctgcgatggcatcctcgccctgctcgactcccacctcgtcccatccgccggcggcgccgagtccaaggtcttctacctcaagatgaagggtgactaccacaggtaccttgctgagttcaagtctggtgcagagaggaaggatgctgcggagagcaccatgaatgcctacaaagctgctcaggacattgctcttgcagatctggctccaacccaccccatcaggcttggcctcgctctcaacttctcagtgttctactacgagatcctgaactcccctgatcgcgcctgcaaccttgcaaaacagattgtgtgtagcttctgggcaacggattgagtgtgcataaacagctcctgtctccatcagcttatgtaggggtttggttgattcaattaaaaaaagatggtgcaaaggaaatagttcacttgcctccgtctgcatgcctattcactgaaacaattttttcttacattaggcactgtgtaagtgatggatctaattactctgggtgctaacaaaatgcttcttttgctaccacccacggaggctgttgtttattttcactcaatctgtcacgtcttcttgcatacatgttctactacatattgaacattgacaagctacaacctaatgattacaagtcacctagagaattctcaatttcccttgtatgatggttgcactgtctaacttgtctgcaatccatgaagttggacatgacggtcttcatacagtacttgagatgacagatgcattccctatgcaacgaagccttcgatgaggcgatctctgagctagacagcctgggagaggagtcctacaaggacagcactctgatcatgcagctcctgcgcgacaacttgaccctatggacttccgacaccaacgaggatggcggcgacgagatcaaggatgctgctgccccgaaagaatccgcggagggtcagtaagatggattcagtctcacgacctgctgctgctgatgttgaggagtgaccagaaccagaaccgccgtcctcgattctgatagattatcttctagtataccttgtgttgttgctgttgttgtcgtcgtcgcgccggtgtatgcgatgaagctgccattgctgctgttttaattaagcattctagatgttataccgcatgctttgtttcggtttctatgtcgataaatggtggccggatgctggttttcgtgctccgagccggccaccaggaagaagacctgcctgcccttgtgggtgcagcgttgttagaatgacctacggtgtatttgactttgacaggcctgctgcctagtggactgatattctgttatgcgcaaagctatttggcttgatgtctcagaatattcttaatttgcgtcgtcttttaagtctatcacgatgacgcagaccacatttatttttcaacactgctatatggtgatgataccatctttcaaaaagctcattcaaagcgacgagaccatctatcatggagagtataaacaggctgttgttttagttttgtgctatggtaggtacgtactacacttgtttagaat

SEQ ID NO: 23248 - DNA, 524 bp, Zea Mays
  misc_feature (523)..(524): n is a, c, g, or t
agcacagcagcttatcacggccaaaaccgccaaaccctagttgtgcatgcatagcccctcacgccagccgccaacgccccaatcccgtaaccgcagcctcgccccgctcacatcttcctctccctctcagcgctggtgctcaatctataggtcgtcccactccctacacacccgccctccggtgtgaacctccatgacgtctgcaaccactcttcgatctgctgtcgtgacctcatccagccgtgctgtggcagtggatcggagttcgctccagctctgattggaattccactactatatgtgccacttgaagttgttatgtcaaaatattatggtgaaagcgagcgtctattgggatctattttttatcttgcaaatgatcttcctgaaagagattgatatgtcaagatacgcttgtttcacttgagctcactgttatctgaaaatctatagactgccttcgtccccttcatcactaccgatgaccgtgacttggccaccacagcaaaagcacgcaggatcnn

SEQ ID NO: 23249 - DNA, 830 bp, Zea Mays
  misc_feature (829)..(830): n is a, c, g, or t
agcacagcagcttatcacggccaaaaccgccaaaccctagttgtgcatgcatagcccctcacgccagccgccaacgccccaatcccgtaaccgcagcctcgccccgctcacatcttcctctccctctcagcgctggtgctcaatctataggtcgtcccactccctacacacccgccctccggtgtgaacctccatgacgtctgcaaccactcttcgatctgctgtcgtgacctcatccagccgtgctgtggcagtggatcggagttcgctccagctctgattggcatgtgcaacgaaagttacaagaatggtagaattcttccatgacttctgtatggtagtgctcctagatggtatgctgtaaattagatattaccttgcatcctccacatcttcacacatatatatggtgtttataggggggaaatgactagggtatcaagtggaaaaacataatggtccaggttctactgcacctctttcaggctaagcatctaaacaacaatatgtaaattatccttttccaataaaatacatgcttaaaccgtggctgctaggcaaatggtcctactttggtcatcaaatgcaggaattccactactatatgtgccacttgaagttgttatgtcaaaatattatggtgaaagcgagcgtctattgggatctattttttatcttgcaaatgatcttcctgaaagagattgatatgtcaagatacgcttgtttcacttgagctcactgttatctgaaaatctatagactgccttcgtccccttcatcactaccgatgaccgtgacttggccaccacagcaaaagcacgcaggatcnn

SEQ ID NO: 23250 - DNA, 566 bp, Zea Mays
  misc_feature (565)..(566): n is a, c, g, or t
cctagttgtgcatgcatagcccctcacgccagccgccaacgccccaatcccgtaaccgcagcctcgccccgctcacatcttcctctccctctcagcgctggtgctcaatctataggtcgtcccactccctacacacccgccctccggtgtgaacctccatgacgtctgcaaccactcttcgatctgctgtcgtgacctcatccagccgtgctgtggcagtggatcggagttcgctccagctctgattggggggaaatgactagggtatcaagtggaaaaacataatggtccaggcaaatggtcctactttggtcatcaaatgcaggaattccactactatatgtgccacttgaagttgttatgtcaaaatattatggtgaaagcgagcgtctattgggatctattttttatcttgcaaatgatcttcctgaaagagattgatatgtcaagatacgcttgtttcacttgagctcactgttatctgaaaatctatagactgccttcgtccccttcatcactaccgatgaccgtgacttggccaccacagcaaaagcacgcaggatcnn

SEQ ID NO: 23251 - DNA, 675 bp, Zea Mays
  misc_feature (674)..(675): n is a, c, g, or t
tagcccctcacgccagccgccaacgccccaatcccgtaaccgcagcctcgccccgctcacatcttcctctccctctcagcgctggtgctcaatctataggtcgtcccactccctacacacccgccctccggtgtgaacctccatgacgtctgcaaccactcttcgatctgctgtcgtgacctcatccagccgtgctgtggcagtggatcggagttcgctccagctctgattggcatgtgcaacgaaagttacaagaatggtagaattcttccatgacttctgtatggtagtgctcctagatggtatgctgtaaattagatattaccttgcatcctccacatcttcacacatatatatggtgtttataggggggaaatgactagggtatcaagtggaaaaacataatggtccaggttctactgcacctctttcaggaattccactactatatgtgccacttgaagttgttatgtcaaaatattatggtgaaagcgagcgtctattgggatctattttttatcttgcaaatgatcttcctgaaagagattgatatgtcaagatacgcttgtttcacttgagctcactgttatctgaaaatctatagactgccttcgtccccttcatcactaccgatgaccgtgacttggccaccacagcaaaagcacgcaggatcnn

SEQ ID NO: 23252 - DNA, 264 bp, Zea Mays
cctcacgccagccgccaacgccccaatcccgtaaccgcagcctcgccccgctcacatcttcctctccctctcagcgctggtgctcaatctataggtcgtcccactccctacacacccgccctccggtgtgaacctccatgacgtctgcaaccactcttcgatctgctgtcgtgacctcatccagccgtgctgtggcagtggatcggagttcgctccagctctgattggctaagcatctaaacaacaatatgtaaattatccttt

SEQ ID NO: 23253 - DNA, 227 bp, Zea Mays
cagccgccaacgccccaatcccgtaaccgcagcctcgccccgctcacatcttcctctccctctcagcgctggtgctcaatctataggtcgtcccactccctacacacccgccctccggtgtgaacctccatgacgtctgcaaccactcttcgatctgctgtcgtgacctcatccagccgtgctgtggcagtggatcggagttcgctccagctctgattgggaattcc

SEQ ID NO: 23254 - DNA, 1454 bp, Zea Mays
ctctgagtagttcgcaaaaaaacctgaatacatagaaacaatgttcaacagtgaatgcaggaattttgtgcatgaattgagctgggaacaaataaagtatacttcaggttcaggggtagtggaaactttttatttgaatgctggaccaaagtgtcattcaataatcaatatacatggtcatgtgctgaacctagccatccagcaacaaagaaagtgatcctctcctcaagagtcaagactgctgaaggcattgatcatataattatacttgtgtgtgtgaaaagtttcacacgatgattatgatgtcttggatgaatcatcatgttctggatttttttttggttttgtattttgttactaactgcttcagctgcctcctgaaattctcaagttgcatgactaatccaggagcatcagatctctaaaagaatgtaaaacaagaattgaaagacttattttatgtgctgatttctaacgaaaccattagtttttaccataccaccattattacttttaaataaagttaaattgttttataaaatttctaggagtttctaggatgcaatttggtttctcaacctaccattcatattctttttatgcatgtatatatatttttttcactcagtaagtattgtttcagtgcataactatgcaatgagggcatgaggcctgtttgccatctcaatatgcgcagtgcaccgtggagatacttagttgaaaagatgaggctgatgctatcatgtccagattgaacattgatgattatcagaaagaaggcagtcaaccaacactcctgatcacatctgacatattgactttgaggtggtcgtccatgaagggattattagagaaaaaccaaccaccaaggaagaagcacggcaattcctgaaaggtttatttccacgatataccagatgaggtcatcaagagcttgatcgatgagggagtagtatttagggtcgcaggtggtttgctgcttgaacatccattgacgctgccgtttgtcgaagcagtggttggttctagtgacagtgtcatggggctgtcaaaggaggttgcaaacaagttaattcacgacgcactgtctacttagcgtagcaatttcagcactactgtttctgatcaaattcttactgcactcacctggagatgtgatcaagcagagagcatatctggggatacccatagtgattcatgtatttttaaacgttaaaccaagacaggcgcacctggcattgcaaattgtgatcaggttgtacttgccttctgtttcacttgaaggatacgttgatgcttcttttagtgggtcagttggtatgatttgtaatatactgatatacataatctcgtctctgatatgtgactgttcgttgcaattgttaaagaacacaacaaatgcatggatgaaaatggatccgatatgaacagctacgcggaataaaaagttggag

SEQ ID NO: 23255 - DNA, 2657 bp, Zea Mays
ctctgagtagttcgcaaaaaaacctgaatacatagaaacaatgttcaacagtgaatgcaggaattttgtgcatgaattgagctgggaacaaataaagtatacttcaggttcaggggtagtggaaactttttatttgaatgctggaccaaagtgtcattcaataatcaatatacatggtcatgtgctgaacctagccatccagcaacaaagaaagtgatcctctcctcaagagtcaagactgctgaaggcattgatcatataattatacttgtgtgtgtgaaaagtttcacacgatgattatgatgtcttggatgaatcatcatgttctggatttttttttggttttgtattttgttactaactgcttcagctgcctcctgaaattctcaagttgcatgactaatccaggagcatcagatctctaaaagaatgtaaaacaagaattgaaagacttattttatgtgctgatttctaacgaaaccattagtttttaccataccaccattattacttttaaataaagttaaattgttttataaaatttctaggagtttctaggatgcaatttggtttctcaacctaccattcatattctttttatgcatgtatatatatttttttcactcagtaagtattgtttcagtgcataactatgcaatgagggcatgaggcctgtttgccatctcaatatgcgcagtgcaccgtggagatacttagttgaaaagatgaggtgttcatccgttacatgatataaattagttgttgagcgattgagtgatcctaaacatcattaaaaaatgtttataattttaggatttttgtagcttctgtgaaattttggtgcaaatttatgactaaagttcacttggggtctgatttatgttgatcttctaactatgttgtaatgggtcagttgatagctattaaggcggcgtttggttcctagcagattttgagtattggatactgtacaaaacccaatgcaaaatccattatcaggttatggatagattctgagattctggcacacaatccaatgcagaatttaagaggtgtttggttcataatgggattctagaatgaaattctgaaaatgaagtacgaaacaaacagggcttaagttggccaagtttgcaactgctttaggtggccatctgaagcataaattaggaagttccttaaagtgcatgtaaattttctaggtgaatacgatattacacaacaaattaaattcgcaaaatggtccagcaatgtgttgcaattgatggcattcacatttttttcttgttccttggcccatttagttgactacatcagtctgcctgaattaggatcaacttcaacatgggtttcagttttgttagtgttagacaaacaaattttgcacacatacttgtttttaaagctacatgaaaactaatacttctttctgtcggagaacaaggtggtggaagaaatgtccaaccaaattgggccatggctgttttttctatcatcaattgtttttttctcccccagcatggaattaaccactttaagcatctttcaggctgatgctatcatgtccagattgaacattgatgattatcagaaagaaggcagtcaaccaacactcctgatcacatctgacatattgactttgaggtggtcgtccatgaagggattattagagaaaaaccaaccaccaaggaagaagcacggcaattcctgaaaggctattccggaggtcacgtgtcaactgttgggtctgttgttgtaactaatcttacaactgggaagagacttggaagtttggacaaagctgaggcaattttcactttttagccaaaagactctttcatcaaggctacttttgttatattgccattcaaatcagatttattagtgcagaaggatatatggtccaatttagatgcgtaatctctaatatcggtaatacttatttaatagaaatgaattcaccaatgtagggtgatgaatattggtagatgaggttcttcaaatttattgtgtgaaaaggaagtttttgtcttgaatgtgatatttatggatgataattgaccaaggaagttttgcattatcattctacactgtgcaggtttatttccacgatataccagatgaggtcatcaagagcttgatcgatgagggagtagtatttagggtcgcaggtggtttgctgcttgaacatccattgacgctgccgtttgtcgaagcagtggttggttctagtgacagtgtcatggggctgtcaaaggaggttgcaaacaagttaattcacgacgcactgtctacttagcgtagcaatttcagcactactgtttctgatcaaattcttactgcactcacctggagatgtgatcaagcagagagcatatctggggatacccatagtgattcatgtatttttaaacgttaaaccaagacaggcgcacctggcattgcaaattgtgatcaggttgtacttgccttctgtttcacttgaaggatacgttgatgcttcttttagtgggtcagttggtatgatttgtaatatactgatatacataatctcgtctctgatatgtgactgttcgttgcaattgttaaagaacacaacaaatgcatggatgaaaatggatccgatatgaacagctacgcggaataaaaagttggag

SEQ ID NO: 23256 - DNA, 2365 bp, Zea Mays
ctctgagtagttcgcaaaaaaacctgaatacatagaaacaatgttcaacagtgaatgcaggaattttgtgcatgaattgagctgggaacaaataaagtatacttcaggttcaggggtagtggaaactttttatttgaatgctggaccaaagtgtcattcaataatcaatatacatggtcatgtgctgaacctagccatccagcaacaaagaaagtgatcctctcctcaagagtcaagactgctgaaggcattgatcatataattatacttgtgtgtgtgaaaagtttcacacgatgattatgatgtcttggatgaatcatcatgttctggatttttttttggttttgtattttgttactaactgcttcagctgcctcctgaaattctcaagttgcatgactaatccaggagcatcagatctctaaaagaatgtaaaacaagaattgaaagacttattttatgtgctgatttctaacgaaaccattagtttttaccataccaccattattacttttaaataaagttaaattgttttataaaatttctaggagtttctaggatgcaatttggtttctcaacctaccattcatattctttttatgcatgtatatatatttttttcactcagtaagtattgtttcagtgcataactatgcaatgagggcatgaggcctgtttgccatctcaatatgcgcagtgcaccgtggagatacttagttgaaaagatgaggtgttcatccgttacatgatataaattagttgttgagcgattgagtgatcctaaacatcattaaaaaatgtttataattttaggatttttgtagcttctgtgaaattttggtgcaaatttatgactaaagttcacttggggtctgatttatgttgatcttctaactatgttgtaatgggtcagttgatagctattaaggcggcgtttggttcctagcagattttgagtattggatactgtacaaaacccaatgcaaaatccattatcaggttatggatagattctgagattctggcacacaatccaatgcagaatttaagaggtgtttggttcataatgggattctagaatgaaattctgaaaatgaagtacgaaacaaacagggcttaagttggccaagtttgcaactgctttaggtggccatctgaagcataaattaggaagttccttaaagtgcatgtaaattttctaggtgaatacgatattacacaacaaattaaattcgcaaaatggtccagcaatgtgttgcaattgatggcattcacatttttttcttgttccttggcccatttagttgactacatcagtctgcctgaattaggatcaacttcaacatgggtttcagttttgttagtgttagacaaacaaattttgcacacatacttgtttttaaagctacatgaaaactaatacttctttctgtcggagaacaaggtggtggaagaaatgtccaaccaaattgggccatggctgttttttctatcatcaattgtttttttctcccccagcatggaattaaccactttaagcatctttcaggctgatgctatcatgtccagattgaacattgatgattatcagaaagaaggcagtcaaccaacactcctgatcacatctgacatattgactttgaggtggtcgtccatgaagggattattagagaaaaaccaaccaccaaggaagaagcacggcaattcctgaaaggctattccggaggtcacgtgtcaactgttgggtctgttgttgtaactaatcttacaactgggaagagacttggaagtttggacaaagctgaggtttatttccacgatataccagatgaggtcatcaagagcttgatcgatgagggagtagtatttagggtcgcaggtggtttgctgcttgaacatccattgacgctgccgtttgtcgaagcagtggttggttctagtgacagtgtcatggggctgtcaaaggaggttgcaaacaagttaattcacgacgcactgtctacttagcgtagcaatttcagcactactgtttctgatcaaattcttactgcactcacctggagatgtgatcaagcagagagcatatctggggatacccatagtgattcatgtatttttaaacgttaaaccaagacaggcgcacctggcattgcaaattgtgatcaggttgtacttgccttctgtttcacttgaaggatacgttgatgcttcttttagtgggtcagttggtatgatttgtaatatactgatatacataatctcgtctctgatatgtgactgttcgttgcaattgttaaagaacacaacaaatgcatggatgaaaatggatccgatatgaacagctacgcggaataaaaagttggag

SEQ ID NO: 23257 - DNA, 1443 bp, Zea Mays
ctctgagtagttcgcaaaaaaacctgaatacatagaaacaatgttcaacagtgaatgcaggaattttgtgcatgaattgagctgggaacaaataaagtatacttcaggttcaggggtagtggaaactttttatttgaatgctggaccaaagtgtcattcaataatcaatatacatggtcatgtgctgaacctagccatccagcaacaaagaaagtgatcctctcctcaagagtcaagactgctgaaggcattgatcatataattatacttgtgtgtgtgaaaagtttcacacgatgattatgatgtcttggatgaatcatcatgttctggatttttttttggttttgtattttgttactaactgcttcagctgcctcctgaaattctcaagttgcatgactaatccaggagcatcagatctctaaaagaatgtaaaacaagaattgaaagacttattttatgtgctgatttctaacgaaaccattagtttttaccataccaccattattacttttaaataaagttaaattgttttataaaatttctaggagtttctaggatgcaatttggtttctcaacctaccattcatattctttttatgcatgtatatatatttttttcactcagtaagtattgtttcagtgcataactatgcaatgagggcatgaggcctgtttgccatctcaatatgcgcagtgcaccgtggagatacttagttgaaaagatgaggctgatgctatcatgtccagattgaacattgatgattatcagaaagaaggcagtcaaccaacactcctgatcacatctgacatagtggtcgtccatgaagggattattagagaaaaaccaaccaccaaggaagaagcacggcaattcctgaaaggtttatttccacgatataccagatgaggtcatcaagagcttgatcgatgagggagtagtatttagggtcgcaggtggtttgctgcttgaacatccattgacgctgccgtttgtcgaagcagtggttggttctagtgacagtgtcatggggctgtcaaaggaggttgcaaacaagttaattcacgacgcactgtctacttagcgtagcaatttcagcactactgtttctgatcaaattcttactgcactcacctggagatgtgatcaagcagagagcatatctggggatacccatagtgattcatgtatttttaaacgttaaaccaagacaggcgcacctggcattgcaaattgtgatcaggttgtacttgccttctgtttcacttgaaggatacgttgatgcttcttttagtgggtcagttggtatgatttgtaatatactgatatacataatctcgtctctgatatgtgactgttcgttgcaattgttaaagaacacaacaaatgcatggatgaaaatggatccgatatgaacagctacgcggaataaaaagttggag

SEQ ID NO: 23258 - DNA, 2140 bp, Zea Mays
ctctgagtagttcgcaaaaaaacctgaatacatagaaacaatgttcaacagtgaatgcaggaattttgtgcatgaattgagctgggaacaaataaagtatacttcaggttcaggggtagtggaaactttttatttgaatgctggaccaaagtgtcattcaataatcaatatacatggtcatgtgctgaacctagccatccagcaacaaagaaagtgatcctctcctcaagagtcaagactgctgaaggcattgatcatataattatacttgtgtgtgtgaaaagtttcacacgatgattatgatgtcttggatgaatcatcatgttctggatttttttttggttttgtattttgttactaactgcttcagctgcctcctgaaattctcaagttgcatgactaatccaggagcatcagatctctaaaagaatgtaaaacaagaattgaaagacttattttatgtgctgatttctaacgaaaccattagtttttaccataccaccattattacttttaaataaagttaaattgttttataaaatttctaggagtttctaggatgcaatttggtttctcaacctaccattcatattctttttatgcatgtatatatatttttttcactcagtaagtattgtttcagtgcataactatgcaatgagggcatgaggcctgtttgccatctcaatatgcgcagtgcaccgtggagatacttagttgaaaagatgaggtgttcatccgttacatgatataaattagttgttgagcgattgagtgatcctaaacatcattaaaaaatgtttataattttaggatttttgtagcttctgtgaaattttggtgcaaatttatgactaaagttcacttggggtctgatttatgttgatcttctaactatgttgtaatgggtcagttgatagctattaaggcggcgtttggttcctagcagattttgagtattggatactgtacaaaacccaatgcaaaatccattatcaggttatggatagattctgagattctggcacacaatccaatgcagaatttaagaggtgtttggttcataatgggattctagaatgaaattctgaaaatgaagtacgaaacaaacagggcttaagttggccaagtttgcaactgctttaggtggccatctgaagcataaattaggaagttccttaaagtgcatgtaaattttctaggtgaatacgatattacacaacaaattaaattcgcaaaatggtccagcaatgtgttgcaattgatggcattcacatttttttcttgttccttggcccatttagttgactacatcagtctgcctgaattaggatcaacttcaacatgggtttcagttttgttagtgttagacaaacaaattttgcacacatacttgtttttaaagctacatgaaaactaatacttctttctgtcggagaacaaggtggtggaagaaatgtccaaccaaattgggccatggctgttttttctatcatcaattgtttttttctcccccagcatggaattaaccactttaagcatctttcaggctgatgctatcatgtccagattgaacattgatgattatcagaaagaaggcagtcaaccaacactcctgatcacatctgacatattgactttgaggtggtcgtccatgaagggattattagagaaaaaccaaccaccaaggaagaagcacggcaattcctgaaaggtttatttccacgatataccagatgaggtcatcaagagcttgatcgatgagggagtagtatttagggtcgcaggtggtttgctgcttgaacatccattgacgctgccgtttgtcgaagcagtggttggttctagtgacagtgtcatggggctgtcaaaggaggttgcaaacaagttaattcacgacgcactgtctacttagcgtagcaatttcagcactactgtttctgatcaaattcttactgcactcacctggagatgtgatcaagcagagagcatatctggggatacccatagtgattcatgtatttttaaacgttaaaccaagacaggcgcacctggcattgcaaattgtgatcagaacacaacaaatgcatggatgaaaatggatccgatatgaacagctacgcggaataaaaagttggag

SEQ ID NO: 23259 - DNA, 1473 bp, Zea Mays
attaaaaaatgtttataattttaggatttttgtagcttctgtgaaattttggtgcaaatttatgactaaagttcacttggggtctgatttatgttgatcttctaactatgttgtaatgggtcagttgatagctattaaggcggcgtttggttcctagcagattttgagtattggatactgtacaaaacccaatgcaaaatccattatcaggttatggatagattctgagattctggcacacaatccaatgcagaatttaagaggtgtttggttcataatgggattctagaatgaaattctgaaaatgaagtacgaaacaaacagggcttaagttggccaagtttgcaactgctttaggtggccatctgaagcataaattaggaagttccttaaagtgcatgtaaattttctaggtgaatacgatattacacaacaaattaaattcgcaaaatggtccagcaatgtgttgcaattgatggcattcacatttttttcttgttccttggcccatttagttgactacatcagtctgcctgaattaggatcaacttcaacatgggtttcagttttgttagtgttagacaaacaaattttgcacacatacttgtttttaaagctacatgaaaactaatacttctttctgtcggagaacaaggtggtggaagaaatgtccaaccaaattgggccatggctgttttttctatcatcaattgtttttttctcccccagcatggaattaaccactttaagcatctttcaggctgatgctatcatgtccagattgaacattgatgattatcagaaagaaggcagtcaaccaacactcctgatcacatctgacatagtggtcgtccatgaagggattattagagaaaaaccaaccaccaaggaagaagcacggcaattcctgaaaggtttatttccacgatataccagatgaggtcatcaagagcttgatcgatgagggagtagtatttagggtcgcaggtggtttgctgcttgaacatccattgacgctgccgtttgtcgaagcagtggttggttctagtgacagtgtcatggggctgtcaaaggaggttgcaaacaagttaattcacgacgcactgtctacttagcgtagcaatttcagcactactgtttctgatcaaattcttactgcactcacctggagatgtgatcaagcagagagcatatctggggatacccatagtgattcatgtatttttaaacgttaaaccaagacaggcgcacctggcattgcaaattgtgatcaggttgtacttgccttctgtttcacttgaaggatacgttgatgcttcttttagtgggtcagttggtatgatttgtaatatactgatatacataatctcgtctctgatatgtgactgttcgttgcaattgttaaagaacacaacaaatgcatggatgaaaatggatccgatatgaacagctacgcggaataaaaagttggag

SEQ ID NO: 23260 - DNA, 1205 bp, Zea Mays
ctttctgtcggagaacaaggtggtggaagaaatgtccaaccaaattgggccatggctgttttttctatcatcaattgtttttttctcccccagcatggaattaaccactttaagcatctttcaggctgatgctatcatgtccagattgaacattgatgattatcagaaagaaggcagtcaaccaacactcctgatcacatctgacataggattattagagaaaaaccaaccaccaaggaagaagcacggcaattcctgaaaggctattccggaggtcacgtgtcaactgttgggtctgttgttgtaactaatcttacaactgggaagagacttggaagtttggacaaagctgaggcaattttcactttttagccaaaagactctttcatcaaggctacttttgttatattgccattcaaatcagatttattagtgcagaaggatatatggtccaatttagatgcgtaatctctaatatcggtaatacttatttaatagaaatgaattcaccaatgtagggtgatgaatattggtagatgaggttcttcaaatttattgtgtgaaaaggaagtttttgtcttgaatgtgatatttatggatgataattgaccaaggaagttttgcattatcattctacactgtgcaggtttatttccacgatataccagatgaggtcatcaagagcttgatcgatgagggagtagtatttagggtcgcaggtggtttgctgcttgaacatccattgacgctgccgtttgtcgaagcagtggttggttctagtgacagtgtcatggggctgtcaaaggaggttgcaaacaagttaattcacgacgcactgtctacttagcgtagcaatttcagcactactgtttctgatcaaattcttactgcactcacctggagatgtgatcaagcagagagcatatctggggatacccatagtgattcatgtatttttaaacgttaaaccaagacaggcgcacctggcattgcaaattgtgatcaggttgtacttgccttctgtttcacttgaaggatacgttgatgcttcttttagtgggtcagttggtatgatttgtaatatactgatatacataatctcgtctctgatatgtgactgttcgttgcaattgttaaagaacacaacaaatgcatggatgaaaatggatccgatatgaacagctacgcggaataaaaagttggag

SEQ ID NO: 23261 - DNA, 763 bp, Zea Mays
ctgtcggagaacaaggtggtggaagaaatgtccaaccaaattgggccatggctgttttttctatcatcaattgtttttttctcccccagcatggaattaaccactttaagcatctttcaggctgatgctatcatgtccagattgaacattgatgattatcagaaagaaggcagtcaaccaacactcctgatcacatctgacatagtttatttccacgatataccagatgaggtcatcaagagcttgatcgatgagggagtagtatttagggtcgcaggtggtttgctgcttgaacatccattgacgctgccgtttgtcgaagcagtggttggttctagtgacagtgtcatggggctgtcaaaggaggttgcaaacaagttaattcacgacgcactgtctacttagcgtagcaatttcagcactactgtttctgatcaaattcttactgcactcacctggagatgtgatcaagcagagagcatatctggggatacccatagtgattcatgtatttttaaacgttaaaccaagacaggcgcacctggcattgcaaattgtgatcaggttgtacttgccttctgtttcacttgaaggatacgttgatgcttcttttagtgggtcagttggtatgatttgtaatatactgatatacataatctcgtctctgatatgtgactgttcgttgcaattgttaaagaacacaacaaatgcatggatgaaaatggatccgatatgaacagctacgcggaataaaaagttggag

SEQ ID NO: 23262 - DNA, 546 bp, Zea Mays
ggtgaacaaaaaagaaaaggaaaaaagaaaaagaaaggggcctggtaagaagtgggctggcccagcccaccaggcagctcatgtgctcctcgcctcctcccccacctggtgtggctttgttaaactccaaatcccgacccccttcagtgtcgccgcttcttctctcacgcgttctccactgctattccgcctccacccaagtgcctgctctgcttccctccgctcctctccagatcaagcaattcatgagtgggagatggaagagatctagccagcagaagaaaaatcaagcaggccaccagcagaatcgatgaggagacagcggaatctagggggcataggcatgcgaataaggcgacgaggcatcacctaacccctgagaagctgttgatgctactcgtgctgcggttgttgcagctgcggaggccagatgtgcggcgttggttgctgagaaggaggcacgtgcggctgttgaatctgccactattgcagccgataaggttcaacttgtcgtctctgctgtgaagtatagaagatttgttgaag

SEQ ID NO: 23263 - DNA, 1038 bp, Zea Mays
ggggcctggtaagaagtgggctggcccagcccaccaggcagctcatgtgctcctcgcctcctcccccacctggtgtggctttgttaaactccaaatcccgacccccttcagtgtcgccgcttcttctctcacgcgttctccactgctattccgcctccacccaagtgcctgctctgcttccctccgctcctctccagatcaagcaattcatgagtgggagatggaagagatctagccagcagaagaaaaatcaagcaggccaccagcagaatcgatgaggagacagcggaatctagggggcataggcatgcgaataaggcgacgaggcatcacctaacccctgaggaacatgttgatttgaagtatcacgttagcatcaagaacttactccgatatgtcattcaagagatgaggaggcaatcttcacttttacataccattaataggctgtgttgtagcatcccaggagttgaagggggtaaggttgtaaaacttgctggccatttgaaggaagtgtgaaagagtctcgagaagacttcaaatgtgtgtgaagaagatctggacaacaaatgtcctggttgggaccttgatcatccccttcagatgttgaagaccactctaacccttctcatgttgaggaccaagtggatggatatgtgtcagaagatccggagctgtgggaaatggttttttaagacatgaagtgggaggagaacaaagtggttgtctctttgttcgagcattgtcgtattatgggctacgactacgaccagatttatgatcgtactgtttaagttgccaagactactagtatgtttcttctgtggttctatcttttgtggtcatgagatgaacttgtaaccagtttgtgtcatgagatgaacttctaaccagatatgaagacttttgtgatgtcaagactatgtacttgtaacatctctctgtgatgtggttgtgtttatgtaagactatctatgtattcaagactatctatgtagttagttgttttcagttaatgtatcaatgtgttcagttaat

SEQ ID NO: 23264 - DNA, 666 bp, Zea Mays
aatcccgacccccttcagtgtcgccgcttcttctctcacgcgttctccactgctattccgcctccacccaagtgcctgctctgcttccctccgctcctctccaggtgcgctgctctgcttccctctccggatgtgctgatcaagcaattcatgagtgggagatggaagagatctagccagcagaagaaaaatcaagcaggccaccagcagaatcgatgaggagacagcggaatctagggggcataggcatgcgaataaggcgacgaggcatcacctaacccctgaggtgaccttcgaccgctctggcgcttaagcaccgcttaagtgatgccttaataacaatggctgaaaaggtgctccaaagatgagctatccaacctaaaagcaaaattccgaatgatgtgctgtaaaactgtattctgtaatagcatatatttattatttttctattcagtccattttcttccctttcagcacaaacagaaaaattaatctgcaattggttctgttgcaaatgatttattattaaacaaaatggcaggctgctacttcatgagagaatgcttagttggaagttgggaccaacgagtactcatgtattttttctactggattttctagattgtcatcaatggtgaaacacagtgaccgtacacctgattcggc

SEQ ID NO: 23265 - DNA, 419 bp, Zea Mays
ctctcacgcgttctccactgctattccgcctccacccaagtgcctgctctgcttccctccgctcctctccaggtgcgctgctctgcttccctctccggatgtgctgatcaagcaattcatgagtgggagatggaagagatctagccagcagaagaaaaatcaagcaggccaccagcagaatcgatgaggagacagcggaatctagggggcataggcatgcgaataaggcgacgaggcatcacctaacccctgagaagctgttgatgctactcgtgctgcggttgttgcagctgcggaggccagatgtgcggcgttggttgctgagaaggaggcacgtgcggctgttgaatctgccactattgcagccgataaggttcaacttgtcgtctctgctgtgaagtatagaagatttgttgaag

SEQ ID NO: 23266 - DNA, 892 bp, Zea Mays
agttaaaaataaaataggtctttaataaaatatttacatataaaggacgagatatgatgccgttaaagagaaatgagataagaaatgagatataaatgaagagttttttttagagaaaaccataaaaaaacgaatttaaagatggaattttggtgatatcgcgggagactctaatgttgggccattaacttcatagttttggttcattaaatcttacgtattagtttttctcgattcgtcggacagtcaggctcgggcttcgtttcagtcttacagatatcaatcgcaattcgcacctcctatcaaaaaaaaaaaaaaaatcgttcgcacctcctttgtgccgccgccgccgccgccgccgaagagcgagtgtcccgccgactttgcgctgcgcaccacggggcgccgggagcgtgcttcactagacgccaggttatactcctccttgatcaggttggccagcttgggcaagagagtgcccatcgccccggtgactatctccgccatggttgctcagtcagagctcttaccgaccagcaccactagttgtaaagtggctagcgataaaattctataatggatggagacagaatccgaccagggatagtggtctctcgtggaaagcttcgaatgtcacatcagttggactttatctatatacaccagcaagactagctgtaaagtatttcgttaatcaagaaaggtttatctaaatacagttttactttacattagcatatctagaagactggagcaaggatgttgaagttgcacattttttttagatttgcgtgtttttatttacccgaagttttatcgtatgcccgatttgatgaggcaatgagtgcaaaataaagcaaacgactttgacttagggatgtttggttaccac

SEQ ID NO: 23267 - DNA, 764 bp, Zea Mays
aaaaaaacgaatttaaagatggaattttggtgatatcgcgggagactctaatgttgggccattaacttcatagttttggttcattaaatcttacgtattagtttttctcgattcgtcggacagtcaggctcgggcttcgtttcagtcttacagatatcaatcgcaattcgcacctcctatcaaaaaaaaaaaaaaaatcgttcgcacctcctttgtgccgccgccgccgccgccgccgaagagcgagtgtcccgccgactttgcgctgcgcaccacggggcgccgggagcgtgcttcactagacgccaggttatactcctccttgatcaggttggccagcttgggcaagagagtgcccatcgccccggtgactatctccgccatggttgctcagtcagagctcttaccgaccagcaccactagttgtggctagcgataaaattctataatggatggagacagaatccgaccagggatagtggtctctcgtggaaagcttcgaatgtcacatcagttggactttatctatatacaccagcaagactagctgtaaagtatttcgttaatcaagaaaggtttatctaaatacagttttactttacattagcatatctagaagactggagcaaggatgttgaagttgcacattttttttagatttgcgtgtttttatttacccgaagttttatcgtatgcccgatttgatgaggcaatgagtgcaaaataaagcaaacgactttgacttagggatgtttggttaccac

SEQ ID NO: 23268 - DNA, 778 bp, Zea Mays
gggcttcgtttcagtcttacagatatcaatcgcaattcgcacctcctatcaaaaaaaaaaaaaaaatcgttcgcacctcctttgtgccgccgccgccgccgccgccgaagagcgagtgtcccgccgactttgcgctgcgcaccacggggcgccgggagcgtgcttcactagacgccaggtggaggcttctatcaatgaatcccttgaaactatgtggcttgccatcgccaactcgcaccatgaatctgtcgatgctgtcctcgaggtcgtaggacagctctctcacctcccttgtccagagcttgacttggatgtcaggttatactcctccttgatcaggttggccagcttgggcaagagagtgcccatcgccccggtgactatctccgccatggttgctcagtcagagctcttaccgaccagcaccactagttgtaaagtggctagcgataaaattctataatggatggagacagaatccgaccagggatagtggtctctcgtggaaagcttcgaatgtcacatcagttggactttatctatatacaccagcaagactagctgtaaagtatttcgttaatcaagaaaggtttatctaaatacagttttactttacattagcatatctagaagactggagcaaggatgttgaagttgcacattttttttagatttgcgtgtttttatttacccgaagttttatcgtatgcccgatttgatgaggcaatgagtgcaaaataaagcaaacgactttgacttagggatgtttggttaccac

SEQ ID NO: 23269 - DNA, 536 bp, Zea Mays
ccatgaatctgtcgatgctgtcctcgaggtcgtaggacagctctctcacctcccttgtccagagcttgacttggatgtcaggttatactcctccttgatcaggttggccagcttgggcaagagagtgcccatcgccccggtgactatctccgccatggttgctcagtcagagctcttaccgaccagcaccactagttgtggctagcgataaaattctataatggatggagacagaatccgaccagggatagtggtctctcgtggaaagcttcgaatgtcacatcagttggactttatctatatacaccagcaagactagctgtaaagtatttcgttaatcaagaaaggtttatctaaatacagttttactttacattagcatatctagaagactggagcaaggatgttgaagttgcacattttttttagatttgcgtgtttttatttacccgaagttttatcgtatgcccgatttgatgaggcaatgagtgcaaaataaagcaaacgactttgacttagggatgtttggttaccac

SEQ ID NO: 23270 - DNA, 674 bp, Zea Mays
cctctataaattaccaaacacatgcatcgtctctttcggtgtacacccctcgcgacaacagtgatcgacgacacacattatgcctttcagcaagaaacaagtggctgcttggtcccagttcaccttggtcttgctccttgtctcgcgcgcggcggtggtgtcagtggcgttatgcgaggcagcagtagggaccttttctgctaataaactggattgccaaagctactgcacacagaaaggctacaagagcggccatcccacatgccagtgtagcaatgggctgcatggggtatcaccggggacgaccagccattgcttgagaggccgtcacccacgagacgatgctggcgaaggggtgggaatactgttagaattataggcattttccgtatcattttaattccataaattaatattatgatgatgacatataaaagataattaaccatgacatcaaatatatccataacaatatggatcgtgagaacataaagcatatgaattatataaatcatatgaatacgataaacatgtaaactgactgtacaattgaaaataaacagataggaacacaaacaacgtgactgtaaaattaaaacagacagatctattatattacaataagacagaacagataagatgaaatcattcctacatatgaagcagcatagatg

SEQ ID NO: 23271 - DNA, 3274 bp, Zea Mays
cagccgcgcccgtccacaccctcgccgtcgtcgtccgccccgtctccgcgcacccaccgatcgcagcacctgtgccatctccgcgcgctcatgcgtccacgaccacgcaccctgtcgcccgccaccccgctcgtcaccgccacctgatgcgcacagtccaacgcacggttctgctaaacaagtgcattatttttttgaattgtttgcatgcgttgattaattgcagttattttacatacatataaattttttttgtatgatcaaaattgtgtactgtgctattttcaataaccagaaagtgattattcaatttatttataatgttttagttcatttagaggtgcttaagctaaatttgtaatttctgagtgtatttattaaaccctcgaaaaatgttgtttgatattttttcatatgaaataatattatttaatttaaaatattatattaggagtgtatttaacatcggagagtaatttttattatgtaatacacatcgatgattgtaacaaacaaaacctcataaatgcatgtattgtagtgttaacaaacggaatggaaccgatgcgtcacctgtttgcatacctctcatgcgacatatgtgaggtcctgtttattggacagccttagacagagtccgtatttatgacaaggcatgtgctcatgcaaaattttggtagcataacacttctgttctccattgcatctccaaatatgtgctttgtcggtcactctggtcataaatttggtactttattgacatcattttttatttctttcattattatgtatttcattctatatttgtatttgggtagatgttgaaacaaaatgtcaaaaaatcaagtctctaacttggagtttgcttgggacaaggagtagctcgagaagtgaggactcagtgtttcaaggctttggttcttccatgcgtagacgtagagcactgacacaacatttgcctacagacgatcaacacgatataagttacttgttaaattaattctttttgtacatgatgactcgatcgtttaatcacattcttatttttaataggataatgaaaccgagcgaccgtcaatacaagacccatcgagaggaaaggtagctgtgggtgtggacgtgcaggacccacgagacggtggggacggtaggggagacgatggtggcgatagcggggttggtgcaaattcggtaggtggggattctggggctggtagagattcaacaggttggtctagatcatctcgagtaaggaggaaagtacattttattagcccacctctggagcgctaactacgcgaaaaagcgtgaaacacgagcgagcgtgtgatatttccatagttgcatcgatcactctttgtttttctcatataaagggtcatgcatgccttcactcatatattggttgacatctacttaaatggacaatgcgggactatcgtctatctctatacaccaccttggtttcctaaaataaattaggccagtcataaatgggctaaaataggataagttccaatagataatacgcacacttttggaacattgtgtatgcatgctctcttagagcaactccaatgggagccttaaacatagaaacatattgaaatatagggtctaaacaagaaaggatagccccaatagaagccccatttcaatgaaattcagagtagcatatttgggactcaagaaatcatggccctatacagtttgcgcccctcccaacctctaggggaaagttcacggagccttcttcttcgtagtctccagccaaatcttctctcgaactcgctccaagcgcccgtttcattcgcatctcatgcctgcccaacattgtggatgccccctctccatcctgccgcctcccctggtttgtctccttgctcccctcctccctgccccctctccactacaacacatatggccttctataacgaatattcaacgacaatataacaattcgtcactagatcaccttgtttatgacgatttctagaagatggctcagtatagtggtgaaaatttaaccttcgtcataaaatcgtcaaaacatattctagcatcatatttgtaatatttttttgacaatatagaaattgtcataagaataaattgtcagaaccttctcaatataataattatgacgatattgcatgccatgactcatatgtcatagacatgatgtattttttttaaaatctattatccatattaacacgcatgacccactattaaaggtaggttccattgccacataggttttcatatttgacatattgtcacatatggcaatgtggttactacgatataattttttataataaataaataaaattttagataaaattataactacagtacaatttttatgataataataataaatataatctcatgatatccttgtttgacgaccgagcgcgagcggtcgaggtgtggagcaagcgagggcaaggttgcgcctttgcgcgagcaaccggtgctagagatcctggctctacgactaggcgcaggtgctcgacatctcgacgctcgacggtgttgccatgctgctggtagccattgctaggggcacggacgcgtgggcggctggggcgtggctggagatggcaatgagtacccaaaacccgtatttccgacagattttacccgatatatataagggcaaaaatgggatgacttccttacccgcgggtacgataatggacacaattgtgtacccatccggtagatgggtatgagtatgagtatgtactaaccatacccacgtacccatgggtaatttatacacacctcagtcatacacacaccctacttaaataagcacatataaatatatattagctaaaaataaaatcaacctacatatttctacattattcattattttttattcttttatttactcacatttgatgtttttaaatatgccatatatttattagatttatgttatttaatatacgtttagcatgtatctaatcaggtgtgggttacccgacaggttttttacccatgcgggtacgaatatgagtacagtttttatggtgtcacgtgacaccattaaattttagtaatctctattagaatgcatacttgttagtgtttaaatgagttgatgatactataacttaataaatatgacatcaataattgttttgtttagatccgtttctgcgagcgggtacacgggtatggttttatctcccggatacggccatacgggtatgagtatgtaccctctatgcgtgattatgtggagactgggagtagg

SEQ ID NO: 23272 - DNA, 1671 bp, Zea Mays
aaatcttttttatttctttactaaggcgtgcacacatcgcgttctgccatcgctccccgccccgcagccagccgccccgcagccagccgtcccgccccgcaatccccgccccgccccgcaatccccgcccgcaatccgctggtaggtgctcgccgatggaaggttatcaggtccgctgccgctggaaggtgcccgccccgcagcagagaatggaaggtcctcacgcccgcacgctcgctggaaggtccttgattgagctgataatggaaggtcaccatacacggatggaggacgcggatggaaggtccgtggccaaatccgatttgccccctcgcccgcgagatgccgccgcccaccgtgcccgcgattccgccccaatcacctctggttctcaagtatggggaggaagggaaggtggtggagcgagtgaacctcgccactcggcagctgcgcctactgccgaagcccgttgtccggatctgcggtctcctcgcgctcgacgtctcccgcgaccagctaaaggcgatagtcgagcgcgccggagcaggcagcaggccaacaacccagcagatgggggaagcatcaaggagggtcgtgcaccgtcgtcgacgacccgcttcttccccgatgcggaggctgcggggcaactacgaccccgtggagatggcgcgcatggccgccagcgctgcggcagccgtgcgccactcggccaagaagcgccccaaaatgagccagatcgtgagggcactcgagggggacatctcgctggaggacctcaacgacaacgagggggtgcggcctgggcagagcatggcgttcgtccatgtgctgcttagtaccagactatagaaggataccaccctttatgagagagcgtctctcgtccatacaaggaaacaattcgtgcctttttggtctactttcataccttacccccacccaatccctcaacctctcctacaacaccttctccggcccgctccccgacgacattgcgcgcctcgctttcacagcggcgagacagggaagatggacattaattttaccttaatgtttttaatacacgatttagacttttcatgaatataatcttcattttccttgcagacagcaagtgtggagtaatctatagtttattttctggtatactggttccattgaagaaagatccccgtgctccatttcaccatatccagatgccatcttccaaacatggtccaataaactccctggatcagaatacaatgttgtatggtccttgatgaacaaacaatacctggggtcatagattgtctgcatgcatgctagatgagaaaaaaatagccagccgggggtgtttggattcacagcagatggttgagaagcgcaatgcgcaaaaactgacataaagcaagcagatgtttggattcacaccctgatcaggcctgatggaaagaagaaggcttacgtgaagcttctcctgtaagcatgcttcagatctcccctccctcccttctatgtctctttcaccagctggatccaaccgtccattcctcactcccctgacccctcaccctctgagagcacctagagggggggtgaataggtgatcctgtaaaacttcaaaacttaagccacaaaaacttgttaaatgttagcacaagtatggccaagtggctagagagaattcaa

SEQ ID NO: 23273 - DNA, 1808 bp, Zea Mays
aaatcttttttatttctttactaaggcgtgcacacatcgcgttctgccatcgctccccgccccgcagccagccgccccgcagccagccgtcccgccccgcaatccccgccccgccccgcaatccccgcccgcaatccgctggtaggtgctcgccgatggaaggttatcaggtccgctgccgctggaaggtgcccgccccgcagcagagaatggaaggtcctcacgcccgcacgctcgctggaaggtccttgattgagctgataatggaaggtcaccatacacggatggaggacgcggatggaaggtccgtggccaaatccgatttgccccctcgcccgcgagatgccgccgcccaccgtgcccgcgattccgccccaatcacctctggttctcaagtatggggaggaagggaaggtggtggagcgagtgaacctcgccactcggcagctgcgcctactgccgaagcccgttgtccggatctgcggtctcctcgcgctcgacgtctcccgcgaccagctaaaggcgatagtcgagcgcgccggagcaggcagcaggccaacaacccagcagatgggggaagcatcaaggagggtcgtgcaccgtcgtcgacgacccgcttcttccccgatgcggaggctgcggggcaactacgaccccgtggagatggcgcgcatggccgccagcgctgcggcagccgtgcgccactcggccaagaagcgccccaaaatgagccagatcgtgagggcactcgagggggacatctcgctggaggacctcaacgacaacgagggggtgcggcctgggcagagcatggcgttcgtccatgtgctgcttagtaccagactatagaaggataccaccctttatgagagagcgtctctcgtccatacaaggaaacaattcgtgcctttttggtctactttcatacctgtaaatgcttgtgtttgtttgggtttcttcacgtgcaaggttttcctttgttattccaagttgtgtatcgatgtcgctataggccacagccgcctccagcgcacaaagagaccacgtctcctcccctcccttagccttacccccacccaatccctcaacctctcctacaacaccttctccggcccgctccccgacgacattgcgcgcctcgctttcacagcggcgagacagggaagatggacattaattttaccttaatgtttttaatacacgatttagacttttcatgaatataatcttcattttccttgcagacagcaagtgtggagtaatctatagtttattttctggtatactggttccattgaagaaagatccccgtgctccatttcaccatatccagatgccatcttccaaacatggtccaataaactccctggatcagaatacaatgttgtatggtccttgatgaacaaacaatacctggggtcatagattgtctgcatgcatgctagatgagaaaaaaatagccagccgggggtgtttggattcacagcagatggttgagaagcgcaatgcgcaaaaactgacataaagcaagcagatgtttggattcacaccctgatcaggcctgatggaaagaagaaggcttacgtgaagcttctcctgtaagcatgcttcagatctcccctccctcccttctatgtctctttcaccagctggatccaaccgtccattcctcactcccctgacccctcaccctctgagagcacctagagggggggtgaataggtgatcctgtaaaacttcaaaacttaagccacaaaaacttgttaaatgttagcacaagtatggccaagtggctagagagaattcaa

SEQ ID NO: 23274 - DNA, 1766 bp, Zea Mays
aaatcttttttatttctttactaaggcgtgcacacatcgcgttctgccatcgctccccgccccgcagccagccgccccgcagccagccgtcccgccccgcaatccccgccccgccccgcaatccccgcccgcaatccgctggtaggtgctcgccgatggaaggttatcaggtccgctgccgctggaaggtgcccgccccgcagcagagaatggaaggtcctcacgcccgcacgctcgctggaaggtccttgattgagctgataatggaaggtcaccatacacggatggaggacgcggatggaaggtccgtggccaaatccgatttgccccctcgcccgcgagatgccgccgcccaccgtgcccgcgattccgccccaatcacctctggttctcaagtatggggaggaagggaaggtggtggagcgagtgaacctcgccactcggcagctgcgcctactgccgaagcccgttgtccggatctgcggtctcctcgcgctcgacgtctcccgcgaccagctaaaggcgatagtcgagcgcgccggagcaggcagcaggccaacaacccagcagatgggggaagcatcaaggagggtcgtgcaccgtcgtcgacgacccgcttcttccccgatgcggaggctgcggggcaactacgaccccgtggagatggcgcgcatggccgccagcgctgcggcagccgtgcgccactcggccaagaagcgccccaaaatgagccagatcgtgagggcactcgagggggacatctcgctggaggacctcaacgacaacgagggggtgcggcctgggcagagcatggcgttcgtccatgtgctgcttagtaccagactatagaaggataccaccctttatgagagagcgtctctcgtccatacaaggaaacaattcgtgcctttttggtctactttcatagttttcctttgttattccaagttgtgtatcgatgtcgctataggccacagccgcctccagcgcacaaagagaccacgtctcctcccctcccttagccttacccccacccaatccctcaacctctcctacaacaccttctccggcccgctccccgacgacattgcgcgcctcgctttcacagcggcgagacagggaagatggacattaattttaccttaatgtttttaatacacgatttagacttttcatgaatataatcttcattttccttgcagacagcaagtgtggagtaatctatagtttattttctggtatactggttccattgaagaaagatccccgtgctccatttcaccatatccagatgccatcttccaaacatggtccaataaactccctggatcagaatacaatgttgtatggtccttgatgaacaaacaatacctggggtcatagattgtctgcatgcatgctagatgagaaaaaaatagccagccgggggtgtttggattcacagcagatggttgagaagcgcaatgcgcaaaaactgacataaagcaagcagatgtttggattcacaccctgatcaggcctgatggaaagaagaaggcttacgtgaagcttctcctgtaagcatgcttcagatctcccctccctcccttctatgtctctttcaccagctggatccaaccgtccattcctcactcccctgacccctcaccctctgagagcacctagagggggggtgaataggtgatcctgtaaaacttcaaaacttaagccacaaaaacttgttaaatgttagcacaagtatggccaagtggctagagagaattcaa

SEQ ID NO: 23275 - DNA, 582 bp, Zea Mays
aaatcacttttgctagtcttaagttgagaattaagactagccacttcatcactcaattttgaaatataaactaagtgttcactacaagcattaatatcaacatccttacacctagtgcaaatttcaacatgtttaacacaagagttggatttatttgcttctactagtttggcatttaaatcatcgtttatgctctttaagttagaaatggaatcatggcatgttgacacttcacaagcaagcatttcattcctcttaatttctaatgcaagagatttttgagcctctacaaacttatcatgttcttcatacaacaaatcctcttgcttttctaaaagtatattcttttcattcaaggcatcaattaattcattaattttgtctatcttagatctatctaagcccttgaacaaacatgaataatctacttcatcctcatcactagattcgtcctcacttgaagaagcataggtagagttgcgagtacatactttcttttccttagccatgagacacgtgtgacgctcgttggggaagagggccgatttgttgaaggcggtggcggcgagtccctcattgtcg

SEQ ID NO: 23276 - DNA, 2798 bp, Zea Mays
cacaaaacagtttctttaaaactagattctaccaaacagacctttactcaaggataaataaaaacatatcagcgtatgagcattttactagtagaattttattttttggttcatctaaaaacctattaatttaacacaaatctaagtttcacgagacaaagaccactcgagcaacttattcattcttatatctatatttaaactcacacggtacaatgtacactataaacaattagctggtggacggttttaccctaaccttttcactgctccatgctccagggaaggcacacagccgccgctggtcatcttcccgcagttccatcttccgctcactcccttcatcgcgctcggcacacaggcgacggcggcggagctcatgctagggctctcagcgaaggcatcagctgcttcccctcccgcctctcgccaatcgcctcccgtcctccgcacaccggccggtgatcctgcgtcttttcattcgtaaatcatactccaggtatctgcatcgcaggggaaatggcaagcaaagcaggtggtgatggcaaagaagccataaacgagcaagtagttgccaacacttatgccaacatgcgtaccgaaatgaaccagctctataccaagatcacagagctggagatggaggtcagtgagcactccctcgtgattggtgcgatcgagccgctggacccctcaaggcgctgttacaggatgattggtggggtcctggttgaaaggaccatcaaggaagtcctgcctgctgtgaagcgcaacaaggagggccttgaagaagtgattgctcgcatgcatgaggcactggagaggaagaagaaagagatcaccgagtttgagcttaagtacaagatcaggatccggaaggctgacaatgacgcagaggacgaaggcggcaagaaggaaggcactgcacagggagtccttgttgggcctgctggacagtaaaacttaattagatggattttgtgtaaaagatgaggaccgatgtgaactgaagtagtttctttgttacctcttcgggtgctgcagcaatccaagtttctgtttgttattgatgacacatcgcaaatctcccaggactagaatctctgttcgtgattccttttactatattctcaaaataattgtggattagtcatctgcatgacttcatttcaactgatgctgaaatattgtggtgcttggtggctggtaaattcctgtaattgagctgtttcaatggcataccagcttgttgttccttaagttttgagggaaaaaaccttgagtattttgcttgagttttctccataagcttggttctgttatctgcctagctccaatatggtaggaagtgcatgaatcagtttatataacttataagtgtcatgctccttaatatgaatcacccggcaattatacttctgtgttttctcatccaagaaagtgcatgaaacataaccagacaaactataacacccatacattgatacatatactctgaaaaagtgttttgttctctttgttcattatctgaaattggacatggtttctaactaggaactttaatcatacaatttgcagtgttatatgaagcaaggtcaaacacatgttttgttctctttgttcattatctgaaattggacatgattacaaaagaaagaagctttttcagggcagtagctaatatggatattaagctagattttgttccaccatggttgatcaacttcatatcaaggcaactaataggcagcgggcataagctgtatcaaaaggcagtcagtactgtggccagtcatgatggtgactacaggaaagctttgagaggatcactctacgccaggatccgtgaataccaggattctgataacaaggcgaaggtggcccctgataatgccactacacaaaatcgtttgtcgctaacaaatacaatattgaatagtgagattgttgaggagactgaacagaacacatccatcgctgtggataatcttccaactagccaaccctatgtaccagttgagcaagcacaacgcgtcgaaagcaaacctttatatcagtcctgaggtagagcatgcattgtgcatattggagactgttattgcagttctcaaaggcaataaggctggaaatgttaccacacgttatgatgcaactttggaagagagtactgctggttccagaacttcacaaacagacatttgttaacgcagacgaccttctgaatggccatcctgttaccacagcgccacaaggctccagagatacccgacaagcacatccattggctagtgagaaaattagcgatagagcagaagacgccatcaacaaaagttctctgaaaatttcgacaacttagtgaagagagcctaggcactaatggctcccatcagaatggtttcggcaacaacaaagagtcaacacgaacaaggaaggccaagagatggccctaccaccattggatgatggaacccatcataagacttcattcaagttttaaattgctgatttttgaaggtacagtaggaaatagtaaattatagaaatttagcccttcatcggttacacgatgtgggttcagatgacaaatcaggatgccgcttcttgtcgtcacagctcgtagatagtatcttgataaatgtaaagaagtattgttgtaaacaatacgtaattcttgataaatgcagtacagctgctactatctacttacagggtaagtaagactagttccttgacattcagtgaacccttttgagattttcggagatgttactatgagtcttattgatcggctgtcgtca

SEQ ID NO: 23277 - DNA, 3133 bp, Zea Mays
cacaaaacagtttctttaaaactagattctaccaaacagacctttactcaaggataaataaaaacatatcagcgtatgagcattttactagtagaattttattttttggttcatctaaaaacctattaatttaacacaaatctaagtttcacgagacaaagaccactcgagcaacttattcattcttatatctatatttaaactcacacggtacaatgtacactataaacaattagctggtggacggttttaccctaaccttttcactgctccatgctccagggaaggcacacagccgccgctggtcatcttcccgcagttccatcttccgctcactcccttcatcgcgctcggcacacaggcgacggcggcggagctcatgctagggctctcagcgaaggcatcagctgcttcccctcccgcctctcgccaatcgcctcccgtcctccgcacaccggccggtgatcctgcgtcttttcattcgtaaatcatactccaggtatctgcatcgcaggggaaatggcaagcaaagcaggtggtgatggcaaagaagccataaacgagcaagtagttgccaacacttatgccaacatgcgtaccgaaatgaaccagctctataccaagatcacagagctggagatggaggtcagtgagcactccctcgtgattggtgcgatcgagccgctggacccctcaaggcgctgttacaggatgattggtggggtcctggttgaaaggaccatcaaggaagtcctgcctgctgtgaagcgcaacaaggagggccttgaagaagtgattgctcgcatgcatgaggcactggagaggaagaagaaagagatcaccgagtttgagcttaagtacaagatcaggatccggaaggctgacaatgacgcagaggacgaaggcggcaagaaggaaggcactgcacagggagtccttgttgggcctgctggacagtaaaacttaattagatggattttgtgtaaaagatgaggaccgatgtgaactgaagtagtttctttgttacctcttcgggtgctgcagcaatccaagtttctgtttgttattgatgacacatcgcaaatctcccaggactagaatctctgttcgtgattccttttactatattctcaaaataattgtggattagtcatctgcatgacttcatttcaactgatgctgaaatattgtggtgcttggtggctggtaaattcctgtaattgagctgtttcaatggcataccagcttgttgttccttaagttttgagggaaaaaaccttgagtattttgcttgagttttctccataagcttggttctgttatctgcctagctccaatatggtaggaagtgcatgaatcagtttatataacttataagtgtcatgctccttaatatgaatcacccggcaattatacttctgtgttttctcatccaagaaagtgcatgaaacataaccagacaaactataacacccatacattgatacatatactctgaaaaagtgttttgttctctttgttcattatctgaaattggacatggtttctaactaggaactttaatcatacaatttgcagtgttatatgaagcaaggtcaaacacatgttttgttctctttgttcattatctgaaattggacatgattacaaaagaaagaagctttttcaggtgaagcattgatgctacttgcattagtagagtgacatgtttcatattagaacacccccttggcttttgaaggcaccatgcatctttagctagaatataattttagattatgtgaagtaatagtaatcaaatacaattattttgtttatcgatttgtttttataagccatctgatttcaccttagtgcttgacactattcactgacttttatcttcttcttttaggaatataccactaatccattttaagcatttcttttatcatactagtattattcatttttcagctttaaaaatatactgtattcatttttttccgcaattaacatcatcagggcagtagctaatatggatattaagctagattttgttccaccatggttgatcaacttcatatcaaggcaactaataggcagcgggcataagctgtatcaaaaggcagtcagtactgtggccagtcatgatggtgactacaggaaagctttgagaggatcactctacgccaggatccgtgaataccaggattctgataacaaggcgaaggtggcccctgataatgccactacacaaaatcgtttgtcgctaacaaatacaatattgaatagtgagattgttgaggagactgaacagaacacatccatcgctgtggataatcttccaactagccaaccctatgtaccagttgagcaagcacaacgcgtcgaaagcaaacctttatatcagtcctgaggtagagcatgcattgtgcatattggagactgttattgcagttctcaaaggcaataaggctggaaatgttaccacacgttatgatgcaactttggaagagagtactgctggttccagaacttcacaaacagacatttgttaacgcagacgaccttctgaatggccatcctgttaccacagcgccacaaggctccagagatacccgacaagcacatccattggctagtgagaaaattagcgatagagcagaagacgccatcaacaaaagttctctgaaaatttcgacaacttagtgaagagagcctaggcactaatggctcccatcagaatggtttcggcaacaacaaagagtcaacacgaacaaggaaggccaagagatggccctaccaccattggatgatggaacccatcataagacttcattcaagttttaaattgctgatttttgaaggtacagtaggaaatagtaaattatagaaatttagcccttcatcggttacacgatgtgggttcagatgacaaatcaggatgccgcttcttgtcgtcacagctcgtagatagtatcttgataaatgtaaagaagtattgttgtaaacaatacgtaattcttgataaatgcagtacagctgctactatctacttacagggtaagtaagactagttccttgacattcagtgaacccttttgagattttcggagatgttactatgagtcttattgatcggctgtcgtca

SEQ ID NO: 23278 - DNA, 2426 bp, Zea Mays
cacaaaacagtttctttaaaactagattctaccaaacagacctttactcaaggataaataaaaacatatcagcgtatgagcattttactagtagaattttattttttggttcatctaaaaacctattaatttaacacaaatctaagtttcacgagacaaagaccactcgagcaacttattcattcttatatctatatttaaactcacacggtacaatgtacactataaacaattagctggtggacggttttaccctaaccttttcactgctccatgctccagggaaggcacacagccgccgctggtcatcttcccgcagttccatcttccgctcactcccttcatcgcgctcggcacacaggcgacggcggcggagctcatgctagggctctcagcgaaggcatcagctgcttcccctcccgcctctcgccaatcgcctcccgtcctccgcacaccggccggtgatcctgcgtcttttcattcgtaaatcatactccaggtatctgcatcgcaggggaaatggcaagcaaagcaggtggtgatggcaaagaagccataaacgagcaagtagttgccaacacttatgccaacatgcgtaccgaaatgaaccagctctataccaagatcacagagctggagatggaggtcagtgagcactccctcgtgattggtgcgatcgagccgctggacccctcaaggcgctgttacaggatgattggtggggtcctggttgaaaggaccatcaaggaagtcctgcctgctgtgaagcgcaacaaggagggccttgaagaagtgattgctcgcatgcatgaggcactggagaggaagaagaaagagatcaccgagtttgagcttaagtacaagatcaggatccggaaggctgacaatgacgcagaggacgaaggcggcaagaaggaaggcactgcacagggagtccttgttgggcctgctggacagtaaaacttaattagatggattttgtgtaaaagatgaggaccgatgtgaactgaagtagtttctttgttacctcttcgggtgctgcagcaatccaagtttctgtttgttattgatgacacatcgcaaatctcccaggactagaatctctgttcgtgattccttttactatattctcaaaataattgtggattagtcatctgcatgacttcatttcaactgatgctgaaatattgtggtgcttggtggctgtgttatatgaagcaaggtcaaacacatgttttgttctctttgttcattatctgaaattggacatgattacaaaagaaagaagctttttcagggcagtagctaatatggatattaagctagattttgttccaccatggttgatcaacttcatatcaaggcaactaataggcagcgggcataagctgtatcaaaaggcagtcagtactgtggccagtcatgatggtgactacaggaaagctttgagaggatcactctacgccaggatccgtgaataccaggattctgataacaaggcgaaggtggcccctgataatgccactacacaaaatcgtttgtcgctaacaaatacaatattgaatagtgagattgttgaggagactgaacagaacacatccatcgctgtggataatcttccaactagccaaccctatgtaccagttgagcaagcacaacgcgtcgaaagcaaacctttatatcagtcctgaggtagagcatgcattgtgcatattggagactgttattgcagttctcaaaggcaataaggctggaaatgttaccacacgttatgatgcaactttggaagagagtactgctggttccagaacttcacaaacagacatttgttaacgcagacgaccttctgaatggccatcctgttaccacagcgccacaaggctccagagatacccgacaagcacatccattggctagtgagaaaattagcgatagagcagaagacgccatcaacaaaagttctctgaaaatttcgacaacttagtgaagagagcctaggcactaatggctcccatcagaatggtttcggcaacaacaaagagtcaacacgaacaaggaaggccaagagatggccctaccaccattggatgatggaacccatcataagacttcattcaagttttaaattgctgatttttgaaggtacagtaggaaatagtaaattatagaaatttagcccttcatcggttacacgatgtgggttcagatgacaaatcaggatgccgcttcttgtcgtcacagctcgtagatagtatcttgataaatgtaaagaagtattgttgtaaacaatacgtaattcttgataaatgcagtacagctgctactatctacttacagggtaagtaagactagttccttgacattcagtgaacccttttgagattttcggagatgttactatgagtcttattgatcggctgtcgtca

SEQ ID NO: 23279 - DNA, 1196 bp, Zea Mays
aacacatgttttgttctctttgttcattatctgaaattggacatgattacaaaagaaagaagctttttcagggcagtagctaatatggatattaagctagattttgttccaccatggttgatcaacttcatatcaaggcaactaataggcagcgggcataagctgtatcaaaagtcagtactgtggccagtcatgatggtgactacaggaaagctttgagaggatcactctacgccaggatccgtgaataccaggattctgataacaaggcgaaggtggcccctgataatgccactacacaaaatcgtttgtcgctaacaaatacaatattgaatagtgagattgttgaggagactgaacagaacacatccatcgctgtggataatcttccaactagccaaccctatgtaccagttgagcaagcacaacgcgtcgaaagcaaacctttatatcagtcctgaggtagagcatgcattgtgcatattggagactgttattgcagttctcaaaggcaataaggctggaaatgttaccacacgttatgatgcaactttggaagagagtactgctggttccagaacttcacaaacagacatttgttaacgcagacgaccttctgaatggccatcctgttaccacagcgccacaaggctccagagatacccgacaagcacatccattggctagtgagaaaattagcgatagagcagaagacgccatcaacaaaagttctctgaaaatttcgacaacttagtgaagagagcctaggcactaatggctcccatcagaatggtttcggcaacaacaaagagtcaacacgaacaaggaaggccaagagatggccctaccaccattggatgatggaacccatcataagacttcattcaagttttaaattgctgatttttgaaggtacagtaggaaatagtaaattatagaaatttagcccttcatcggttacacgatgtgggttcagatgacaaatcaggatgccgcttcttgtcgtcacagctcgtagatagtatcttgataaatgtaaagaagtattgttgtaaacaatacgtaattcttgataaatgcagtacagctgctactatctacttacagggtaagtaagactagttccttgacattcagtgaacccttttgagattttcggagatgttactatgagtcttattgatcggctgtcgtca

SEQ ID NO: 23280 - DNA, 1409 bp, Zea Mays
gtaccatttttatataacaatagtgtgatgggtctctattttaaatttgcttcgggcccctaaaacctccggtccgccgctgagctagacttggcttactgttatcatatatacagttgctcccaggcttatccttcaatttcctgatactgaagtctaaggtattctgtgtgtccaaaacatgactcccctagatagtagttctatttcaaaaattatttggtttacaaagtacaccatgaagaacattatatcatcaaagcatcacttcagctttgtgtgttgaagagatttctgtgtccttagtgttcttaatgtactttcacaattcctagtcgatacgttggctgaaacatctgccaagattctttagctggttcatgaggatgaggtcctttaggtcctacgtcctagctacctgcaatttttaagagcatgtggtatacatacttttgttttccaattgttaagagttgtaaagctaacctgcaattttgcagtatgttttgtggctgctttgtgccccagtatttggtcacacgatttggtcaggtccatggctcagacgaccgtgtagtcgatgttgccgccctcatgccaggtgcgcaggtctgcatcagatccttcgctaggccttcttcgggcccttcgccggtgacggccattgttacgtactccacccattttctccttttctgctgtgtgaaacctaactttttttttgtttccagatctgatctaataacaaatttatgcacatatattatgcatactaactttttaaaattgtcggatgtacacccaatctgcttgaatccaaagttgccggcattcgctccaggtgccagaccatagcacaccatcatgcaggctagcgataggttcaacataaactctcagcttgagaatcttcaagccaaaaatgttggtacagggcgtgctgatttgtccatgtttgaatgggcagtaaacatgagagacagcaacgcctcttatattgggcaccatccgatgctagcatattttgccattgctcggaacgaatggatcagaagagaacgttagactgtcatgcagatcttcaatggcgtgttcgtgaaagtcaacaaggctactattaacatgcttcgtagggttgagcggccttatgttgcatgtgggtaaccatcaagccatctacacaatcaagcgccagccatattcttgtcgtcatccatccaggagatccattggatgggaaaatttaattttatggagataagttcattttggcacatatttcgtagtttcgtcagaatgtggatcttcttaatcttgtccttacatgttagttgctcttttgtgtgtgctttctatctattaaacattatcatcccttaattcaacatatcagtgaaggtttaagattt

SEQ ID NO: 23281 - DNA, 1768 bp, Zea Mays
gtaccatttttatataacaatagtgtgatgggtctctattttaaatttgcttcgggcccctaaaacctccggtccgccgctgagctagacttggcttactgttatcatatatacagttgctcccaggcttatccttcaatttcctgatactgaagtctaaggtattctgtgtgtccaaaacatgactcccctagatagtagttctatttcaaaaattatttggtttacaaagtacaccatgaagaacattatatcatcaaagcatcacttcagctttgtgtgttgaagagatttctgtgtccttagtgttcttaatgtactttcacaattcctagtcgatacgttggctgaaacatctgccaagattctttagctggttcatgaggatgaggtcctttaggtcctacgtcctagctacctgcaatttttaagagcatgtggtatacatacttttgttttccaattgttaagagttgtaaagctaacctgcaattttgcagtatgttttgtggctgctttgtgccccagtatttggtcacacgatttggtcaggtccatggctcagacgaccgtgtagtcgatgttgccgccctcatgccaggtgcgcaggtctgcatcagatccttcgctaggccttcttcgggcccttcgccggtgacggccattgttacgtactccacccattttctccttttctgctgtgtgaaacctaactttttttttgtttccagatctgatctaataacaaatttatgcacatatattatgcatactaactttttaaaattgtcggatgtacacccaatctgcttgaatccaaagttgccggcattcgctccaggtgccagaccatagcacaccatcatgcaggctagcgataggttcaacataaactctcagcttgagaatcttcaagccaaaaatgttggtacagggcgtgctgatttgtccatgtttgaatgggcagtaaacatgagagacagcaacgcctcttatattgggcaccatccgatgctagcatattttgccattgctcggaacgaatggatcagaagagaacgttagactgtcatgcagatcttcaatggcgtgttcgtgaaagtcaacaaggctactattaacatgcttcgtagggttgagcggccttatgttgcatgtggtagctcgccatcatcccaaccctctgaactcgctaacagcctctccagctcgcctactgcgtgattaaagccatcccatgttcctaagataacaagcaactgctatgtacggactgattagatatacactgtgcttctcctaattgcatctatagttagttttattatctactgctattagtactaatgttttcgacgaattattatcttctacgtacgattctctattctgatttatacttatccaaaggactctgataatattgaagtttctatttcttgcccatgagcatgttctatcatatacttctgctcctattgtgtatgtttatctatgtattcaattttgcaagcaataggtaaccatcaagccatctacacaatcaagcgccagccatattcttgtcgtcatccatccaggagatccattggatgggaaaatttaattttatggagataagttcattttggcacatatttcgtagtttcgtcagaatgtggatcttcttaatcttgtccttacatgttagttgctcttttgtgtgtgctttctatctattaaacattatcatcccttaattcaacatatcagtgaaggtttaagattt

SEQ ID NO: 23282 - DNA, 1872 bp, Zea Mays
ccgagttgagtccactctgctgtccgctcacaccaactcctccatccaactcggcaactccacgcagccagcccggcgcctcccatcagtgggtgggtgggtggttcgcctcctcatcctctcctccccgcacgtccacggcgatggcgcccgcgcccccgcactgctgacccacccccgccgcgcactctcatgaccgtggtttggtaggtggggcggaggttggtaggccgggacgtgccggcaggcggttacgggaggcgcggccgcgatcccgggccggatctggacgccgcgatggaggacgccgttgccgctgagaatgggatcgagggggagggctacgtcgtcgtcaaggcggcggcggccgcggaggcggagggggactccggcgccagcgatcgtggggatctcgccgcccccgctgaggacgcggcgccggccggatctgaggacgccccggccccggcggtgacgccggacgagaccgcggcacctgccaaggcgccggccaagaagggtggatccggggacgccgccggggtccggaaggcgaggccgcagaacggcagggtgcccgccgccgccgccgccgcgccgagggtgaagaagcccggggtcctctcgcagagcgcctccttcccggcgcggggtgccgccgccaagaaggcctcggcggttgctactcccaagcaggccaagggcgtcgtgaccaatggatcagaggcggcagcaggcagccgagaagaaggcgaattcagcgcggacacctgtcgctcgccggtcgatgcctgtcaagtctggatcagcggatgcggccgccccaaatgacgcaattcccgctgtccaagagccacatgaaaacaccgacaagccattgaaacaaatgcagccagggaaaacagaggatgatgtgcgctctaccacatcaagtaccaatactccgcgtgcagcagctcgcaagagtgctgctgttgctgctggttttagtttcagattggaggagcgtgctgagaagagaaaggagtttttccaaaagcttgaagagaaaatccacgcaaaggagctggaaaaaacaaatctgcaggagaaatctaaggagagccaagaggctgagatcaaactgctgaggaagagcctaacatttaaagccacacctatgccaagcttttacaaggagcagccacccaaagttgagttgaaaaagattcccccaacacgcgctaggtcgccaaagctcggccggcacaagccagccaattctgccactgctgcttctgcggatggttctgtatcatgtgagagcccacggagcactgcaaattcgagcaaggcgtctgcgaccacaaaggctgaagcaagacccgtggtcacaaggccaaagatctcaaactcgaaacctaaggcttcaagggcaaaggttgcgcgagcgcaagaaaccccagctgaagcccctccttcagaacctgctgctccagaagatttcacggttgaacatggcgttggagacgccacaggtcctgatctgaccgcgcaattggttgcttcgaacgaagtcccagtccatggttgatcagctgagcattttgcatatttattcccttcttgcagttctgtgaatagcgagggtgtgtgcttcattggaagttgaatcgctcgaagtgtcatggtttatcgtttccggagtagacatccattttgtttttcagcttgtcatcgggcatgccatgtatattgcttggtattgtgttcttgtttaaaatttccagtcttgtgtatattggatttgtttgtcgctggagatcctaggattgttgcaatacgctgaggcaaattgtggattgttttgtggctgttttacttttagccccg

SEQ ID NO: 23283 - DNA, 1917 bp, Zea Mays
acaccaactcctccatccaactcggcaactccacgcagccagcccggcgcctcccatcagtgggtgggtgggtggttcgcctcctcatcctctcctccccgcacgtccacggcgatggcgcccgcgcccccgcactgctgacccacccccgccgcgcactctcatgaccgtggtttggtaggtggggcggaggttggtaggccgggacgtgccggcaggcggttacgggaggcgcggccgcgatcccgggccggatctggacgccgcgatggaggacgccgttgccgctgagaatgggatcgagggggagggctacgtcgtcgtcaaggcggcggcggccgcggaggcggagggggactccggcgccagcgatcgtggggatctcgccgcccccgctgaggacgcggcgccggccggatctgaggacgccccggccccggcggtgacgccggacgagaccgcggcacctgccaaggcgccggccaagaagggtggatccggggacgccgccggggtccggaaggcgaggccgcagaacggcagggtgcccgccgccgccgccgccgcgccgagggtgaagaagcccggggtcctctcgcagagcgcctccttcccggcgcggggtgccgccgccaagaaggcctcggcggttgctactcccaagcaggccaagggcgtcgtgaccaatggatcagaggcggcagcaggccgggcagccgagaagaaggcgaattcagcgcggacacctgtcgctcgccggtcgatgcctgtcaagtctggatcagcggatgcggccgccccaaatgacgcaattcccgctgtccaagagccacatgaaaacaccgacaagccattgaaacaaatgcagccagggaaaacagaggatgatgtgcgctctaccacatcaagtaccaatactccgcgtgcagcagctcgcaagagtgctgctgttgctgctggttttagtttcagattggaggagcgtgctgagaagagaaaggagtttttccaaaagcttgaagagaaaatccacgcaaaggagctggaaaaaacaaatctgcaggagaaatctaaggagagccaagaggctgagatcaaactgctgaggaagagcctaacatttaaagccacacctatgccaagcttttacaaggagcagccacccaaaattcccccaacacgcgctaggtcgccaaagctcggccggcacaagccagccaattctgccactgctgcttctgcggatggttctgtatcatgtgagagcccacggagcactgcaaattcgagcaaggtaaatgaagcgatggaaaacaacaaacctcatgcccctgctagaaaacctgttcagaggccagtcgtgaaagctccatcacaggcgtctgcgaccacaaaggctgaagcaagacccgtggtcacaaggccaaagatctcaaactcgaaacctaaggcttcaagggcaaaggttgcgcgagcgcaagaaaccccagctgaagcccctccttcagaacctgctgctccagaagatttcacggttgaacatggcgttggagacgccacaggtcctgatctgaccgcgcaattggttgcttcgaacgaagtcccagtccatggttgatcagctgagcattttgcatatttattcccttcttgcagttctgtgaatagcgagggtgtgtgcttcattggaagttgaatcgctcgaagtgtcatggtttatcgtttccggagtagacatccattttgtttttcagcttgtcatcgggcatgccatgtatattgcttggtattgtgttcttgtttaaaatttccagtcttgtgtatattggatttgtttgtcgctggagatcctaggattgttgcaatacgctgaggcaaattgtggattgttttgtggctgttttacttttagccccg

SEQ ID NO: 23284 - DNA, 1818 bp, Zea Mays
acaccaactcctccatccaactcggcaactccacgcagccagcccggcgcctcccatcagtgggtgggtggggcggaggttggtaggccgggacgtgccggcaggcggttacgggaggcgcggccgcgatcccgggccggatctggacgccgcgatggaggacgccgttgccgctgagaatgggatcgagggggagggctacgtcgtcgtcaaggcggcggcggccgcggaggcggagggggactccggcgccagcgatcgtggggatctcgccgcccccgctgaggacgcggcgccggccggatctgaggacgccccggccccggcggtgacgccggacgagaccgcggcacctgccaaggcgccggccaagaagggtggatccggggacgccgccggggtccggaaggcgaggccgcagaacggcagggtgcccgccgccgccgccgccgcgccgagggtgaagaagcccggggtcctctcgcagagcgcctccttcccggcgcggggtgccgccgccaagaaggcctcggcggttgctactcccaagcaggccaagggcgtcgtgaccaatggatcagaggcggcagcaggccgggcagccgagaagaaggcgaattcagcgcggacacctgtcgctcgccggtcgatgcctgtcaagtctggatcagcggatgcggccgccccaaatgacgcaattcccgctgtccaagagccacatgaaaacaccgacaagccattgaaacaaatgcagccagggaaaacagaggatgatgtgcgctctaccacatcaagtaccaatactccgcgtgcagcagctcgcaagagtgctgctgttgctgctggttttagtttcagattggaggagcgtgctgagaagagaaaggagtttttccaaaagcttgaagagaaaatccacgcaaaggagctggaaaaaacaaatctgcaggagaaatctaaggagagccaagaggctgagatcaaactgctgaggaagagcctaacatttaaagccacacctatgccaagcttttacaaggagcagccacccaaagttgagttgaaaaagattcccccaacacgcgctaggtcgccaaagctcggccggcacaagccagccaattctgccactgctgcttctgcggatggttctgtatcatgtgagagcccacggagcactgcaaattcgagcaaggtaaatgaagcgatggaaaacaacaaacctcatgcccctgctagaaaacctgttcagaggccagtcgtgaaagctccatcacaggcgtctgcgaccacaaaggctgaagcaagacccgtggtcacaaggccaaagatctcaaactcgaaacctaaggcttcaagggcaaaggttgcgcgagcgcaagaaaccccagctgaagcccctccttcagaacctgctgctccagaagatttcacggttgaacatggcgttggagacgccacaggtcctgatctgaccgcgcaattggttgcttcgaacgaagtcccagtccatggttgatcagctgagcattttgcatatttattcccttcttgcagttctgtgaatagcgagggtgtgtgcttcattggaagttgaatcgctcgaagtgtcatggtttatcgtttccggagtagacatccattttgtttttcagcttgtcatcgggcatgccatgtatattgcttggtattgtgttcttgtttaaaatttccagtcttgtgtatattggatttgtttgtcgctggagatcctaggattgttgcaatacgctgaggcaaattgtggattgttttgtggctgttttacttttagccccg

SEQ ID NO: 23285 - DNA, 1210 bp, Zea Mays
agcgagcatccgcacttgggagaagagagatgatcttcccgacgggaagggacgagatctggttcgacaccggggtccccgttcccgaggtctccactgggtacttcgtcggcagaccacatcttctgccccgacccctcatcccagcggtgctccacgcatgtacgccttctgttctgcaggtggtttatgccagttaatatagcgatcacgttcgtgatcggtggcactctgggctagatagcttgcaacatgttgaagccaccgtagcatttcaggggcttgatcatggccttctgctcagcaggaaacctcggaaacctgctcctgatcattgtcccggatgtatgcgatgaagacgggcctgtttggggatgattcaagcacttgccgctcacgcagtatctcctactcgtccttgtccatggctctaggtggcctcttcatatggacgcacacgtacagcctgatgcagaagtccggcaagctgtaccacaagatgcagtccaaaagcatctagtgcccagccaacagcgatgaggagcatgagcaagcgaaagaagatgggccagctggctacgctgacgaggaggcacctcttccgacgtcactcaagcctcgcgagcatgagcacgagcacggggaagaggaagaacaccaaatggaggcccctctcttgtcctgcgagagcgaggtcgctgacaaggggttctggacgaagccgaaagacgctatccaccagttcatcgaggagttgatggcaccacccaccatgtccgcaataattgggttcgttgttggcctgttcccatggctgaaatccttaatcgtcggtgacggagctcctttcaaagttatgcaggattccctccagctgatgagcgacgacatgatcccttgcatcacccttatcctaggcggaaacctgactcaagggcttcgaaagtcggggctgaagcgggcggtgatcgtcgcgatcctatgcgtccgcttcgtgctcctcccgctgatcggcatcgtcatcgtccgcgccgtgtacgggctcggcttcctgtcccgcgacccgctgtactgctatgtgctgatggtgtcaggatgacatgtcaggttgggatatcctggcgtactttattcaaacagccctcttgcttcaagcaagagaccaagtatcttaagagttaagacttatgttaaatatatttagaaacta

SEQ ID NO: 23286 - DNA, 3945 bp, Zea Mays
gttatttccgaaagccaattttgtgtcacacctcctccgctaccaccattccacaccaccgcgggtcctcccgccagcctcgagagaaccgcgcgccgcgcccccatcttttcccccaaaccctccgcgcgagcccgaggccccgagcgtcaggcaaggccgcacaccgccgccgcttcccctcatcatccgtctcctccccatccctttcccctcatccgcattcggtaggctgtggcgccagtgtccgcttcaggactggattggtcgtgggaagcaagaaccgcccgcccgcgcattagaaccctagcccccgccaatctaacagcgcaaagaatccggaaaacccccggcttttcggtctcccgagcccgggagatccatccttcgctgcgtcggagatgtcgtccgacatccgtaaatggttcatgaagccgcaggacaagagcgcggcggcatctggagccgccgggaagccctcggggtcggcggctgagaagaagcccgtgctcagcattccggagaagaagtcggcgccccccgcattggcgtcctgtgaccatgatacttccgctagaaggaagacaagcaaatattttgggtcaaaagcagaaaaggactcagatgtccaaatggcagacgcctctggggggaagagtgcggctaaaagaaaacttcagaaatgcaacgatgaagtcaaggaggacagcaagccttttccagcaaagaaaatgtttgatgatgaagaagatgacgattttgtggcacctgcaaagaagaaaactccagtgaagccaccaccttcaaaaaagcttaaagttgaatctaatgttgaagcccctgcaaagactactggtgttgatgatgctgaggatgaggacaggatggatgaagatgccaagaccccctctaaaggagctggaaggggaaggggaagaggaggaagaggaggagcaggagctgcccctgggggcagaggtagaggaggtgggagaggttttatgaattttggtgagaggaaagatcctcctcacaaaggagaaaagtcttgaacgtgaggaagcaactgatctaattaagcgttatggtggccgtgtgactggctctattagtaaaaagacgagctacttattggccgacgaagacattggtggagtcaaatctaacaaagcaaaagatctgggtgttccattcttgactgaagatggtttatttgatttgatccgaaaatcaaagcctgcaaaggctcctgtagacaaacgtcaaaacaacaacagttctgaaaagcttcagaaatcacagacaaagagctctccagctaaagttgaaaaacgagccgaagcaagtgctgtaggcaaaagtattgcttcaaacagtaatgctgcaagtgcctccgctgacaaacaaaagcccaagattgttgaccgtggttctatgcaatggacagaaaaatatcggccaaaagttccaaatgacatagttggcaatcaatcaatggtcaaacaacttcatgattggttaaaaagttgggatgcactattccttcattctggccaaaagggtaagggaaagaaacaaactgacagtgcagccaaaaaggctgtgttgctgagtggacctcctggtatcggtaagactacaactgctaaagttgttagtcagatgcttggtttgcaggccattgaggtaaatgcgagtgatagccgtggtaaggcagactccaagatcgagaagggtgttggggggagtacatcaaattctatcaaagagcttatcaacaacgcgactctgaattatagtgacaatcggttaaaacatcccaaagctgtactagttatggatgaagttgatggtatgtctgctggagatagaggtggtgttgctgatcttattgctagcatcaagatatccaagatccctattatctgcatttgtaatgaccgttatagtcagaaattgaagaatcttgtgaattactgccttatgctcaacttcagaaagccaacaaaacaacagatgggtaaaagattgatggaaattgccaaaaaggaaggtattcaagctcaagagaatgcaatggaagagcttgctgaaagagtgcacggagatattcgcatggcactcaaccatttgcagtatatgagcctctcccagtctgtggtcaaatatgatgatataaaggagcgacttaatagcagttcaaaggatgaagatatttctccttttactgctgttgacaaactttttggtttcaatggcgggaggttaaggatggatgagagaatggattttggcatgagcgatcctgatttagttcccttgatcatccaggaaaattatatcaattatcggcctaacaccatcggcaaggatgaaagtggagttaaaagaatgaatgctttagcccgggctgctgaatctatagcggacggtgatcttgttaatgtacagataagaagatatcgacagtggcagctgtcacaagctgcttgttttgcttcatctatagtacctgccgctttgatgcatgggaacagagaaatccttgaagcaggtgagcgaaactttaataggtttggtggatggttgggtaagtactcgactactaacaaaaacagaaggctactggaagatgtccacagtcatattcttgcctcccagcaagcaaacttggacagggatgcattgaggttggattatcttactcttatcttgagagagctgactgacccactgaaaaaaatgtcaaaggatgaagctgttcaaaaggtggtagagtttatggatacatactctttaagccaggaagacttcgatacaattgttgaagtatccaaatttaagggtcatccaagtcctatggatgggattcaacctgctgttaaaagtgccttgacaaaggcatacaaacaaggaagtagttcccgtgttgttcgagcagcagatctaataaacattccaggcatgaaaaagcctttaaagaaacgagtggcggcgatcttggagccggtagaagagagcctacctgaagaaaatggactagcatcagctgaagatgatgaagatggttcttctgatgctgaaaataatgatgagcttgtgcctgctgactctacgccgaagctggacctgcaaagcgacaagaagaaaggaatccaagtgcagcttgacctgaagagcaatggggatggcccgcgcgggaagaaggcgcctgctgccaggtcaagagcaaccgggtcaggtgggaaggccgcggcgggaggaggttcggctgggaagaggaagaggtaaatgagacatttggcgcctgcccacagttggccggtggttagtttggacgcacagatcccttggtaaataaggagcaggggtggtaagcttcagagttttgctcatctaatggcacatgtaggcactaggctactgtgcctgctcccatattttctcccagggcacccatgtcttgctaccagaatttgtttgcacttaggctacttccaggttgtggcaatcgagagtttggtgttgtctgtttcatttagcgaatttgtcagtactctataccacgggtcgttgcctcgttggctttgtcttcgtattctcttgtgcattttcgcgttggtagacagggttttatgtgtaaagaaaatgcagtagcgaggcatttaggcaggtaaggagaaacaaaaagattgcttggttgtggtttactattactattaggccaaccccatcgctccatgctggcttgtaatcccagcttgcatagttcacgttttttgatcctccagatttgctggtgtaagtgtttggataacgtctttgtaactttaaaaagccgtaggcgatggattgttctgttcaccgaccagcagcttatgcatccgaccatccctatatcaacatttaaactatgcgaacaatgtaaatagtgttttggatgac

SEQ ID NO: 23287 - DNA, 4465 bp, Zea Mays
cgaaagccaattttgtgtcacacctcctccgctaccaccattccacaccaccgcgggtcctcccgccagcctcgagagaaccgcgcgccgcgcccccatcttttcccccaaaccctccgcgcgagcccgaggccccgagcgtcaggcaaggccgcacaccgccgccgcttcccctcatcatccgtctcctccccatccctttcccctcatccgcattcggtaggctgtggcgccagtgtccgcttcaggactggattggtcgtgggaagcaagaaccgcccgcccgcgcattagaaccctagcccccgccaatctaacagcgcaaagaatccggaaaacccccggcttttcggtctcccgagcccgggagatccatccttcgctgcgtcggagatgtcgtccgacatccgtaaatggttcatgaagccgcaggacaagagcgcggcggcatctggagccgccgggaagccctcggggtcggcggctgagaagaagcccgtgctcagcattccggagaagaagtcggcgccccccgcattggcgtcctgtgaccatgatacttccgctagaaggaagacaagcaaatattttgggtcaaaagcagaaaaggactcagatgtccaaatggcagacgcctctggggggaagagtgcggctaaaagaaaacttcagaaatgcaacgatgaagtcaaggaggacagcaagccttttccagcaaagaaaatgtttgatgatgaagaagatgacgattttgtggcacctgcaaagaagaaaactccagtgaagccaccaccttcaaaaaagcttaaagttgaatctaatgttgaagcccctgcaaagactactggtgttgatgatgctgaggatgaggacaggatggatgaagatgccaagaccccctctaaaggagctggaaggggaaggggaagaggaggaagaggaggagcaggagctgcccctgggggcagaggtagaggaggtgggagaggttttatgaattttggtgagaggaaagatcctcctcacaaaggagaaaaggaggtcccagagggtgcccctgactgtttatctggtctgacatttgtcataagtggtaccctcgacagtcttgaacgtgaggaagcaactgatctaattaagcgttatggtggccgtgtgactggctctattagtaaaaagacgagctacttattggccgacgaagacattggtggagtcaaatctaacaaagcaaaagatctgggtgttccattcttgactgaagatggtttatttgatttgatccgaaaatcaaagcctgcaaaggctcctgtagacaaacgtcaaaacaacaacagttctgaaaagcttcagaaatcacagacaaagagctctccagctaaagttgaaaaacgagccgaagcaagtgctgtaggcaaaagtattgcttcaaacagtaatgctgcaagtgcctccgctgacaaacaaaagcccaagattgttgaccgtggttctatgcaatggacagaaaaatatcggccaaaagttccaaatgacatagttggcaatcaatcaatggtcaaacaacttcatgattggttaaaaagttgggatgcactattccttcattctggccaaaagggtaagggaaagaaacaaactgacagtgcagccaaaaaggctgtgttgctgagtggacctcctggtatcggtaagactacaactgctaaagttgttagtcagatgcttggtttgcaggccattgaggtaaatgcgagtgatagccgtggtaaggcagactccaagatcgagaagggtgttggggggagtacatcaaattctatcaaagagcttatcaacaacgcgactctgaattatagtgacaatcggttaaaacatcccaaagctgtactagttatggatgaagttgatggtatgtctgctggagatagaggtggtgttgctgatcttattgctagcatcaagatatccaagatccctattatctgcatttgtaatgaccgttatagtcagaaattgaagaatcttgtgaattactgccttatgctcaacttcagaaagccaacaaaacaacagatgggtaaaagattgatggaaattgccaaaaaggaaggtattcaagctcaagagaatgcaatggaagagcttgctgaaagagtgcacggagatattcgcatggcactcaaccatttgcagtatatgagcctctcccagtctgtggtcaaatatgatgatataaaggagcgacttaatagcagttcaaaggatgaagatatttctccttttactgctgttgacaaactttttggtttcaatggcgggaggttaaggatggatgagagaatggattttggcatgagcgatcctgatttagttcccttgatcatccaggaaaattatatcaattatcggcctaacaccatcggcaaggatgaaagtggagttaaaagaatgaatgctttagcccgggctgctgaatctatagcggacggtgatcttgttaatgtacagataagaagatatcgacagtggcagctgtcacaagctgcttgttttgcttcatctatagtacctgccgctttgatgcatgggaacagagaaatccttgaagcaggtgagcgaaactttaataggtttggtggatggttgggtaagtactcgactactaacaaaaacagaaggctactggaagatgtccacagtcatattcttgcctcccagcaagcaaacttggacagggatgcattgaggttggattatcttactcttatcttgagagagctgactgacccactgaaaaaaatgtcaaaggatgaagctgttcaaaaggtggtagagtttatggatacatactctttaagccaggaagacttcgatacaattgttgaagtatccaaatttaagggtcatccaagtcctatggatgggattcaacctgctgttaaaagtgccttgacaaaggcatacaaacaaggaagtagttcccgtgttgttcgagcagcagatctaataaacattccaggcatgaaaaagcctttaaagaaacgagtggcggcgatcttggagccggtagaagagagcctacctgaagaaaatggactagcatcagctgaagatgatgaagatggttcttctgatgctgaaaataatggtgcatgttctcctttcccacgtaacaaacataaaaaatctggtagatgcctgtttgtttggctaatgtgtcaggcattaggataaaatggatctgttttgaggcaactttgtggtgccacactgactgacttcatttaacgcaattgtgaaagtacccatttttatggagatttgtagcatcattcaggcaaatgcaaatcgagatcatatagacatgaacttgtgaaatagctacacctaactatagacaggtttacataattacatgtacttcaagacacaccatactaatatatggtagagccagttctatcgcaagtttttagtcagttggatgctaatggaagctgcatccattagcacagttggtaaagcgtttttagtcagttgggatgctttgggagttgcatccagaaaggttcatatggcttgctgtctaatcacttttttcccttcagatgagcttgtgcctgctgactctacgccgaagctggacctgcaaagcgacaagaagaaaggaatccaagtgcagcttgacctgaagagcaatggggatggcccgcgcgggaagaaggcgcctgctgccaggtcaagagcaaccgggtcaggtgggaaggccgcggcgggaggaggttcggctgggaagaggaagaggtaaatgagacatttggcgcctgcccacagttggccggtggttagtttggacgcacagatcccttggtaaataaggagcaggggtggtaagcttcagagttttgctcatctaatggcacatgtaggcactaggctactgtgcctgctcccatattttctcccagggcacccatgtcttgctaccagaatttgtttgcacttaggctacttccaggttgtggcaatcgagagtttggtgttgtctgtttcatttagcgaatttgtcagtactctataccacgggtcgttgcctcgttggctttgtcttcgtattctcttgtgcattttcgcgttggtagacagggttttatgtgtaaagaaaatgcagtagcgaggcatttaggcaggtaaggagaaacaaaaagattgcttggttgtggtttactattactattaggccaaccccatcgctccatgctggcttgtaatcccagcttgcatagttcacgttttttgatcctccagatttgctggtgtaagtgtttggataacgtctttgtaactttaaaaagccgtaggcgatggattgttctgttcaccgaccagcagcttatgcatccgaccatccctatatcaacatttaaactatgcgaacaatgtaaatagtgttttggatgac

SEQ ID NO: 23288 - DNA, 4012 bp, Zea Mays
caattttgtgtcacacctcctccgctaccaccattccacaccaccgcgggtcctcccgccagcctcgagagaaccgcgcgccgcgcccccatcttttcccccaaaccctccgcgcgagcccgaggccccgagcgtcaggcaaggccgcacaccgccgccgcttcccctcatcatccgtctcctccccatccctttcccctcatccgcattcggtaggctgtggcgccagtgtccgcttcaggactggattggtcgtgggaagcaagaaccgcccgcccgcgcattagaaccctagcccccgccaatctaacagcgcaaagaatccggaaaacccccggcttttcggtctcccgagcccgggagatccatccttcgctgcgtcggagatgtcgtccgacatccgtaaatggttcatgaagccgcaggacaagagcgcggcggcatctggagccgccgggaagccctcggggtcggcggctgagaagaagcccgtgctcagcattccggagaagaagtcggcgccccccgcattggcgtcctgtgaccatgatacttccgctagaaggaagacaagcaaatattttgggtcaaaagcagaaaaggactcagatgtccaaatggcagacgcctctggggggaagagtgcggctaaaagaaaacttcagaaatgcaacgatgaagtcaaggaggacagcaagccttttccagcaaagaaaatgtttgatgatgaagaagatgacgattttgtggcacctgcaaagaagaaaactccagtgaagccaccaccttcaaaaaagcttaaagttgaatctaatgttgaagcccctgcaaagactactggtgttgatgatgctgaggatgaggacaggatggatgaagatgccaagaccccctctaaaggagctggaaggggaaggggaagaggaggaagaggaggagcaggagctgcccctgggggcagaggtagaggaggtgggagaggttttatgaattttggtgagaggaaagatcctcctcacaaaggagaaaaggaggtcccagagggtgcccctgactgtttatctggtctgacatttgtcataagtggtaccctcgacaggtgccaatttctattcttgaacgtgaggaagcaactgatctaattaagcgttatggtggccgtgtgactggctctattagtaaaaagacgagctacttattggccgacgaagacattggtggagtcaaatctaacaaagcaaaagatctgggtgttccattcttgactgaagatggtttatttgatttgatccgaaaatcaaagcctgcaaaggctcctgtagacaaacgtcaaaacaacaacagttctgaaaagcttcagaaatcacagacaaagagctctccagctaaagttgaaaaacgagccgaagcaagtgctgtaggcaaaagtattgcttcaaacagtaatgctgcaagtgcctccgctgacaaacaaaagcccaagattgttgaccgtggttctatgcaatggacagaaaaatatcggccaaaagttccaaatgacatagttggcaatcaatcaatggtcaaacaacttcatgattggttaaaaagttgggatgcactattccttcattctggccaaaagggtaagggaaagaaacaaactgacagtgcagccaaaaaggctgtgttgctgagtggacctcctggtatcggtaagactacaactgctaaagttgttagtcagatgcttggtttgcaggccattgaggtaaatgcgagtgatagccgtggtaaggcagactccaagatcgagaagggtgttggggggagtacatcaaattctatcaaagagcttatcaacaacgcgactctgaattatagtgacaatcggttaaaacatcccaaagctgtactagttatggatgaagttgatggtatgtctgctggagatagaggtggtgttgctgatcttattgctagcatcaagatatccaagatccctattatctgcatttgtaatgaccgttatagtcagaaattgaagaatcttgtgaattactgccttatgctcaacttcagaaagccaacaaaacaacagatgggtaaaagattgatggaaattgccaaaaaggaaggtattcaagctcaagagaatgcaatggaagagcttgctgaaagagtgcacggagatattcgcatggcactcaaccatttgcagtatatgagcctctcccagtctgtggtcaaatatgatgatataaaggagcgacttaatagcagttcaaaggatgaagatatttctccttttactgctgttgacaaactttttggtttcaatggcgggaggttaaggatggatgagagaatggattttggcatgagcgatcctgatttagttcccttgatcatccaggaaaattatatcaattatcggcctaacaccatcggcaaggatgaaagtggagttaaaagaatgaatgctttagcccgggctgctgaatctatagcggacggtgatcttgttaatgtacagataagaagatatcgacagtggcagctgtcacaagctgcttgttttgcttcatctatagtacctgccgctttgatgcatgggaacagagaaatccttgaagcaggtgagcgaaactttaataggtttggtggatggttgggtaagtactcgactactaacaaaaacagaaggctactggaagatgtccacagtcatattcttgcctcccagcaagcaaacttggacagggatgcattgaggttggattatcttactcttatcttgagagagctgactgacccactgaaaaaaatgtcaaaggatgaagctgttcaaaaggtggtagagtttatggatacatactctttaagccaggaagacttcgatacaattgttgaagtatccaaatttaagggtcatccaagtcctatggatgggattcaacctgctgttaaaagtgccttgacaaaggcatacaaacaaggaagtagttcccgtgttgttcgagcagcagatctaataaacattccaggcatgaaaaagcctttaaagaaacgagtggcggcgatcttggagccggtagaagagagcctacctgaagaaaatggactagcatcagctgaagatgatgaagatggttcttctgatgctgaaaataatgatgagcttgtgcctgctgactctacgccgaagctggacctgcaaagcgacaagaagaaaggaatccaagtgcagcttgacctgaagagcaatggggatggcccgcgcgggaagaaggcgcctgctgccaggtcaagagcaaccgggtcaggtgggaaggccgcggcgggaggaggttcggctgggaagaggaagaggtaaatgagacatttggcgcctgcccacagttggccggtggttagtttggacgcacagatcccttggtaaataaggagcaggggtggtaagcttcagagttttgctcatctaatggcacatgtaggcactaggctactgtgcctgctcccatattttctcccagggcacccatgtcttgctaccagaatttgtttgcacttaggctacttccaggttgtggcaatcgagagtttggtgttgtctgtttcatttagcgaatttgtcagtactctataccacgggtcgttgcctcgttggctttgtcttcgtattctcttgtgcattttcgcgttggtagacagggttttatgtgtaaagaaaatgcagtagcgaggcatttaggcaggtaaggagaaacaaaaagattgcttggttgtggtttactattactattaggccaaccccatcgctccatgctggcttgtaatcccagcttgcatagttcacgttttttgatcctccagatttgctggtgtaagtgtttggataacgtctttgtaactttaaaaagccgtaggcgatggattgttctgttcaccgaccagcagcttatgcatccgaccatccctatatcaacatttaaactatgcgaacaatgtaaatagtgttttggatgac

SEQ ID NO: 23289 - DNA, 3918 bp, Zea Mays
caccattccacaccaccgcgggtcctcccgccagcctcgagagaaccgcgcgccgcgcccccatcttttcccccaaaccctccgcgcgagcccgaggccccgagcgtcaggcaaggccgcacaccgccgccgcttcccctcatcatccgtctcctccccatccctttcccctcatccgcattcggtaggctgtggcgccagtgtccgcttcaggactggattggtcgtgggaagcaagaaccgcccgcccgcgcattagaaccctagcccccgccaatctaacagcgcaaagaatccggaaaacccccggcttttcggtctcccgagcccgggagatccatccttcgctgcgtcggagatgtcgtccgacatccgtaaatggttcatgaagccgcaggacaagagcgcggcggcatctggagccgccgggaagccctcggggtcggcggctgagaagaagcccgtgctcagcattccggagaagaagtcggcgccccccgcattggcgtcctgtgaccatgatacttccgctagaaggaagacaagcaaatattttgggtcaaaagcagaaaaggactcagatgtccaaatggcagacgcctctggggggaagagtgcggctaaaagaaaacttcagaaatgcaacgatgaagtcaaggaggacagcaagccttttccagcaaagaaaatgtttgatgatgaagaagatgacgattttgtggcacctgcaaagaagaaaactccagtgaagccaccaccttcaaaaaagcttaaagttgaatctaatgttgaagcccctgcaaagactactggtgttgatgatgctgaggatgaggacaggatggatgaagatgccaagaccccctctaaaggagctggaaggggaaggggaagaggaggaagaggaggagcaggagctgcccctgggggcagaggtagaggaggtgggagaggttttatgaattttggtgagaggaaagatcctcctcacaaaggagaaaaggaggtcccagagggtgcccctgactgtttatctggtctgacatttgtcataagtggtaccctcgacagtcttgaacgtgaggaagcaactgatctaattaagcgttatggtggccgtgtgactggctctattagtaaaaagacgagctacttattggccgacgaagacattggtggagtcaaatctaacaaagcaaaagatctgggcctgcaaaggctcctgtagacaaacgtcaaaacaacaacagttctgaaaagcttcagaaatcacagacaaagagctctccagctaaagttgaaaaacgagccgaagcaagtgctgtaggcaaaagtattgcttcaaacagtaatgctgcaagtgcctccgctgacaaacaaaagcccaagattgttgaccgtggttctatgcaatggacagaaaaatatcggccaaaagttccaaatgacatagttggcaatcaatcaatggtcaaacaacttcatgattggttaaaaagttgggatgcactattccttcattctggccaaaagggtaagggaaagaaacaaactgacagtgcagccaaaaaggctgtgttgctgagtggacctcctggtatcggtaagactacaactgctaaagttgttagtcagatgcttggtttgcaggccattgaggtaaatgcgagtgatagccgtggtaaggcagactccaagatcgagaagggtgttggggggagtacatcaaattctatcaaagagcttatcaacaacgcgactctgaattatagtgacaatcggttaaaacatcccaaagctgtactagttatggatgaagttgatggtatgtctgctggagatagaggtggtgttgctgatcttattgctagcatcaagatatccaagatccctattatctgcatttgtaatgaccgttatagtcagaaattgaagaatcttgtgaattactgccttatgctcaacttcagaaagccaacaaaacaacagatgggtaaaagattgatggaaattgccaaaaaggaaggtattcaagctcaagagaatgcaatggaagagcttgctgaaagagtgcacggagatattcgcatggcactcaaccatttgcagtatatgagcctctcccagtctgtggtcaaatatgatgatataaaggagcgacttaatagcagttcaaaggatgaagatatttctccttttactgctgttgacaaactttttggtttcaatggcgggaggttaaggatggatgagagaatggattttggcatgagcgatcctgatttagttcccttgatcatccaggaaaattatatcaattatcggcctaacaccatcggcaaggatgaaagtggagttaaaagaatgaatgctttagcccgggctgctgaatctatagcggacggtgatcttgttaatgtacagataagaagatatcgacagtggcagctgtcacaagctgcttgttttgcttcatctatagtacctgccgctttgatgcatgggaacagagaaatccttgaagcaggtgagcgaaactttaataggtttggtggatggttgggtaagtactcgactactaacaaaaacagaaggctactggaagatgtccacagtcatattcttgcctcccagcaagcaaacttggacagggatgcattgaggttggattatcttactcttatcttgagagagctgactgacccactgaaaaaaatgtcaaaggatgaagctgttcaaaaggtggtagagtttatggatacatactctttaagccaggaagacttcgatacaattgttgaagtatccaaatttaagggtcatccaagtcctatggatgggattcaacctgctgttaaaagtgccttgacaaaggcatacaaacaaggaagtagttcccgtgttgttcgagcagcagatctaataaacattccaggcatgaaaaagcctttaaagaaacgagtggcggcgatcttggagccggtagaagagagcctacctgaagaaaatggactagcatcagctgaagatgatgaagatggttcttctgatgctgaaaataatgatgagcttgtgcctgctgactctacgccgaagctggacctgcaaagcgacaagaagaaaggaatccaagtgcagcttgacctgaagagcaatggggatggcccgcgcgggaagaaggcgcctgctgccaggtcaagagcaaccgggtcaggtgggaaggccgcggcgggaggaggttcggctgggaagaggaagaggtaaatgagacatttggcgcctgcccacagttggccggtggttagtttggacgcacagatcccttggtaaataaggagcaggggtggtaagcttcagagttttgctcatctaatggcacatgtaggcactaggctactgtgcctgctcccatattttctcccagggcacccatgtcttgctaccagaatttgtttgcacttaggctacttccaggttgtggcaatcgagagtttggtgttgtctgtttcatttagcgaatttgtcagtactctataccacgggtcgttgcctcgttggctttgtcttcgtattctcttgtgcattttcgcgttggtagacagggttttatgtgtaaagaaaatgcagtagcgaggcatttaggcaggtaaggagaaacaaaaagattgcttggttgtggtttactattactattaggccaaccccatcgctccatgctggcttgtaatcccagcttgcatagttcacgttttttgatcctccagatttgctggtgtaagtgtttggataacgtctttgtaactttaaaaagccgtaggcgatggattgttctgttcaccgaccagcagcttatgcatccgaccatccctatatcaacatttaaactatgcgaacaatgtaaatagtgttttggatgac

SEQ ID NO: 23290 - DNA, 3753 bp, Zea Mays
tccacaccaccgcgggtcctcccgccagcctcgagagaaccgcgcgccgcgcccccatcttttcccccaaaccctccgcgcgagcccgaggccccgagcgtcaggcaaggccgcacaccgccgccgcttcccctcatcatccgtctcctccccatccctttcccctcatccgcattcggtaggctgtggcgccagtgtccgcttcaggactggattggtcgtgggaagcaagaaccgcccgcccgcgcattagaaccctagcccccgccaatctaacagcgcaaagaatccggaaaacccccggcttttcggtctcccgagcccgggagatccatccttcgctgcgtcggagatgtcgtccgacatccgtaaatggttcatgaagccgcaggacaagagcgcggcggcatctggagccgccgggaagccctcggggtcggcggctgagaagaagcccgtgctcagcattccggagaagaagtcggcgccccccgcattggcgtcctgtgaccatgatacttccgctagaaggaagacaagcaaatattttgggtcaaaagcagaaaaggactcagatgtccaaatggcagacgcctctggggggaagagtgcggctaaaagaaaacttcagaaatgcaacgatgaagtcaaggaggacagcaagccttttccagcaaagaaaatgtttgatgatgaagaagatgacgattttgtggcacctgcaaagaagaaaactccagtgaagccaccaccttcaaaaaagcttaaagttgaatctaatgttgaagcccctgcaaagactactggtgttgatgatgctgaggatgaggacaggatggatgaagatgccaagaccccctctaaaggagctggaaggggaaggggaagaggaggaagaggaggagcaggagctgcccctgggggcagaggtagaggaggtgggagaggttttatgaattttggtgagaggaaagatcctcctcacaaaggagaaaagtcttgaacgtgaggaagcaactgatctaattaagcgttatggtggccgtgtgactggctctattagtaaaaagacgagctacttattggccgacgaagacattggtggagtcaaatctaacaaagcaaaagatctgggtgttccattcttgactgaagatggtttatttgatttgatccgaaaatcaaagcctgcaaaggctcctgtagacaaacgtcaaaacaacaacagttctgaaaagcttcagaaatcacagacaaagagctctccagctaaagttgaaaaacgagccgaagcaagtgctgtaggcaaaagtattgcttcaaacagtaatgctgcaagtgcctccgctgacaaacaaaagcccaagattgttgaccgtggttctatgcaatggacagaaaaatatcggccaaaagttccaaatgacatagttggcaatcaatcaatggtcaaacaacttcatgattggttaaaaagttgggatgcactattccttcattctggccaaaagggtaagggaaagaaacaaactgacagtgcagccaaaaaggctgtgttgctgagtggacctcctggtatcggtaagactacaactgctaaagttgttagtcagatgcttggtttgcaggccattgaggtaaatgcgagtgatagccgtggtaaggcagactccaagatcgagaagggtgttggggggagtacatcaaattctatcaaagagcttatcaacaacgcgactctgaattatagtgacaatcggttaaaacatcccaaagctgtactagttatggatgaagttgatggtatgtctgctggagatagagatgggtaaaagattgatggaaattgccaaaaaggaaggtattcaagctcaagagaatgcaatggaagagcttgctgaaagagtgcacggagatattcgcatggcactcaaccatttgcagtatatgagcctctcccagtctgtggtcaaatatgatgatataaaggagcgacttaatagcagttcaaaggatgaagatatttctccttttactgctgttgacaaactttttggtttcaatggcgggaggttaaggatggatgagagaatggattttggcatgagcgatcctgatttagttcccttgatcatccaggaaaattatatcaattatcggcctaacaccatcggcaaggatgaaagtggagttaaaagaatgaatgctttagcccgggctgctgaatctatagcggacggtgatcttgttaatgtacagataagaagatatcgacagtggcagctgtcacaagctgcttgttttgcttcatctatagtacctgccgctttgatgcatgggaacagagaaatccttgaagcaggtgagcgaaactttaataggtttggtggatggttgggtaagtactcgactactaacaaaaacagaaggctactggaagatgtccacagtcatattcttgcctcccagcaagcaaacttggacagggatgcattgaggttggattatcttactcttatcttgagagagctgactgacccactgaaaaaaatgtcaaaggatgaagctgttcaaaaggtggtagagtttatggatacatactctttaagccaggaagacttcgatacaattgttgaagtatccaaatttaagggtcatccaagtcctatggatgggattcaacctgctgttaaaagtgccttgacaaaggcatacaaacaaggaagtagttcccgtgttgttcgagcagcagatctaataaacattccaggcatgaaaaagcctttaaagaaacgagtggcggcgatcttggagccggtagaagagagcctacctgaagaaaatggactagcatcagctgaagatgatgaagatggttcttctgatgctgaaaataatgatgagcttgtgcctgctgactctacgccgaagctggacctgcaaagcgacaagaagaaaggaatccaagtgcagcttgacctgaagagcaatggggatggcccgcgcgggaagaaggcgcctgctgccaggtcaagagcaaccgggtcaggtgggaaggccgcggcgggaggaggttcggctgggaagaggaagaggtaaatgagacatttggcgcctgcccacagttggccggtggttagtttggacgcacagatcccttggtaaataaggagcaggggtggtaagcttcagagttttgctcatctaatggcacatgtaggcactaggctactgtgcctgctcccatattttctcccagggcacccatgtcttgctaccagaatttgtttgcacttaggctacttccaggttgtggcaatcgagagtttggtgttgtctgtttcatttagcgaatttgtcagtactctataccacgggtcgttgcctcgttggctttgtcttcgtattctcttgtgcattttcgcgttggtagacagggttttatgtgtaaagaaaatgcagtagcgaggcatttaggcaggtaaggagaaacaaaaagattgcttggttgtggtttactattactattaggccaaccccatcgctccatgctggcttgtaatcccagcttgcatagttcacgttttttgatcctccagatttgctggtgtaagtgtttggataacgtctttgtaactttaaaaagccgtaggcgatggattgttctgttcaccgaccagcagcttatgcatccgaccatccctatatcaacatttaaactatgcgaacaatgtaaatagtgttttggatgac

SEQ ID NO: 23291 - DNA, 4315 bp, Zea Mays
tccacaccaccgcgggtcctcccgccagcctcgagagaaccgcgcgccgcgcccccatcttttcccccaaaccctccgcgcgagcccgaggccccgagcgtcaggcaaggccgcacaccgccgccgcttcccctcatcatccgtctcctccccatccctttcccctcatccgcattcggtaggctgtggcgccagtgtccgcttcaggactggattggtcgtgggaagcaagaaccgcccgcccgcgcattagaaccctagcccccgccaatctaacagcgcaaagaatccggaaaacccccggcttttcggtctcccgagcccgggagatccatccttcgctgcgtcggagatgtcgtccgacatccgtaaatggttcatgaagccgcaggacaagagcgcggcggcatctggagccgccgggaagccctcggggtcggcggctgagaagaagcccgtgctcagcattccggagaagaagtcggcgccccccgcattggcgtcctgtgaccatgatacttccgctagaaggaagacaagcaaatattttgggtcaaaagcagaaaaggactcagatgtccaaatggcagacgcctctggggggaagagtgcggctaaaagaaaacttcagaaatgcaacgatgaagtcaaggaggacagcaagccttttccagcaaagaaaatgtttgatgatgaagaagatgacgattttgtggcacctgcaaagaagaaaactccagtgaagccaccaccttcaaaaaagcttaaagttgaatctaatgttgaagcccctgcaaagactactggtgttgatgatgctgaggatgaggacaggatggatgaagatgccaagaccccctctaaaggagctggaaggggaaggggaagaggaggaagaggaggagcaggagctgcccctgggggcagaggtagaggaggtgggagaggttttatgaattttggtgagaggaaagatcctcctcacaaaggagaaaaggaggtcccagagggtgcccctgactgtttatctggtctgacatttgtcataagtggtaccctcgacagtcttgaacgtgaggaagcaactgatctaattaagcgttatggtggccgtgtgactggctctattagtaaaaagacgagctacttattggccgacgaagacattggtggagtcaaatctaacaaagcaaaagatctgggcctgcaaaggctcctgtagacaaacgtcaaaacaacaacagttctgaaaagcttcagaaatcacagacaaagagctctccagctaaagttgaaaaacgagccgaagcaagtgctgtaggcaaaagtattgcttcaaacagtaatgctgcaagtgcctccgctgacaaacaaaagcccaagattgttgaccgtggttctatgcaatggacagaaaaatatcggccaaaagttccaaatgacatagttggcaatcaatcaatggtcaaacaacttcatgattggttaaaaagttgggatgcactattccttcattctggccaaaagggtaagggaaagaaacaaactgacagtgcagccaaaaaggctgtgttgctgagtggacctcctggtatcggtaagactacaactgctaaagttgttagtcagatgcttggtttgcaggccattgaggtaaatgcgagtgatagccgtggtaaggcagactccaagatcgagaagggtgttggggggagtacatcaaattctatcaaagagcttatcaacaacgcgactctgaattatagtgacaatcggttaaaacatcccaaagctgtactagttatggatgaagttgatggtatgtctgctggagatagagatgggtaaaagattgatggaaattgccaaaaaggaaggtattcaagctcaagagaatgcaatggaagagcttgctgaaagagtgcacggagatattcgcatggcactcaaccatttgcagtatatgagcctctcccagtctgtggtcaaatatgatgatataaaggagcgacttaatagcagttcaaaggatgaagatatttctccttttactgctgttgacaaactttttggtttcaatggcgggaggttaaggatggatgagagaatggattttggcatgagcgatcctgatttagttcccttgatcatccaggaaaattatatcaattatcggcctaacaccatcggcaaggatgaaagtggagttaaaagaatgaatgctttagcccgggctgctgaatctatagcggacggtgatcttgttaatgtacagataagaagatatcgacagtggcagctgtcacaagctgcttgttttgcttcatctatagtacctgccgctttgatgcatgggaacagagaaatccttgaagcaggtgagcgaaactttaataggtttggtggatggttgggtaagtactcgactactaacaaaaacagaaggctactggaagatgtccacagtcatattcttgcctcccagcaagcaaacttggacagggatgcattgaggttggattatcttactcttatcttgagagagctgactgacccactgaaaaaaatgtcaaaggatgaagctgttcaaaaggtggtagagtttatggatacatactctttaagccaggaagacttcgatacaattgttgaagtatccaaatttaagggtcatccaagtcctatggatgggattcaacctgctgttaaaagtgccttgacaaaggcatacaaacaaggaagtagttcccgtgttgttcgagcagcagatctaataaacattccaggcatgaaaaagcctttaaagaaacgagtggcggcgatcttggagccggtagaagagagcctacctgaagaaaatggactagcatcagctgaagatgatgaagatggttcttctgatgctgaaaataatggtgcatgttctcctttcccacgtaacaaacataaaaaatctggtagatgcctgtttgtttggctaatgtgtcaggcattaggataaaatggatctgttttgaggcaactttgtggtgccacactgactgacttcatttaacgcaattgtgaaagtacccatttttatggagatttgtagcatcattcaggcaaatgcaaatcgagatcatatagacatgaacttgtgaaatagctacacctaactatagacaggtttacataattacatgtacttcaagacacaccatactaatatatggtagagccagttctatcgcaagtttttagtcagttggatgctaatggaagctgcatccattagcacagttggtaaagcgtttttagtcagttgggatgctttgggagttgcatccagaaaggttcatatggcttgctgtctaatcacttttttcccttcagatgagcttgtgcctgctgactctacgccgaagctggacctgcaaagcgacaagaagaaaggttcccatacttgctgggcatatggtgcctatccatccctctgaattcactgcacctaacttcccggtaacctcatctgcttccaggaatccaagtgcagcttgacctgaagagcaatggggatggcccgcgcgggaagaaggcgcctgctgccaggtcaagagcaaccgggtcaggtgggaaggccgcggcgggaggaggttcggctgggaagaggaagaggtaaatgagacatttggcgcctgcccacagttggccggtggttagtttggacgcacagatcccttggtaaataaggagcaggggtggtaagcttcagagttttgctcatctaatggcacatgtaggcactaggctactgtgcctgctcccatattttctcccagggcacccatgtcttgctaccagaatttgtttgcacttaggctacttccaggttgtggcaatcgagagtttggtgttgtctgtttcatttagcgaatttgtcagtactctataccacgggtcgttgcctcgttggctttgtcttcgtattctcttgtgcattttcgcgttggtagacagggttttatgtgtaaagaaaatgcagtagcgaggcatttaggcaggtaaggagaaacaaaaagattgcttggttgtggtttactattactattaggccaaccccatcgctccatgctggcttgtaatcccagcttgcatagttcacgttttttgatcctccagatttgctggtgtaagtgtttggataacgtctttgtaactttaaaaagccgtaggcgatggattgttctgttcaccgaccagcagcttatgcatccgaccatccctatatcaacatttaaactatgcgaacaatgtaaatagtgttttggatgac

SEQ ID NO: 23292 - DNA, 3839 bp, Zea Mays
tccacaccaccgcgggtcctcccgccagcctcgagagaaccgcgcgccgcgcccccatcttttcccccaaaccctccgcgcgagcccgaggccccgagcgtcaggcaaggccgcacaccgccgccgcttcccctcatcatccgtctcctccccatccctttcccctcatccgcattcggtaggctgtggcgccagtgtccgcttcaggactggattggtcgtgggaagcaagaaccgcccgcccgcgcattagaaccctagcccccgccaatctaacagcgcaaagaatccggaaaacccccggcttttcggtctcccgagcccgggagatccatccttcgctgcgtcggagatgtcgtccgacatccgtaaatggttcatgaagccgcaggacaagagcgcggcggcatctggagccgccgggaagccctcggggtcggcggctgagaagaagcccgtgctcagcattccggagaagaagtcggcgccccccgcattggcgtcctgtgaccatgatacttccgctagaaggaagacaagcaaatattttgggtcaaaagcagaaaaggactcagatgtccaaatggcagacgcctctggggggaagagtgcggctaaaagaaaacttcagaaatgcaacgatgaagtcaaggaggacagcaagccttttccagcaaagaaaatgtttgatgatgaagaagatgacgattttgtggcacctgcaaagaagaaaactccagtgaagccaccaccttcaaaaaagcttaaagttgaatctaatgttgaagcccctgcaaagactactggtgttgatgatgctgaggatgaggacaggatggatgaagatgccaagaccccctctaaaggagctggaaggggaaggggaagaggaggaagaggaggagcaggagctgcccctgggggcagaggtagaggaggtgggagaggttttatgaattttggtgagaggaaagatcctcctcacaaaggagaaaaggaggtcccagagggtgcccctgactgtttatctggtctgacatttgtcataagtggtaccctcgacagtcttgaacgtgaggaagcaactgatctaattaagcgttatggtggccgtgtgactggctctattagtaaaaagacgagctacttattggccgacgaagacattggtggagtcaaatctaacaaagcaaaagatctgggtgttccattcttgactgaagatggtttatttgatttgatccgaaaatcaaagcctgcaaaggctcctgtagacaaacgtcaaaacaacaacagttctgaaaagcttcagaaatcacagacaaagagctctccagctaaagttgaaaaacgagccgaagcaagtgctgtaggcaaaagtattgcttcaaacagtaatgctgcaagtgcctccgctgacaaacaaaagcccaagattgttgaccgtggttctatgcaatggacagaaaaatatcggccaaaagttccaaatgacatagttggcaatcaatcaatggtcaaacaacttcatgattggttaaaaagttgggatgcactattccttcattctggccaaaagggtaaatgcgagtgatagccgtggtaaggcagactccaagatcgagaagggtgttggggggagtacatcaaattctatcaaagagcttatcaacaacgcgactctgaattatagtgacaatcggttaaaacatcccaaagctgtactagttatggatgaagttgatggtatgtctgctggagatagaggtggtgttgctgatcttattgctagcatcaagatatccaagatccctattatctgcatttgtaatgaccgttatagtcagaaattgaagaatcttgtgaattactgccttatgctcaacttcagaaagccaacaaaacaacagatgggtaaaagattgatggaaattgccaaaaaggaaggtattcaagctcaagagaatgcaatggaagagcttgctgaaagagtgcacggagatattcgcatggcactcaaccatttgcagtatatgagcctctcccagtctgtggtcaaatatgatgatataaaggagcgacttaatagcagttcaaaggatgaagatatttctccttttactgctgttgacaaactttttggtttcaatggcgggaggttaaggatggatgagagaatggattttggcatgagcgatcctgatttagttcccttgatcatccaggaaaattatatcaattatcggcctaacaccatcggcaaggatgaaagtggagttaaaagaatgaatgctttagcccgggctgctgaatctatagcggacggtgatcttgttaatgtacagataagaagatatcgacagtggcagctgtcacaagctgcttgttttgcttcatctatagtacctgccgctttgatgcatgggaacagagaaatccttgaagcaggtgagcgaaactttaataggtttggtggatggttgggtaagtactcgactactaacaaaaacagaaggctactggaagatgtccacagtcatattcttgcctcccagcaagcaaacttggacagggatgcattgaggttggattatcttactcttatcttgagagagctgactgacccactgaaaaaaatgtcaaaggatgaagctgttcaaaaggtggtagagtttatggatacatactctttaagccaggaagacttcgatacaattgttgaagtatccaaatttaagggtcatccaagtcctatggatgggattcaacctgctgttaaaagtgccttgacaaaggcatacaaacaaggaagtagttcccgtgttgttcgagcagcagatctaataaacattccaggcatgaaaaagcctttaaagaaacgagtggcggcgatcttggagccggtagaagagagcctacctgaagaaaatggactagcatcagctgaagatgatgaagatggttcttctgatgctgaaaataatgatgagcttgtgcctgctgactctacgccgaagctggacctgcaaagcgacaagaagaaaggaatccaagtgcagcttgacctgaagagcaatggggatggcccgcgcgggaagaaggcgcctgctgccaggtcaagagcaaccgggtcaggtgggaaggccgcggcgggaggaggttcggctgggaagaggaagaggtaaatgagacatttggcgcctgcccacagttggccggtggttagtttggacgcacagatcccttggtaaataaggagcaggggtggtaagcttcagagttttgctcatctaatggcacatgtaggcactaggctactgtgcctgctcccatattttctcccagggcacccatgtcttgctaccagaatttgtttgcacttaggctacttccaggttgtggcaatcgagagtttggtgttgtctgtttcatttagcgaatttgtcagtactctataccacgggtcgttgcctcgttggctttgtcttcgtattctcttgtgcattttcgcgttggtagacagggttttatgtgtaaagaaaatgcagtagcgaggcatttaggcaggtaaggagaaacaaaaagattgcttggttgtggtttactattactattaggccaaccccatcgctccatgctggcttgtaatcccagcttgcatagttcacgttttttgatcctccagatttgctggtgtaagtgtttggataacgtctttgtaactttaaaaagccgtaggcgatggattgttctgttcaccgaccagcagcttatgcatccgaccatccctatatcaacatttaaactatgcgaacaatgtaaatagtgttttggatgac

SEQ ID NO: 23293 - DNA, 4438 bp, Zea Mays
tccacaccaccgcgggtcctcccgccagcctcgagagaaccgcgcgccgcgcccccatcttttcccccaaaccctccgcgcgagcccgaggccccgagcgtcaggcaaggccgcacaccgccgccgcttcccctcatcatccgtctcctccccatccctttcccctcatccgcattcggtaggctgtggcgccagtgtccgcttcaggactggattggtcgtgggaagcaagaaccgcccgcccgcgcattagaaccctagcccccgccaatctaacagcgcaaagaatccggaaaacccccggcttttcggtctcccgagcccgggagatccatccttcgctgcgtcggagatgtcgtccgacatccgtaaatggttcatgaagccgcaggacaagagcgcggcggcatctggagccgccgggaagccctcggggtcggcggctgagaagaagcccgtgctcagcattccggagaagaagtcggcgccccccgcattggcgtcctgtgaccatgatacttccgctagaaggaagacaagcaaatattttgggtcaaaagcagaaaaggactcagatgtccaaatggcagacgcctctggggggaagagtgcggctaaaagaaaacttcagaaatgcaacgatgaagtcaaggaggacagcaagccttttccagcaaagaaaatgtttgatgatgaagaagatgacgattttgtggcacctgcaaagaagaaaactccagtgaagccaccaccttcaaaaaagcttaaagttgaatctaatgttgaagcccctgcaaagactactggtgttgatgatgctgaggatgaggacaggatggatgaagatgccaagaccccctctaaaggagctggaaggggaaggggaagaggaggaagaggaggagcaggagctgcccctgggggcagaggtagaggaggtgggagaggttttatgaattttggtgagaggaaagatcctcctcacaaaggagaaaaggaggtcccagagggtgcccctgactgtttatctggtctgacatttgtcataagtggtaccctcgacaggtgccaatttctattcttgaacgtgaggaagcaactgatctaattaagcgttatggtggccgtgtgactggctctattagtaaaaagacgagctacttattggccgacgaagacattggtggagtcaaatctaacaaagcaaaagatctgggtgttccattcttgactgaagatggtttatttgatttgatccgaaaatcaaagcctgcaaaggctcctgtagacaaacgtcaaaacaacaacagttctgaaaagcttcagaaatcacagacaaagagctctccagctaaagttgaaaaacgagccgaagcaagtgctgtaggcaaaagtattgcttcaaacagtaatgctgcaagtgcctccgctgacaaacaaaagcccaagattgttgaccgtggttctatgcaatggacagaaaaatatcggccaaaagttccaaatgacatagttggcaatcaatcaatggtcaaacaacttcatgattggttaaaaagttgggatgcactattccttcattctggccaaaagggtaagggaaagaaacaaactgacagtgcagccaaaaaggctgtgttgctgagtggacctcctggtatcggtaagactacaactgctaaagttgttagtcagatgcttggtttgcaggccattgaggtaaatgcgagtgatagccgtggtaaggcagactccaagatcgagaagggtgttggggggagtacatcaaattctatcaaagagcttatcaacaacgcgactctgaattatagtgacaatcggttaaaacatcccaaagctgtactagttatggatgaagttgatggtatgtctgctggagatagaggtggtgttgctgatcttattgctagcatcaagatatccaagatccctattatctgcatttgtaatgaccgttatagtcagaaattgaagaatcttgtgaattactgccttatgctcaacttcagaaagccaacaaaacaacagatgggtaaaagattgatggaaattgccaaaaaggaaggtattcaagctcaagagaatgcaatggaagagcttgctgaaagagtgcacggagatattcgcatggcactcaaccatttgcagtatatgagcctctcccagtctgtggtcaaatatgatgatataaaggagcgacttaatagcagttcaaaggatgaagatatttctccttttactgctgttgacaaactttttggtttcaatggcgggaggttaaggatggatgagagaatggattttggcatgagcgatcctgatttagttcccttgatcatccaggaaaattatatcaattatcggcctaacaccatcggcaaggatgaaagtggagttaaaagaatgaatgctttagcccgggctgctgaatctatagcggacggtgatcttgttaatgtacagataagaagatatcgacagtggcagctgtcacaagctgcttgttttgcttcatctatagtacctgccgctttgatgcatgggaacagagaaatccttgaagcaggtgagcgaaactttaataggtttggtggatggttgggtaagtactcgactactaacaaaaacagaaggctactggaagatgtccacagtcatattcttgcctcccagcaagcaaacttggacagggatgcattgaggttggattatcttactcttatcttgagagagctgactgacccactgaaaaaaatgtcaaaggatgaagctgttcaaaaggtggtagagtttatggatacatactctttaagccaggaagacttcgatacaattgttgaagtatccaaatttaagggtcatccaagtcctatggatgggattcaacctgctgttaaaagtgccttgacaaaggcatacaaacaaggaagtagttcccgtgttgttcgagcagcagatctaataaacattccaggcatgaaaaagcctttaaagaaacgagtggcggcgatcttggagccggtagaagagagcctacctgaagaaaatggactagcatcagctgaagatgatgaagatggttcttctgatgctgaaaataatggtgcatgttctcctttcccacgtaacaaacataaaaaatctggtagatgcctgtttgtttggctaatgtgtcaggcattaggataaaatggatctgttttgaggcaactttgtggtgccacactgactgacttcatttaacgcaattgtgaaagtacccatttttatggagatttgtagcatcattcaggcaaatgcaaatcgagatcatatagacatgaacttgtgaaatagctacacctaactatagacaggtttacataattacatgtacttcaagacacaccatactaatatatggtagagccagttctatcgcaagtttttagtcagttggatgctaatggaagctgcatccattagcacagttggtaaagcgtttttagtcagttgggatgctttgggagttgcatccagaaaggttcatatggcttgctgtctaatcacttttttcccttcagatgagcttgtgcctgctgactctacgccgaagctggacctgcaaagcgacaagaagaaaggaatccaagtgcagcttgacctgaagagcaatggggatggcccgcgcgggaagaaggcgcctgctgccaggtcaagagcaaccgggtcaggtgggaaggccgcggcgggaggaggttcggctgggaagaggaagaggtaaatgagacatttggcgcctgcccacagttggccggtggttagtttggacgcacagatcccttggtaaataaggagcaggggtggtaagcttcagagttttgctcatctaatggcacatgtaggcactaggctactgtgcctgctcccatattttctcccagggcacccatgtcttgctaccagaatttgtttgcacttaggctacttccaggttgtggcaatcgagagtttggtgttgtctgtttcatttagcgaatttgtcagtactctataccacgggtcgttgcctcgttggctttgtcttcgtattctcttgtgcattttcgcgttggtagacagggttttatgtgtaaagaaaatgcagtagcgaggcatttaggcaggtaaggagaaacaaaaagattgcttggttgtggtttactattactattaggccaaccccatcgctccatgctggcttgtaatcccagcttgcatagttcacgttttttgatcctccagatttgctggtgtaagtgtttggataacgtctttgtaactttaaaaagccgtaggcgatggattgttctgttcaccgaccagcagcttatgcatccgaccatccctatatcaacatttaaactatgcgaacaatgtaaatagtgttttggatgac

SEQ ID NO: 23294 - DNA, 3944 bp, Zea Mays
tccacaccaccgcgggtcctcccgccagcctcgagagaaccgcgcgccgcgcccccatcttttcccccaaaccctccgcgcgagcccgaggccccgagcgtcaggcaaggccgcacaccgccgccgcttcccctcatcatccgtctcctccccatccctttcccctcatccgcattcggtaggctgtggcgccagtgtccgcttcaggactggattggtcgtgggaagcaagaaccgcccgcccgcgcattagaaccctagcccccgccaatctaacagcgcaaagaatccggaaaacccccggcttttcggtctcccgagcccgggagatccatccttcgctgcgtcggagatgtcgtccgacatccgtaaatggttcatgaagccgcaggacaagagcgcggcggcatctggagccgccgggaagccctcggggtcggcggctgagaagaagcccgtgctcagcattccggagaagaagtcggcgccccccgcattggcgtcctgtgaccatgatacttccgctagaaggaagacaagcaaatattttgggtcaaaagcagaaaaggactcagatgtccaaatggcagacgcctctggggggaagagtgcggctaaaagaaaacttcagaaatgcaacgatgaagtcaaggaggacagcaagccttttccagcaaagaaaatgtttgatgatgaagaagatgacgattttgtggcacctgcaaagaagaaaactccagtgaagccaccaccttcaaaaaagcttaaagttgaatctaatgttgaagcccctgcaaagactactggtgttgatgatgctgaggatgaggacaggatggatgaagatgccaagaccccctctaaaggagctggaaggggaaggggaagaggaggaagaggaggagcaggagctgcccctgggggcagaggtagaggaggtgggagaggttttatgaattttggtgagaggaaagatcctcctcacaaaggagaaaaggaggtcccagagggtgcccctgactgtttatctggtctgacatttgtcataagtggtaccctcgacagtcttgaacgtgaggaagcaactgatctaattaagcgttatggtggccgtgtgactggctctattagtaaaaagacgagctacttattggccgacgaagacattggtggagtcaaatctaacaaagcaaaagatctgggatggtttatttgatttgatccgaaaatcaaagcctgcaaaggctcctgtagacaaacgtcaaaacaacaacagttctgaaaagcttcagaaatcacagacaaagagctctccagctaaagttgaaaaacgagccgaagcaagtgctgtaggcaaaagtattgcttcaaacagtaatgctgcaagtgcctccgctgacaaacaaaagcccaagattgttgaccgtggttctatgcaatggacagaaaaatatcggccaaaagttccaaatgacatagttggcaatcaatcaatggtcaaacaacttcatgattggttaaaaagttgggatgcactattccttcattctggccaaaagggtaagggaaagaaacaaactgacagtgcagccaaaaaggctgtgttgctgagtggacctcctggtatcggtaagactacaactgctaaagttgttagtcagatgcttggtttgcaggccattgaggtaaatgcgagtgatagccgtggtaaggcagactccaagatcgagaagggtgttggggggagtacatcaaattctatcaaagagcttatcaacaacgcgactctgaattatagtgacaatcggttaaaacatcccaaagctgtactagttatggatgaagttgatggtatgtctgctggagatagaggtggtgttgctgatcttattgctagcatcaagatatccaagatccctattatctgcatttgtaatgaccgttatagtcagaaattgaagaatcttgtgaattactgccttatgctcaacttcagaaagccaacaaaacaacagatgggtaaaagattgatggaaattgccaaaaaggaaggtattcaagctcaagagaatgcaatggaagagcttgctgaaagagtgcacggagatattcgcatggcactcaaccatttgcagtatatgagcctctcccagtctgtggtcaaatatgatgatataaaggagcgacttaatagcagttcaaaggatgaagatatttctccttttactgctgttgacaaactttttggtttcaatggcgggaggttaaggatggatgagagaatggattttggcatgagcgatcctgatttagttcccttgatcatccaggaaaattatatcaattatcggcctaacaccatcggcaaggatgaaagtggagttaaaagaatgaatgctttagcccgggctgctgaatctatagcggacggtgatcttgttaatgtacagataagaagatatcgacagtggcagctgtcacaagctgcttgttttgcttcatctatagtacctgccgctttgatgcatgggaacagagaaatccttgaagcaggtgagcgaaactttaataggtttggtggatggttgggtaagtactcgactactaacaaaaacagaaggctactggaagatgtccacagtcatattcttgcctcccagcaagcaaacttggacagggatgcattgaggttggattatcttactcttatcttgagagagctgactgacccactgaaaaaaatgtcaaaggatgaagctgttcaaaaggtggtagagtttatggatacatactctttaagccaggaagacttcgatacaattgttgaagtatccaaatttaagggtcatccaagtcctatggatgggattcaacctgctgttaaaagtgccttgacaaaggcatacaaacaaggaagtagttcccgtgttgttcgagcagcagatctaataaacattccaggcatgaaaaagcctttaaagaaacgagtggcggcgatcttggagccggtagaagagagcctacctgaagaaaatggactagcatcagctgaagatgatgaagatggttcttctgatgctgaaaataatgatgagcttgtgcctgctgactctacgccgaagctggacctgcaaagcgacaagaagaaaggaatccaagtgcagcttgacctgaagagcaatggggatggcccgcgcgggaagaaggcgcctgctgccaggtcaagagcaaccgggtcaggtgggaaggccgcggcgggaggaggttcggctgggaagaggaagaggtaaatgagacatttggcgcctgcccacagttggccggtggttagtttggacgcacagatcccttggtaaataaggagcaggggtggtaagcttcagagttttgctcatctaatggcacatgtaggcactaggctactgtgcctgctcccatattttctcccagggcacccatgtcttgctaccagaatttgtttgcacttaggctacttccaggttgtggcaatcgagagtttggtgttgtctgtttcatttagcgaatttgtcagtactctataccacgggtcgttgcctcgttggctttgtcttcgtattctcttgtgcattttcgcgttggtagacagggttttatgtgtaaagaaaatgcagtagcgaggcatttaggcaggtaaggagaaacaaaaagattgcttggttgtggtttactattactattaggccaaccccatcgctccatgctggcttgtaatcccagcttgcatagttcacgttttttgatcctccagatttgctggtgtaagtgtttggataacgtctttgtaactttaaaaagccgtaggcgatggattgttctgttcaccgaccagcagcttatgcatccgaccatccctatatcaacatttaaactatgcgaacaatgtaaatagtgttttggatgac

SEQ ID NO: 23295 - DNA, 3947 bp, Zea Mays
tccacaccaccgcgggtcctcccgccagcctcgagagaaccgcgcgccgcgcccccatcttttcccccaaaccctccgcgcgagcccgaggccccgagcgtcaggcaaggccgcacaccgccgccgcttcccctcatcatccgtctcctccccatccctttcccctcatccgcattcggtaggctgtggcgccagtgtccgcttcaggactggattggtcgtgggaagcaagaaccgcccgcccgcgcattagaaccctagcccccgccaatctaacagcgcaaagaatccggaaaacccccggcttttcggtctcccgagcccgggagatccatccttcgctgcgtcggagatgtcgtccgacatccgtaaatggttcatgaagccgcaggacaagagcgcggcggcatctggagccgccgggaagccctcggggtcggcggctgagaagaagcccgtgctcagcattccggagaagaagtcggcgccccccgcattgtcttgaacgtgaggaagcaactgatctaattaagcgttatggtggccgtgtgactggctctattagtaaaaagacgagctacttattggccgacgaagacattggtggagtcaaatctaacaaagcaaaagatctgggtgttccattcttgactgaagatggtttatttgatttgatccgaaaatcaaagcctgcaaaggctcctgtagacaaacgtcaaaacaacaacagttctgaaaagcttcagaaatcacagacaaagagctctccagctaaagttgaaaaacgagccgaagcaagtgctgtaggcaaaagtattgcttcaaacagtaatgctgcaagtgcctccgctgacaaacaaaagcccaagattgttgaccgtggttctatgcaatggacagaaaaatatcggccaaaagttccaaatgacatagttggcaatcaatcaatggtcaaacaacttcatgattggttaaaaagttgggatgcactattccttcattctggccaaaagggtaagggaaagaaacaaactgacagtgcagccaaaaaggctgtgttgctgagtggacctcctggtatcggtaagactacaactgctaaagttgttagtcagatgcttggtttgcaggccattgaggtaaatgcgagtgatagccgtggtaaggcagactccaagatcgagaagggtgttggggggagtacatcaaattctatcaaagagcttatcaacaacgcgactctgaattatagtgacaatcggttaaaacatcccaaagctgtactagttatggatgaagttgatggtatgtctgctggagatagaggtggtgttgctgatcttattgctagcatcaagatatccaagatccctattatctgcatttgtaatgaccgttatagtcagaaattgaagaatcttgtgaattactgccttatgctcaacttcagaaagccaacaaaacaacagatgggtaaaagattgatggaaattgccaaaaaggaaggtattcaagctcaagagaatgcaatggaagagcttgctgaaagagtgcacggagatattcgcatggcactcaaccatttgcagtatatgagcctctcccagtctgtggtcaaatatgatgatataaaggagcgacttaatagcagttcaaaggatgaagatatttctccttttactgctgttgacaaactttttggtttcaatggcgggaggttaaggatggatgagagaatggattttggcatgagcgatcctgatttagttcccttgatcatccaggaaaattatatcaattatcggcctaacaccatcggcaaggatgaaagtggagttaaaagaatgaatgctttagcccgggctgctgaatctatagcggacggtgatcttgttaatgtacagataagaagatatcgacagtggcagctgtcacaagctgcttgttttgcttcatctatagtacctgccgctttgatgcatgggaacagagaaatccttgaagcagtaatgttcaaacacctaactgacactatatttaatatattacttcagcttattgggctaaattaagttgggtaacaaatacatttcagggtgagcgaaactttaataggtttggtggatggttgggtaagtactcgactactaacaaaaacagaaggctactggaagatgtccacagtcatattcttgcctcccagcaagcaaacttggacagggatgcattgaggttggattatcttactcttatcttgagagagctgactgacccactgaaaaaaatgtcaaaggatgaagctgttcaaaaggtggtagagtttatggatacatactctttaagccaggaagacttcgatacaattgttgaagtatccaaatttaagggtcatccaagtcctatggatgggattcaacctgctgttaaaagtgccttgacaaaggcatacaaacaaggaagtagttcccgtgttgttcgagcagcagatctaataaacattccaggcatgaaaaagcctttaaagaaacgagtggcggcgatcttggagccggtagaagagagcctacctgaagaaaatggactagcatcagctgaagatgatgaagatggttcttctgatgctgaaaataatggtgcatgttctcctttcccacgtaacaaacataaaaaatctggtagatgcctgtttgtttggctaatgtgtcaggcattaggataaaatggatctgttttgaggcaactttgtggtgccacactgactgacttcatttaacgcaattgtgaaagtacccatttttatggagatttgtagcatcattcaggcaaatgcaaatcgagatcatatagacatgaacttgtgaaatagctacacctaactatagacaggtttacataattacatgtacttcaagacacaccatactaatatatggtagagccagttctatcgcaagtttttagtcagttggatgctaatggaagctgcatccattagcacagttggtaaagcgtttttagtcagttgggatgctttgggagttgcatccagaaaggttcatatggcttgctgtctaatcacttttttcccttcagatgagcttgtgcctgctgactctacgccgaagctggacctgcaaagcgacaagaagaaaggaatccaagtgcagcttgacctgaagagcaatggggatggcccgcgcgggaagaaggcgcctgctgccaggtcaagagcaaccgggtcaggtgggaaggccgcggcgggaggaggttcggctgggaagaggaagaggtaaatgagacatttggcgcctgcccacagttggccggtggttagtttggacgcacagatcccttggtaaataaggagcaggggtggtaagcttcagagttttgctcatctaatggcacatgtaggcactaggctactgtgcctgctcccatattttctcccagggcacccatgtcttgctaccagaatttgtttgcacttaggctacttccaggttgtggcaatcgagagtttggtgttgtctgtttcatttagcgaatttgtcagtactctataccacgggtcgttgcctcgttggctttgtcttcgtattctcttgtgcattttcgcgttggtagacagggttttatgtgtaaagaaaatgcagtagcgaggcatttaggcaggtaaggagaaacaaaaagattgcttggttgtggtttactattactattaggccaaccccatcgctccatgctggcttgtaatcccagcttgcatagttcacgttttttgatcctccagatttgctggtgtaagtgtttggataacgtctttgtaactttaaaaagccgtaggcgatggattgttctgttcaccgaccagcagcttatgcatccgaccatccctatatcaacatttaaactatgcgaacaatgtaaatagtgttttggatgac

SEQ ID NO: 23296 - DNA, 3980 bp, Zea Mays
tccacaccaccgcgggtcctcccgccagcctcgagagaaccgcgcgccgcgcccccatcttttcccccaaaccctccgcgcgagcccgaggccccgagcgtcaggcaaggccgcacaccgccgccgcttcccctcatcatccgtctcctccccatccctttcccctcatccgcattcggtaggctgtggcgccagtgtccgcttcaggactggattggtcgtgggaagcaagaaccgcccgcccgcgcattagaaccctagcccccgccaatctaacagcgcaaagaatccggaaaacccccggcttttcggtctcccgagcccgggagatccatccttcgctgcgtcggagatgtcgtccgacatccgtaaatggttcatgaagccgcaggacaagagcgcggcggcatctggagccgccgggaagccctcggggtcggcggctgagaagaagcccgtgctcagcattccggagaagaagtcggcgccccccgcattggcgtcctgtgaccatgatacttccgctagaaggaagacaagcaaatattttgggtcaaaagcagaaaaggactcagatgtccaaatggcagacgcctctggggggaagagtgcggctaaaagaaaacttcagaaatgcaacgatgaagtcaaggaggacagcaagccttttccagcaaagaaaatgtttgatgatgaagaagatgacgattttgtggcacctgcaaagaagaaaactccagtgaagccaccaccttcaaaaaagcttaaagttgaatctaatgttgaagcccctgcaaagactactggtgttgatgatgctgaggatgaggacaggatggatgaagatgccaagaccccctctaaaggagctggaaggggaaggggaagaggaggaagaggaggagcaggagctgcccctgggggcagaggtagaggaggtgggagaggttttatgaattttggtgagaggaaagatcctcctcacaaaggagaaaaggaggtcccagagggtgcccctgactgtttatctggtctgacatttgtcataagtggtaccctcgacagtcttgaacgtgaggaagcaactgatctaattaagcgttatggtggccgtgtgactggctctattagtaaaaagacgagctacttattggccgacgaagacattggtggagtcaaatctaacaaagcaaaagatctgggtgttccattcttgactgaagatggtttatttgatttgatccgaaaatcaaagcctgcaaaggctcctgtagacaaacgtcaaaacaacaacagttctgaaaagcttcagaaatcacagacaaagagctctccagctaaagttgaaaaacgagccgaagcaagtgctgtaggcaaaagtattgcttcaaacagtaatgctgcaagtgcctccgctgacaaacaaaagcccaagattgttgaccgtggttctatgcaatggacagaaaaatatcggccaaaagttccaaatgacatagttggcaatcaatcaatggtcaaacaacttcatgattggttaaaaagttgggatgcactattccttcattctggccaaaagggtaagggaaagaaacaaactgacagtgcagccaaaaaggctgtgttgctgagtggacctcctggtatcggtaagactacaactgctaaagttgttagtcagatgcttggtttgcaggccattgaggtaaatgcgagtgatagccgtggtaaggcagactccaagatcgagaagggtgttggggggagtacatcaaattctatcaaagagcttatcaacaacgcgactctgaattatagtgacaatcggttaaaacatcccaaagctgtactagttatggatgaagttgatggtatgtctgctggagatagaggtggtgttgctgatcttattgctagcatcaagatatccaagatccctattatctgcatttgtaatgaccgttatagtcagaaattgaagaatcttgtgaattactgccttatgctcaacttcagaaagccaacaaaacaacagatgggtaaaagattgatggaaattgccaaaaaggaaggtattcaagctcaagagaatgcaatggaagagcttgctgaaagagtgcacggagatattcgcatggcactcaaccatttgcagtatatgagcctctcccagtctgtggtcaaatatgatgatataaaggagcgacttaatagcagttcaaaggatgaagatatttctccttttactgctgttgacaaactttttggtttcaatggcgggaggttaaggatggatgagagaatggattttggcatgagcgatcctgatttagttcccttgatcatccaggaaaattatatcaattatcggcctaacaccatcggcaaggatgaaagtggagttaaaagaatgaatgctttagcccgggctgctgaatctatagcggacggtgatcttgttaatgtacagataagaagatatcgacagtggcagctgtcacaagctgcttgttttgcttcatctatagtacctgccgctttgatgcatgggaacagagaaatccttgaagcaggtgagcgaaactttaataggtttggtggatggttgggtaagtactcgactactaacaaaaacagaaggctactggaagatgtccacagtcatattcttgcctcccagcaagcaaacttggacagttcttgagaactgcagggatgcattgaggttggattatcttactcttatcttgagagagctgactgacccactgaaaaaaatgtcaaaggatgaagctgttcaaaaggtggtagagtttatggatacatactctttaagccaggaagacttcgatacaattgttgaagtatccaaatttaagggtcatccaagtcctatggatgggattcaacctgctgttaaaagtgccttgacaaaggcatacaaacaaggaagtagttcccgtgttgttcgagcagcagatctaataaacattccaggcatgaaaaagcctttaaagaaacgagtggcggcgatcttggagccggtagaagagagcctacctgaagaaaatggactagcatcagctgaagatgatgaagatggttcttctgatgctgaaaataatgatgagcttgtgcctgctgactctacgccgaagctggacctgcaaagcgacaagaagaaaggaatccaagtgcagcttgacctgaagagcaatggggatggcccgcgcgggaagaaggcgcctgctgccaggtcaagagcaaccgggtcaggtgggaaggccgcggcgggaggaggttcggctgggaagaggaagaggtaaatgagacatttggcgcctgcccacagttggccggtggttagtttggacgcacagatcccttggtaaataaggagcaggggtggtaagcttcagagttttgctcatctaatggcacatgtaggcactaggctactgtgcctgctcccatattttctcccagggcacccatgtcttgctaccagaatttgtttgcacttaggctacttccaggttgtggcaatcgagagtttggtgttgtctgtttcatttagcgaatttgtcagtactctataccacgggtcgttgcctcgttggctttgtcttcgtattctcttgtgcattttcgcgttggtagacagggttttatgtgtaaagaaaatgcagtagcgaggcatttaggcaggtaaggagaaacaaaaagattgcttggttgtggtttactattactattaggccaaccccatcgctccatgctggcttgtaatcccagcttgcatagttcacgttttttgatcctccagatttgctggtgtaagtgtttggataacgtctttgtaactttaaaaagccgtaggcgatggattgttctgttcaccgaccagcagcttatgcatccgaccatccctatatcaacatttaaactatgcgaacaatgtaaatagtgttttggatgac

SEQ ID NO: 23297 - DNA, 3820 bp, Zea Mays
tccacaccaccgcgggtcctcccgccagcctcgagagaaccgcgcgccgcgcccccatcttttcccccaaaccctccgcgcgagcccgaggccccgagcgtcaggcaaggccgcacaccgccgccgcttcccctcatcatccgtctcctccccatccctttcccctcatccgcattcggtaggctgtggcgccagtgtccgcttcaggactggattggtcgtgggaagcaagaaccgcccgcccgcgcattagaaccctagcccccgccaatctaacagcgcaaagaatccggaaaacccccggcttttcggtctcccgagcccgggagatccatccttcgctgcgtcggagatggcgtcctgtgaccatgatacttccgctagaaggaagacaagcaaatattttgggtcaaaagcagaaaaggactcagatgtccaaatggcagacgcctctggggggaagagtgcggctaaaagaaaacttcagaaatgcaacgatgaagtcaaggaggacagcaagccttttccagcaaagaaaatgtttgatgatgaagaagatgacgattttgtggcacctgcaaagaagaaaactccagtgaagccaccaccttcaaaaaagcttaaagttgaatctaatgttgaagcccctgcaaagactactggtgttgatgatgctgaggatgaggacaggatggatgaagatgccaagaccccctctaaaggagctggaaggggaaggggaagaggaggaagaggaggagcaggagctgcccctgggggcagaggtagaggaggtgggagaggttttatgaattttggtgagaggaaagatcctcctcacaaaggagaaaaggaggtcccagagggtgcccctgactgtttatctggtctgacatttgtcataagtggtaccctcgacagtcttgaacgtgaggaagcaactgatctaattaagcgttatggtggccgtgtgactggctctattagtaaaaagacgagctacttattggccgacgaagacattggtggagtcaaatctaacaaagcaaaagatctgggtgttccattcttgactgaagatggtttatttgatttgatccgaaaatcaaagcctgcaaaggctcctgtagacaaacgtcaaaacaacaacagttctgaaaagcttcagaaatcacagacaaagagctctccagctaaagttgaaaaacgagccgaagcaagtgctgtaggcaaaagtattgcttcaaacagtaatgctgcaagtgcctccgctgacaaacaaaagcccaagattgttgaccgtggttctatgcaatggacagaaaaatatcggccaaaagttccaaatgacatagttggcaatcaatcaatggtcaaacaacttcatgattggttaaaaagttgggatgcactattccttcattctggccaaaagggtaagggaaagaaacaaactgacagtgcagccaaaaaggctgtgttgctgagtggacctcctggtatcggtaagactacaactgctaaagttgttagtcagatgcttggtttgcaggccattgaggtaaatgcgagtgatagccgtggtaaggcagactccaagatcgagaagggtgttggggggagtacatcaaattctatcaaagagcttatcaacaacgcgactctgaattatagtgacaatcggttaaaacatcccaaagctgtactagttatggatgaagttgatggtatgtctgctggagatagaggtggtgttgctgatcttattgctagcatcaagatatccaagatccctattatctgcatttgtaatgaccgttatagtcagaaattgaagaatcttgtgaattactgccttatgctcaacttcagaaagccaacaaaacaacagatgggtaaaagattgatggaaattgccaaaaaggaaggtattcaagctcaagagaatgcaatggaagagcttgctgaaagagtgcacggagatattcgcatggcactcaaccatttgcagtatatgagcctctcccagtctgtggtcaaatatgatgatataaaggagcgacttaatagcagttcaaaggatgaagatatttctccttttactgctgttgacaaactttttggtttcaatggcgggaggttaaggatggatgagagaatggattttggcatgagcgatcctgatttagttcccttgatcatccaggaaaattatatcaattatcggcctaacaccatcggcaaggatgaaagtggagttaaaagaatgaatgctttagcccgggctgctgaatctatagcggacggtgatcttgttaatgtacagataagaagatatcgacagtggcagctgtcacaagctgcttgttttgcttcatctatagtacctgccgctttgatgcatgggaacagagaaatccttgaagcaggtgagcgaaactttaataggtttggtggatggttgggtaagtactcgactactaacaaaaacagaaggctactggaagatgtccacagtcatattcttgcctcccagcaagcaaacttggacagggatgcattgaggttggattatcttactcttatcttgagagagctgactgacccactgaaaaaaatgtcaaaggatgaagctgttcaaaaggtggtagagtttatggatacatactctttaagccaggaagacttcgatacaattgttgaagtatccaaatttaagggtcatccaagtcctatggatgggattcaacctgctgttaaaagtgccttgacaaaggcatacaaacaaggaagtagttcccgtgttgttcgagcagcagatctaataaacattccaggcatgaaaaagcctttaaagaaacgagtggcggcgatcttggagccggtagaagagagcctacctgaagaaaatggactagcatcagctgaagatgatgaagatggttcttctgatgctgaaaataatgatgagcttgtgcctgctgactctacgccgaagctggacctgcaaagcgacaagaagaaaggaatccaagtgcagcttgacctgaagagcaatggggatggcccgcgcgggaagaaggcgcctgctgccaggtcaagagcaaccgggtcaggtgggaaggccgcggcgggaggaggttcggctgggaagaggaagaggtaaatgagacatttggcgcctgcccacagttggccggtggttagtttggacgcacagatcccttggtaaataaggagcaggggtggtaagcttcagagttttgctcatctaatggcacatgtaggcactaggctactgtgcctgctcccatattttctcccagggcacccatgtcttgctaccagaatttgtttgcacttaggctacttccaggttgtggcaatcgagagtttggtgttgtctgtttcatttagcgaatttgtcagtactctataccacgggtcgttgcctcgttggctttgtcttcgtattctcttgtgcattttcgcgttggtagacagggttttatgtgtaaagaaaatgcagtagcgaggcatttaggcaggtaaggagaaacaaaaagattgcttggttgtggtttactattactattaggccaaccccatcgctccatgctggcttgtaatcccagcttgcatagttcacgttttttgatcctccagatttgctggtgtaagtgtttggataacgtctttgtaactttaaaaagccgtaggcgatggattgttctgttcaccgaccagcagcttatgcatccgaccatccctatatcaacatttaaactatgcgaacaatgtaaatagtgttttggatgac

SEQ ID NO: 23298 - DNA, 4006 bp, Zea Mays
tccacaccaccgcgggtcctcccgccagcctcgagagaaccgcgcgccgcgcccccatcttttcccccaaaccctccgcgcgagcccgaggccccgagcgtcaggcaaggccgcacaccgccgccgcttcccctcatcatccgtctcctccccatccctttcccctcatccgcattcggtaggctgtggcgccagtgtccgcttcaggactggattggtcgtgggaagcaagaaccgcccgcccgcgcattagaaccctagcccccgccaatctaacagcgcaaagaatccggaaaacccccggcttttcggtctcccgagcccgggagatccatccttcgctgcgtcggagatgtcgtccgacatccgtaaatggttcatgaagccgcaggacaagagcgcggcggcatctggagccgccgggaagccctcggggtcggcggctgagaagaagcccgtgctcagcattccggagaagaagtcggcgccccccgcattggcgtcctgtgaccatgatacttccgctagaaggaagacaagcaaatattttgggtcaaaagcagaaaaggactcagatgtccaaatggcagacgcctctggggggaagagtgcggctaaaagaaaacttcagaaatgcaacgatgaagtcaaggaggacagcaagccttttccagcaaagaaaatgtttgatgatgaagaagatgacgattttgtggcacctgcaaagaagaaaactccagtgaagccaccaccttcaaaaaagcttaaagttgaatctaatgttgaagcccctgcaaagactactggtgttgatgatgctgaggatgaggacaggatggatgaagatgccaagaccccctctaaaggagctggaaggggaaggggaagaggaggaagaggaggagcaggagctgcccctgggggcagaggtagaggaggtgggagaggttttatgaattttggtgagaggaaagatcctcctcacaaaggagaaaaggaggtcccagagggtgcccctgactgtttatctggtctgacatttgtcataagtggtaccctcgacagtcttgaacgtgaggaagcaactgatctaattaagcgttatggtggccgtgtgactggctctattagtaaaaagacgagctacttattggccgacgaagacattggtggagtcaaatctaacaaagcaaaagatctgggtgttccattcttgactgaagatggtttatttgatttgatccgaaaatcaaagcctgcaaaggctcctgtagacaaacgtcaaaacaacaacagttctgaaaagcttcagaaatcacagacaaagagctctccagctaaagttgaaaaacgagccgaagcaagtgctgtaggcaaaagtattgcttcaaacagtaatgctgcaagtgcctccgctgacaaacaaaagcccaagattgttgaccgtggttctatgcaatggacagaaaaatatcggccaaaagttccaaatgacatagttggcaatcaatcaatggtcaaacaacttcatgattggttaaaaagttgggatgcactattccttcattctggccaaaagggtaagggaaagaaacaaactgacagtgcagccaaaaaggctgtgttgctgagtggacctcctggtatcggtaagactacaactgctaaagttgttagtcagatgcttggtttgcaggccattgaggtaaatgcgagtgatagccgtggtaaggcagactccaagatcgagaagggtgttggggggagtacatcaaattctatcaaagagcttatcaacaacgcgactctgaattatagtgacaatcggttaaaacatcccaaagctgtactagttatggatgaagttgatggtatgtctgctggagatagaggtggtgttgctgatcttattgctagcatcaagatatccaagatccctattatctgcatttgtaatgaccgttatagtcagaaattgaagaatcttgtgaattactgccttatgctcaacttcagaaagccaacaaaacaacagatgggtaaaagattgatggaaattgccaaaaaggaaggtattcaagctcaagagaatgcaatggaagagcttgctgaaagagtgcacggagatattcgcatggcactcaaccatttgcagtatatgagcctctcccagtctgtggtcaaatatgatgatataaaggagcgacttaatagcagttcaaaggatgaagatatttctccttttactgctgttgacaaactttttggtttcaatggcgggaggttaaggatggatgagagaatggattttggcatgagcgatcctgatttagttcccttgatcatccaggaaaattatatcaattatcggcctaacaccatcggcaaggatgaaagtggagttaaaagaatgaatgctttagcccgggctgctgaatctatagcggacggtgatcttgttaatgtacagataagaagatatcgacagtggcagctgtcacaagctgcttgttttgcttcatctatagtacctgccgctttgatgcatgggaacagagaaatccttgaagcaggtgagcgaaactttaataggtttggtggatggttgggtaagtactcgactactaacaaaaacagaaggctactggaagatgtccacagtcatattcttgcctcccagcaagcaaacttggacagggatgcattgaggttggattatcttactcttatcttgagagagctgactgacccactgaaaaaaatgtcaaaggatgaagctgttcaaaaggtggtagagtttatggatacatactctttaagccaggaagacttcgatacaattgttgaagtatccaaatttaagggtcatccaagtcctatggatgggattcaacctgctgttaaaagtgccttgacaaaggcatacaaacaaggaagtagttcccgtgttgttcgagcagcagatctaataaacattccaggcatgaaaaagcctttaaagaaacgagtggcggcgatcttggagccggtagaagagagcctacctgaagaaaatggactagcatcagctgaagatgatgaagatggttcttctgatgctgaaaataatggtgcatgttctcctttcccacgtaacaaacataaaaaatctgatgagcttgtgcctgctgactctacgccgaagctggacctgcaaagcgacaagaagaaaggaatccaagtgcagcttgacctgaagagcaatggggatggcccgcgcgggaagaaggcgcctgctgccaggtcaagagcaaccgggtcaggtgggaaggccgcggcgggaggaggttcggctgggaagaggaagaggtaaatgagacatttggcgcctgcccacagttggccggtggttagtttggacgcacagatcccttggtaaataaggagcaggggtggtaagcttcagagttttgctcatctaatggcacatgtaggcactaggctactgtgcctgctcccatattttctcccagggcacccatgtcttgctaccagaatttgtttgcacttaggctacttccaggttgtggcaatcgagagtttggtgttgtctgtttcatttagcgaatttgtcagtactctataccacgggtcgttgcctcgttggctttgtcttcgtattctcttgtgcattttcgcgttggtagacagggttttatgtgtaaagaaaatgcagtagcgaggcatttaggcaggtaaggagaaacaaaaagattgcttggttgtggtttactattactattaggccaaccccatcgctccatgctggcttgtaatcccagcttgcatagttcacgttttttgatcctccagatttgctggtgtaagtgtttggataacgtctttgtaactttaaaaagccgtaggcgatggattgttctgttcaccgaccagcagcttatgcatccgaccatccctatatcaacatttaaactatgcgaacaatgtaaatagtgttttggatgac

SEQ ID NO: 23299 - DNA, 338 bp, Zea Mays
ccttggttggcctcacgccggtggggcccggtgggtcggaggcggcggagtgcgccgacgccctgcacgccggggcggccggccgtgggaggagatttgggaggggcgcgcggggccggggcgtcagattggggacgccacgagcagcgaggttggcgttgggtagggctcggtgaagatgaggacgaagctggggaacttggatttctacgcggatcgatccctatacatcggatgggatttctacgcggatcgaagagggactggtttgccgcacgatctagggaaaaggaaaccaagaaagaactcaacaaagaaatggtttcctaaggagccag

SEQ ID NO: 23300 - DNA, 2477 bp, Zea Mays
caaaaatctcattatccaccgtcctccgccctccactgcaactagcttcaccgccttcgttcccgccagcgacgagaatcctccggcctcccttaccaccagattcccccaacccgtggcaacgtcaggtcgccaccgcacgagccaatccgtcctcccgagtcccaatccaaacggcttcactccactcgattcgcttccaccgcccgcgtacagtccaaacgcaaccgtcccgtccaccccggtcctcggcaccgccatgccgccgctcgccgcgcgcctctatgccccgcttaacctcgcccccgccgtcccagccgcctcccttcgccccgccacgcggctctgcgctgcgagcgggccccgcaacgtcggcgggttcaggagaggcgcgctggcataggagaaggcggcggcggtggcggtcgcggagaaagcgggcggcgaaggtggaggaggagaggacgagggcccgtacgatgcgatcgtgatcgggtcagggatcgggggcctggtggcggcgacgcagctcgcggccaagggcgcgcgggtgctggtcctcgagaagtacctcatccccgggggaagctccgggtactaccgccgcgacgggttcaccttcgacgtcggctcctccgtcatgttcggcttctccgacaagggtaacttgaatttgatcacacaagcattggaagcagttgggcgaagtatgaagacttcatcaacgaactggtcagcaaattccctcacgagaaagaagggatccttaaattctacgatacatgctggacgatcttcaattcactaaattcgttggagctgaagtctctagaggaacccctttatctttttcggcaatttttccagaagcctcgggaatgcttaactctagcttattatttgccacagaatgctggggatatcgctcgcaagttcataaaagatcaggagctactctccttcatagatgccgagtgttttattgtgagcacagtcaatgccttgcaaacacccatgataaatgcaagcatggcactttggagggattaattatccagttggtggcgttggtggtattgcaatatccctggcagatggccttgttgaaaagggcagcgaaatccgttacaaggcgaatgtaaccaacgttattcttgaaaatggaaaggctgttggggtgaggttatcaaatgggaaggagttctttgctaaaacagtgatatcaaatgccaccagatgggacacgtttggaaaactcgtgaaagaggaacttccagaagaggagaaaaactttcaaaagaattacgttaaggcaccatcattcctttcaattcatatgggtgtcaaagcgtcagttctgcctgctggcactgactgccaccattttatacttgaggataattggaataatttggaaaagccttatggaagcatatttttaagtatccctacagttcttgatccatcattagctcccgaaggacatcatatacttcatatatttactacagcaggcatagaagattgggagggtctttctaggaaggaatatgaagagaaaaaagaggtggtggccaatgagattataagaaggcttgaaaagaagttgtttcctggtcttcaagattcaatagtcctcaaagaggtaggctcaccaaaaacacaccgaagatttcttgctcgaaatgacggtacatatggaccaatgccacggggtaaaccgaagggattactggctatgcctttcaatactacctcaatagatggcctttactgtgtcggtgacagctgtttccccgggcaaggtgtcatagctgtagcattctcagggatcatgtgtgctcaccgagttgctgcagatattggactagagcagaagtctccagttctagatgctggtcttcttgggctactcagatggctgagaacacttgcataggacggtatattagacaaagtgggaaaatggacctcatcttctttcaaaaggctgatgtttaactagagttcggattctgcactatcatctgagtggccgggttctgtcatgggtgtgccgtgtacaatcgaggctgggctagcagcatgtggtcgcccatcatgagcacctgcagataattgtgctgggtttatatagtagtaatcctaattggcaacccaagtgtctgaagctgcgcgtgcttgacacggtacggtgcgctcccgcgcatatagaaaacaaattgtcaattgcgatgttgcatcacttaggtacaagttacatggtatgccaaacagtgtaattgttctccaactagattcttcaaagacactttctcaattgtaccaggatacaggttgcacggcatagtgaattgtgtcaaaaattttggatcacaatgatgtagcagctcatggtacagattaaatcagataatcagttagcaagattcccggtgagcgtcgtgccaattggatggatcatgatcgttgtccac

SEQ ID NO: 23301 - DNA, 2547 bp, Zea Mays
aaaaatctcattatccaccgtcctccgccctccactgcaactagcttcaccgccttcgttcccgccagcgacgagaatcctccggcctcccttaccaccagattcccccaacccgtggcaacgtcaggtcgccaccgcacgagccaatccgtcctcccgagtcccaatccaaacggcttcactccactcgattcgcttccaccgcccgcgtacagtccaaacgcaaccgtcccgtccaccccggtcctcggcaccgccatgccgccgctcgccgcgcgcctctatgccccgcttaacctcgcccccgccgtcccagccgcctcccttcgccccgccacgcggctctgcgctgcgagcgggccccgcaacgtcggcgggttcaggagaggcgcgctggcataggagaaggcggcggcggtggcggtcgcggagaaagcgggcggcgaaggtggaggaggagaggacgagggcccgtacgatgcgatcgtgatcgggtcagggatcgggggcctggtggcggcgacgcagctcgcggccaagggcgcgcgggtgctggtcctcgagaagtacctcatccccgggggaagctccgggtactaccgccgcgacgggttcaccttcgacgtcggctcctccgtcatgttcggcttctccgacaagggtaacttgaatttgatcacacaagcattggaagcagttgggcgtaagatgagagttctaccagacccttctacagttcatttccacctacccggtgatctctctgtccttgtgcataggaagtatgaagacttcatcaacgaactggtcagcaaattccctcacgagaaagaagggatccttaaattctacgatacatgctggacgatcttcaattcactaaattcgttggagctgaagtctctagaggaacccctttatctttttcggcaatttttccagaagcctcgggaatgcttaactctagcttattatttgccacagaatgctggggatatcgctcgcaagttcataaaagatcaggagctactctccttcatagatgccgagtcaatgccttgcaaacacccatgataaatgcaagcatggtcttgtgcgataggcactttggagggattaattatccagttggtggcgttggtggtattgcaatatccctggcagatggccttgttgaaaagggcagcgaaatccgttacaaggcgaatgtaaccaacgttattcttgaaaatggaaaggctgttggggtgaggttatcaaatgggaaggagttctttgctaaaacagtgatatcaaatgccaccagatgggacacgtttggaaaactcgtgaaagaggaacttccagaagaggagaaaaactttcaaaagaattacgttaaggcaccatcattcctttcaattcatatgggtgtcaaagcgtcagttctgcctgctggcactgactgccaccattttatacttgaggataattggaataatttggaaaagccttatggaagcatatttttaagtatccctacagttcttgatccatcattagctcccgaaggacatcatatacttcatatatttactacagcaggcatagaagattgggagggtctttctaggaaggaatatgaagagaaaaaagaggtggtggccaatgagattataagaaggcttgaaaagaagttgtttcctggtcttcaagattcaatagtcctcaaagaggtaggctcaccaaaaacacaccgaagatttcttgctcgaaatgacggtacatatggaccaatgccacggggtaaaccgaagggattactggctatgcctttcaatactacctcaatagatggcctttactgtgtcggtgacagctgtttccccgggcaaggtgtcatagctgtagcattctcagggatcatgtgtgctcaccgagttgctgcagatattggactagagcagaagtctccagttctagatgctggtcttcttgggctactcagatggctgagaacacttgcataggacggtatattagacaaagtgggaaaatggacctcatcttctttcaaaaggctgatgtttaactagagttcggattctgcactatcatctgagtggccgggttctgtcatgggtgtgccgtgtacaatcgaggctgggctagcagcatgtggtcgcccatcatgagcacctgcagataattgtgctgggtttatatagtagtaatcctaattggcaacccaagtgtctgaagctgcgcgtgcttgacacggtacggtgcgctcccgcgcatatagaaaacaaattgtcaattgcgatgttgcatcacttaggtacaagttacatggtatgccaaacagtgtaattgttctccaactagattcttcaaagacactttctcaattgtaccaggatacaggttgcacggcatagtgaattgtgtcaaaaattttggatcacaatgatgtagcagctcatggtacagattaaatcagataatcagttagcaagattcccggtgagcgtcgtgccaattggatggatcatgatcgttgtccac

SEQ ID NO: 23302 - DNA, 2503 bp, Zea Mays
ctcattatccaccgtcctccgccctccactgcaactagcttcaccgccttcgttcccgccagcgacgagaatcctccggcctcccttaccaccagattcccccaacccgtggcaacgtcaggtcgccaccgcacgagccaatccgtcctcccgagtcccaatccaaacggcttcactccactcgattcgcttccaccgcccgcgtacagtccaaacgcaaccgtcccgtccaccccggtcctcggcaccgccatgccgccgctcgccgcgcgcctctatgccccgcttaacctcgcccccgccgtcccagccgcctcccttcgccccgccacgcggctctgcgctgcgagcgggccccgcaacgtcggcgggttcaggagaggcgcgctggcataggagaaggcggcggcggtggcggtcgcggagaaagcgggcggcgaaggtggaggaggagaggacgagggcccgtacgatgcgatcgtgatcgggtcagggatcgggggcctggtggcggcgacgcagctcgcggccaagggcgcgcgggtgctggtcctcgagaagtacctcatccccgggggaagctccgggtactaccgccgcgacgggttcaccttcgacgtcggctcctccgtcatgttcggcttctccgacaagggtaacttgaatttgatcacacaagcattggaagcagttgggcgtaagatgagagttctaccagacccttctacagttcatttccacctacccggtgatctctctgtccttgtgcataggaagtatgaagacttcatcaacgaactggtcagcaaattccctcacgagaaagaagggatccttaaattctacgatacatgctggacgatcttcaattcactaaattcgttggagctgaagtctctagaggaacccctttatctttttcggcaatttttccagaagcctcgggaatgcttaactctagcttattatttgccacagaatgctggggatatcgctcgcaagttcataaaagatcaggagctactctccttcatagatgccgaggtcttgtgcgataggcactttggagggattaattatccagttggtggcgttggtggtattgcaatatccctggcagatggccttgttgaaaagggcagcgaaatccgttacaaggcgaatgtaaccaacgttattcttgaaaatggaaaggctgttggggtgaggttatcaaatgggaaggagttctttgctaaaacagtgatatcaaatgccaccagatgggacacgtttggaaaactcgtgaaagaggaacttccagaagaggagaaaaactttcaaaagaattacgttaaggcaccatcattcctttcaattcatatgggtgtcaaagcgtcagttctgcctgctggcactgactgccaccattttatacttgaggataattggaataatttggaaaagccttatggaagcatatttttaagtatccctacagttcttgatccatcattagctcccgaaggacatcatatacttcatatatttactacagcaggcatagaagattgggagggtctttctaggaaggaatatgaagagaaaaaagaggtggtggccaatgagattataagaaggcttgaaaagaagttgtttcctggtcttcaagattcaatagtcctcaaagaggtaggctcaccaaaaacacaccgaagatttcttgctcgaaatgacggtacatatggaccaatgccacggggtaaaccgaagggattactggctatgcctttcaatactacctcaatagatggcctttactgtgtcggtgacagctgtttccccgggcaaggtgtcatagctgtagcattctcagggatcatgtgtgctcaccgagttgctgcagatattggactagagcagaagtctccagttctagatgctggtcttcttgggctactcagatggctgagaacacttgcataggacggtatattagacaaagtgggaaaatggacctcatcttctttcaaaaggctgatgtttaactagagttcggattctgcactatcatctgagtggccgggttctgtcatgggtgtgccgtgtacaatcgaggctgggctagcagcatgtggtcgcccatcatgagcacctgcagataattgtgctgggtttatatagtagtaatcctaattggcaacccaagtgtctgaagctgcgcgtgcttgacacggtacggtgcgctcccgcgcatatagaaaacaaattgtcaattgcgatgttgcatcacttaggtacaagttacatggtatgccaaacagtgtaattgttctccaactagattcttcaaagacactttctcaattgtaccaggatacaggttgcacggcatagtgaattgtgtcaaaaattttggatcacaatgatgtagcagctcatggtacagattaaatcagataatcagttagcaagattcccggtgagcgtcgtgccaattggatggatcatgatcgttgtccac

SEQ ID NO: 23303 - DNA, 2557 bp, Zea Mays
ctcattatccaccgtcctccgccctccactgcaactagcttcaccgccttcgttcccgccagcgacgagaatcctccggcctcccttaccaccagattcccccaacccgtggcaacgtcaggtcgccaccgcacgagccaatccgtcctcccgagtcccaatccaaacggcttcactccactcgattcgcttccaccgcccgcgtacagtccaaacgcaaccgtcccgtccaccccggtcctcggcaccgccatgccgccgctcgccgcgcgcctctatgccccgcttaacctcgcccccgccgtcccagccgcctcccttcgccccgccacgcggctctgcgctgcgagcgggccccgcaacgtcggcgggttcaggagaggcgcgctggcataggagaaggcggcggcggtggcggtcgcggagaaagcgggcggcgaaggtggaggaggagaggacgagggcccgtacgatgcgatcgtgatcgggtcagggatcgggggcctggtggcggcgacgcagctcgcggccaagggcgcgcgggtgctggtcctcgagaagtacctcatccccgggggaagctccgggtactaccgccgcgacgggttcaccttcgacgtcggctcctccgtcatgttcggcttctccgacaagggtaacttgaatttgatcacacaagcattggaagcagttgggcgtaagatgagagttctaccagacccttctacagttcatttccacctacccggtgatctctctgtccttgtgcataggaagtatgaagacttcatcaacgaactggtcagcaaattccctcacgagaaagaagggatccttaaattctacgatacatgctggacgatcttcaattcactaaattcgttggagctgaagtctctagaggaacccctttatctttttcggcaatttttccagaagcctcgggaatgcttaactctagcttattatttgccacagaatgctggggatatcgctcgcaagttcataaaagatcaggagctactctccttcatagatgccgagtgttttattgtgagcacagtcaatgccttgcaaacacccatgataaatgcaagcatggcactttggagggattaattatccagttggtggcgttggtggtattgcaatatccctggcagatggccttgttgaaaagggcagcgaaatccgttacaaggcgaatgtaaccaacgttattcttgaaaatggaaaggctgttggggtgaggttatcaaatgggaaggagttctttgctaaaacagtgatatcaaatgccaccagatgggacacgtttggtaattctaatgaaaactcgtgaaagaggaacttccagaagaggagaaaaactttcaaaagaattacgttaaggcaccatcattcctttcaattcatatgggtgtcaaagcgtcagttctgcctgctggcactgactgccaccattttatacttgaggataattggaataatttggaaaagccttatggaagcatatttttaagtatccctacagttcttgatccatcattagctcccgaaggacatcatatacttcatatatttactacagcaggcatagaagattgggagggtctttctaggaaggaatatgaagagaaaaaagaggtggtggccaatgagattataagaaggcttgaaaagaagttgtttcctggtcttcaagattcaatagtcctcaaagaggtaggctcaccaaaaacacaccgaagatttcttgctcgaaatgacggtacatatggaccaatgccacggggtaaaccgaagggattactggctatgcctttcaatactacctcaatagatggcctttactgtgtcggtgacagctgtttccccgggcaaggtgtcatagctgtagcattctcagggatcatgtgtgctcaccgagttgctgcagatattggactagagcagaagtctccagttctagatgctggtcttcttgggctactcagatggctgagaacacttgcataggacggtatattagacaaagtgggaaaatggacctcatcttctttcaaaaggctgatgtttaactagagttcggattctgcactatcatctgagtggccgggttctgtcatgggtgtgccgtgtacaatcgaggctgggctagcagcatgtggtcgcccatcatgagcacctgcagataattgtgctgggtttatatagtagtaatcctaattggcaacccaagtgtctgaagctgcgcgtgcttgacacggtacggtgcgctcccgcgcatatagaaaacaaattgtcaattgcgatgttgcatcacttaggtacaagttacatggtatgccaaacagtgtaattgttctccaactagattcttcaaagacactttctcaattgtaccaggatacaggttgcacggcatagtgaattgtgtcaaaaattttggatcacaatgatgtagcagctcatggtacagattaaatcagataatcagttagcaagattcccggtgagcgtcgtgccaattggatggatcatgatcgttgtccac

SEQ ID NO: 23304 - DNA, 3215 bp, Zea Mays
attaaaagaagaagaaaagtaaaaaatgataaacaagatggaaaagtacatgtgtttgtttaatactaaagcgaagtaaaatacaaaactattgaataaaaatattacacattaatttatctgttgggggctctattgccgaagttactgaaaactctatattatcaagctaaaacatgttttaggtaccctacaaaaggaaagcaaagctaaacttggtcaaaagtaacatgtaaagcgaatattaggttatgaagtttcaggttcataggactgtcacaaagacatgaatcgaagaagacagcttcggtcagctttgattctacggacatcggtgcacatatacagaaaatgaggagaagaatcagaaagtttgctcaacatggaaggagggaagaaaaagacggcgctaccctcatgagacttgtggtccatgcatgcgcataaaccttatcggctcgtttgtaattttatacaaagttgtaccgtgccactataaataggagcatgtcatgcataaggacggggttcagacgtaagagaaccgatcgagtctctctgcctttgaagctacctccgtgtgctctccgatcccttgtaaagccgccaaaggtatatccgtaactactcattatagcgtaaggaacaaaggaaaacaataacatatcacgatgagtaatccattccatcccttatgtttttgtgatttattcttactgttatctttcttgtatttctcaccttctcccttttaacgaatcttcaaaataggagctgattaaagggagaacttcaagatttaatcacttgcgttgccttgtttttgaccgaaaacaagtgaccaaacattggcttagttttgccttaattattatcatcatatcgcttgcagcctggtcgttagttgtatatgtggagatagagagaggcataagtgcaatgcagtgcacagctagcagcgtgaatttggcagcaattggctagagaagatagaggagcagagatgatatagcaatacaactagcagcttgaatatattaattggcagcaaatagagaagatagatagatagatagatagatagatagatagatagatagatagatagacagatagagaaatagagatagatactcgtcattagctagcgtgcctttttctggatcggcccagctagcgggtgtgtcctttataaggaacgaatagcatgtgttggacgggacacgggaaggccagtacttctctccccgttcccggcctggatgccacccacaacgttttgatccgccccgatcgcaactccgcaccgcgctcctgttctcagcatggggatggtagtaaacagcagtgcagtcccgttctccatcgcgctgcttgccgtcgtcatcgcggcagtagtaatcaccaaggctgcactgggacgacgacgacgacgacgaacagccgcagccaacaacccagcaccaccaccccgcaacgacgtcgacaccggccggcggcgtccccccgcggccatcaccggcgtcacctcagccgtccgactcgtgcacgcgctcgccaccaagggtttcgaagccacgctgtacgagcagtacgcgaagctggggagcgtgttcacggtgagtctcttcgggatgaagacgacgacgttcctggccgggccggacgtctcggcgcacttctaccaggggcccgactccgagatcagccacggcgacctcctcgagttcaccgtccccatgttcggcgagggcgtcgccttcgccgtcgacgccgccacccgcgccgagcagcatcgcttctacctcgacgcgctgaagccggccaggctaaggtgccatgtcgctcccatgctccaggaagtggaggagttcttcgcgagatgggggcagcagggcaccgtggacctgaagcaggagctggagcaggtgctgatgctgatcacggcgcggtgcctgctggggaaagaggtgcgggagaggatgctccacgaggtcttctccgcgtaccgcgacctcacggagaacagcctccatctcaccagcctgctgttcccgtacgcgcccacgccggcggcgcggcggcgcgacagggcgcgcgccacgctctccggcatcttctccgagatcgtccgctcgcgcaggcgctcgggccgccgagccggggacgacgacggcgacgtgctgcagagcctcgtggacgccaggtacagggacgggcgcggcacgacggaggccgaggtcacggggctcgtcatcgccatcctcttcgccgggaagcacacgagctcggccaccagcacgtggactggcgcgcggctgctgcgccacgcggagtgcctggacgccgccgtcgacgagcagcggagggtcgtggcggagcgcgggagcggcgtcgactacgacgccctggcggagatgggcttcttgcactgctgcatcaaggaggcgctgcggatgcacccgacggcgccgctgttcctccgtagggcgcaccggggcttcaccgtgcggacgagggagggggccgagtacgatgtcccgagcgggcagaccgtggccagccctctgctgatcaaccactacatcccctacgtctacagggacccgcacgtgtacgacccgcggaggttcggtccgggcagggaggaggacagggtcggcgggaggttctgctacaacgcgttcagcggcgggaggcatgcctgccctggagaagcgtatgcgtacatgcaggtgaaggtgatatggagccacctgctgaggaacttcgagctcaagctggtgtcgccgttccctcggaccgattggatgaagctttcgccggaggcgagagggaaggtggtggtgagctacaagaggcggatggtgccggttgggagcgtgttggagaactgatgtctctgatggttacttttgtatgagctgtgtgtttgtatgcaatgtgtgttgagcaccatttgtgacgctggcacggtcggacggcttggccctgaagactggacggtccggctcgcggacggtctgcgaatagatcgaataagacacaactaatttctttttcgtgcgagtttattcctctaaatccatggttgctgtcgggagatgactagaaatggatccagacattccctctatatatattaagtccctctatatatattaactctctatatattaagggatacagtcgtcaattgcaatcatcaacaatcg

SEQ ID NO: 23305 - DNA, 2065 bp, Zea Mays
tgaacatccgttcggggcggcaggtttggtcatatagattgcggcagccagataaataaaatgttgttggctattggcatcttgtatgtttggatggttgccaaatattggactgctcaaagtcacgtgaataactcgctagtttattttccctggtcgttttctggacagccacaagcaaattgattttcccgagccgctgccgaaaaattgccgctgcggcgctgccaccatcccacttctccgcgccgcctccagatcgagcgcgttattaggttttctctgtccctcacccgccgccgcagaacgctgatggcccagcgctggcgctccagggcgcggtgggactcagacctggacgaagatggttccccgccttttcggcagccgcgcaggggcgggagcgacgaggaggacgacgaggtggggaacgaggacctcagcctggagatcatcgcgcgcgcgcagcggaagcggcgttgggcgtcctgcggtggagtcaccgggttcgccaacctgctctcggtgtcctccggcgacgacgaggacgccgtggtggagctcgctgaggcggatgagccccggaggaaacagaagaagaggcagcactggaagcaaaggaaaaggcaacggaaggaggcgaccgctgctgctgcggctgcggctgccgtggacgaggaagagaaggaggttggtaccacccaggaggagcaaattgggacagcagaatcggtgctaactgaagatggggttgatgcccctacatctcacagtatgtttctgcggaagctccttcgcataccaagatactttgatcctggggaaacattgttggagacttgctttaattgtagcgaggaaggacatgtagctgcaaactgcccaatgggaaagcggaagaagccttgctttgtttgtgggttgtttgggcacaatgcaaagcagtgcaagcagggtcaagactgtttcatctgcaaaaaaggagggcatatggcgaaggattgtcctgataagcacaagaggaatgatcatcaatccacattatgtataagatgtggagaaacaggtcatgatatgtttggatgtgccaatgattacccaccagatgatatcgagcaaataagatgctacgcgtgtaatcagaagggccatctatgttgttccgacttctttgacaattctctggaacaggcaatttacattggaacttctgttacagggatgtgctaagcaacgcagggaagctagtgctgtcacaaccccaaccttatgcttcaaatgtggcgaggaaggtcacttcgcacgcggctgcacgaagaatgccaagtccgatgggccaaaaggctggtcgtcaccacacagtcagaggaagggaagatggaaaaacgatggcaagtcaccatcacacatccggaggaaggaaaaatggaagaaagattccagtgctagatcagctcctcatgatgcctgtacaacaagcaaaagcaatagcccctctttcgaggaaagaatgggcgcatctaatcataaatcgaaatggaggggtggttggactggtgatgacgatctaccatcgaagaagtacaaacccaatggatggggttcaccagctactcccaagaggtcttacacgaatcaccagtacttgtctggtggtggtgactacttcactccccagtcctcacgaaggcacaaccatggtaccgcgtcacccggtgctaggaaacacaggttctcgtcgtcaatattcgccgccagcaacacccatgtccggttcaaaagaagctagccggatgcacgtgtctgtttttgttgcttgtttagccattgataacagttatctcctggggttgaactctagctgctggttcatgcccttagataggtgtcttgtctgagattacatatttacatatgtaagcgcggttgaaactgattatttctactgtgaacaaagctttcatgccatggcgtcgccctccggataacaatgccttggtgcaaaaaaaaaacggcaactgaaaactgtttggtttgctgcctaaagcactacaatgtgcttaac

SEQ ID NO: 23306 - DNA, 2086 bp, Zea Mays
tgaacatccgttcggggcggcaggtttggtcatatagattgcggcagccagataaataaaatgttgttggctattggcatcttgtatgtttggatggttgccaaatattggactgctcaaagtcacgtgaataactcgctagtttattttccctggtcgttttctggacagccacaagcaaattgattttcccgagccgctgccgaaaaattgccgctgcggcgctgccaccatcccacttctccgcgccgcctccagatcgagcgcgttattaggttttctctgtccctcacccgccgccgcagaacgctgatggcccagcgctggcgctccagggcgcggtgggactcagacctggacgaagatggttccccgccttttcggcagccgcgcaggggcgggagcgacgaggaggacgacgaggtggggaacgaggacctcagcctggagatcatcgcgcgcgcgcagcggaagcggcgttgggcgtcctgcggtggagtcaccgggttcgccaacctgctctcggtgtcctccggcgacgacgaggacgccgtggtggagctcgctgaggcggatgagccccggaggaaacagaagaagaggcagcactggaagcaaaggaaaaggcaacggaaggaggcgaccgctgctgctgcggctgcggctgccgtggacgaggaagagaaggaggttggtaccacccaggaggagcaaattgggacagcagaatcggtgctaactgaagatggggttgatgcccctacatctcacacgcataccaagatactttgatcctggggaaacattgttggagacttgctttaattgtagcgaggaaggacatgtagctgcaaactgcccaatgggaaagcggaagaagccttgctttgtttgtgggttgtttgggcacaatgcaaagcagtgcaagcaggttggtcccccctatctccgagggattatcacttggtgacttggggtcaagactgtttcatctgcaaaaaaggagggcatatggcgaaggattgtcctgataagcacaagaggaatgatcatcaatccacattatgtataagatgtggagaaacaggtcatgatatgtttggatgtgccaatgattacccaccagatgatatcgagcaaataagatgctacgcgtgtaatcagaagggccatctatgttgttccgacttctttgacaattctctggaacaggcaatttacattggaacttctgttacagggatgtgctaagcaacgcagggaagctagtgctgtcacaaccccaaccttatgcttcaaatgtggcgaggaaggtcacttcgcacgcggctgcacgaagaatgccaagtccgatgggccaaaaggctggtcgtcaccacacagtcagaggaagggaagatggaaaaacgatggcaagtcaccatcacacatccggaggaaggaaaaatggaagaaagattccagtgctagatcagctcctcatgatgcctgtacaacaagcaaaagcaatagcccctctttcgaggaaagaatgggcgcatctaatcataaatcgaaatggaggggtggttggactggtgatgacgatctaccatcgaagaagtacaaacccaatggatggggttcaccagctactcccaagaggtcttacacgaatcaccagtacttgtctggtggtggtgactacttcactccccagtcctcacgaaggcacaaccatggtaccgcgtcacccggtgctaggaaacacaggttctcgtcgtcaatattcgccgccagcaacacccatgtccggttcaaaagaagctagccggatgcacgtgtctgtttttgttgcttgtttagccattgataacagttatctcctggggttgaactctagctgctggttcatgcccttagataggtgtcttgtctgagattacatatttacatatgtaagcgcggttgaaactgattatttctactgtgaacaaagctttcatgccatggcgtcgccctccggataacaatgccttggtgcaaaaaaaaaacggcaactgaaaactgtttggtttgctgcctaaagcactacaatgtgcttaac

SEQ ID NO: 23307 - DNA, 2233 bp, Zea Mays
ccctggtcgttttctggacagccacaagcaaattgattttcccgagccgctgccgaaaaattgccgctgcggcgctgccaccatcccacttctccgcgccgcctccagatcgagcgcgttattaggttttctctgtccctcacccgccgccgcagaacgctgatggcccagcgctggcgctccagggcgcggtgggactcagacctggacgaagatggttccccgccttttcggcagccgcgcaggggcgggagcgacgaggaggacgacgaggtggggaacgaggacctcagcctggagatcatcgcgcgcgcgcagcggaagcggcgttgggcgtcctgcggtggagtcaccgggttcgccaacctgctctcggtgtcctccggcgacgacgaggacgccgtggtggagctcgctgaggcggatgagccccggaggaaacagaagaagaggcagcactggaagcaaaggaaaaggcaacggaaggaggcgaccgctgctgctgcggctgcggctgccgtggacgaggaagagaaggaggttggtaccacccaggaggagcaaattgggacagcagaatcggtgctaactgaagatggggttgatgcccctacatctcacagtatgtttctgcggaagctccttgtaagtgacatgtgaatttattgggtttgttctactaaaggaagcttactattaaattgtatgcactgatcagtccaacaaaaaagcttgagttgatggtagaggtggacaattcacttatacttcaacaccacctcacgtagaggatctcttaggtctcagtcgtggaatataagtgatcaataattattttatttaattgtgcctgccaagattcgagcttgagacctctagctttgattgcatgcactgaccagttcaaccgaaagcttaagttgatagggagaggtgggtagttcacttatacttgaacacttaacattgtgctacttctacttgtgaccagcgcataccaagatactttgatcctggggaaacattgttggagacttgctttaattgtagcgaggaaggacatgtagctgcaaactgcccaatgggaaagcggaagaagccttgctttgtttgtgggttgtttgggcacaatgcaaagcagtgcaagcagggtcaagactgtttcatctgcaaaaaaggagggcatatggcgaaggattgtcctgataagcacaagaggaatgatcatcaatccacattatgtataagatgtggagaaacaggtcatgatatgtttggatgtgccaatgattacccaccagatgatatcgagcaaataagatgctacgcgtgtaatcagaagggccatctatgttgttccgacttctttgacaattctctggaacagggatgtgctaagcaacgcagggaagctagtgctgtcacaaccccaaccttatgcttcaaatgtggcgaggaaggtcacttcgcacgcggctgcacgaagaatgccaagtccgatgggccaaaaggctggtcgtcaccacacagtcagaggaagggaagatggaaaaacgatggcaagtcaccatcacacatccggaggaaggaaaaatggaagaaagattccagtgctagatcagctcctcatgatgcctgtacaacaagcaaaagcaatagcccctctttcgaggaaagaatgggcgcatctaatcataaatcgaaatggaggggtggttggactggtgatgacgatctaccatcgaagaagtacaaacccaatggatggggttcaccagctactcccaagaggtcttacacgaatcaccagtacttgtctggtggtggtgactacttcactccccagtcctcacgaaggcacaaccatggtaccgcgtcacccggtgctaggaaacacaggttctcgtcgtcaatattcgccgccagcaacacccatgtccggttcaaaagaagctagccggatgcacgtgtctgtttttgttgcttgtttagccattgataacagttatctcctggggttgaactctagctgctggttcatgcccttagataggtgtcttgtctgagattacatatttacatatgtaagcgcggttgaaactgattatttctactgtgaacaaagctttcatgccatggcgtcgccctccggataacaatgccttggtgcaaaaaaaaaacggcaactgaaaactgtttggtttgctgcctaaagcactacaatgtgcttaac

SEQ ID NO: 23308 - DNA, 1864 bp, Zea Mays
ccctggtcgttttctggacagccacaagcaaattgattttcccgagccgctgccgaaaaattgccgctgcggcgctgccaccatcccacttctccgcgccgcctccagatcgagcgcgttattaggttttctctgtccctcacccgccgccgcagaacgctgatggcccagcgctggcgctccagggcgcggtgggactcagacctggacgaagatggttccccgccttttcggcagccgcgcaggggcgggagcgacgaggaggacgacgaggtggggaacgaggacctcagcctggagatcatcgcgcgcgcgcagcggaagcggcgttgggcgtcctgcggtggagtcaccgggttcgccaacctgctctcggtgtcctccggcgacgacgaggacgccgtggtggagctcgctgaggcggatgagccccggaggaaacagaagaagaggcagcactggaagcaaaggaaaaggcaacggaaggaggcgaccgctgctgctgcggctgcggctgccgtggacgaggaagagaaggaggttggtaccacccaggaggagcaaattgggacagcagaatcggtgctaactgaagatggggttgatgcccctacatctcacacgcataccaagatactttgatcctggggaaacattgttggagacttgctttaattgtagcgaggaaggacatgtagctgcaaactgcccaatgggaaagcggaagaagccttgctttgtttgtgggttgtttgggcacaatgcaaagcagtgcaagcagggtcaagactgtttcatctgcaaaaaaggagggcatatggcgaaggattgtcctgataagcacaagaggaatgatcatcaatccacattatgtataagatgtggagaaacaggtcatgatatgtttggatgtgccaatgattacccaccagatgatatcgagcaaataagatgctacgcgtgtaatcagaagggccatctatgttgttccgacttctttgacaattctctggaacagggatgtgctaagcaacgcagggaagctagtgctgtcacaaccccaaccttatgcttcaaatgtggcgaggaaggtcacttcgcacgcggctgcacgaagaatgccaagtccgatgggccaaaaggctggtcgtcaccacacagtcagaggaagggaagatggaaaaacgatggcaagtcaccatcacacatccggaggaaggaaaaatggaagaaagattccagtgctagatcagctcctcatgatgcctgtacaacaagcaaaagcaatagcccctctttcgaggaaagaatgggcgcatctaatcataaatcgaaatggaggggtggttggactggtgatgacgatctaccatcgaagaagtacaaacccaatggatggggttcaccagctactcccaagaggtcttacacgaatcaccagtacttgtctggtggtggtgactacttcactccccagtcctcacgaaggcacaaccatggtaccgcgtcacccggtgctaggaaacacaggttctcgtcgtcaatattcgccgccagcaacacccatgtccggttcaaaagaagctagccggatgcacgtgtctgtttttgttgcttgtttagccattgataacagttatctcctggggttgaactctagctgctggttcatgcccttagataggtgtcttgtctgagattacatatttacatatgtaagcgcggttgaaactgattatttctactgtgaacaaagctttcatgccatggcgtcgccctccggataacaatgccttggtgcaaaaaaaaaacggcaactgaaaactgtttggtttgctgcctaaagcactacaatgtgcttaac

SEQ ID NO: 23309 - DNA, 1906 bp, Zea Mays
acaagcaaattgattttcccgagccgctgccgaaaaattgccgctgcggcgctgccaccatcccacttctccgcgccgcctccagatcgagcgcgttattaggttttctctgtccctcacccgccgccgcagaacgctgatggcccagcgctggcgctccagggcgcggtgggactcagacctggacgaagatggttccccgccttttcggcagccgcgcaggggcgggagcgacgaggaggacgacgaggtggggaacgaggacctcagcctggagatcatcgcgcgcgcgcagcggaagcggcgttgggcgtcctgcggtggagtcaccgggttcgccaacctgctctcggtgtcctccggcgacgacgaggacgccgtggtggagctcgctgaggcggatgagccccggaggaaacagaagaagaggcagcactggaagcaaaggaaaaggcaacggaaggaggcgaccgctgctgctgcggctgcggctgccgtggacgaggaagagaaggaggttggtaccacccaggaggagcaaattgggacagcagaatcggtgctaactgaagatggggttgatgcccctacatctcacagtatgtttctgcggaagctccttcgcataccaagatactttgatcctggggaaacattgttggagacttgctttaattgtagcgaggaaggacatgtagctgcaaactgcccaatgggaaagcggaagaagccttgctttgtttgtgggttgtttgggcacaatgcaaagcagtgcaagcagggtcaagactgtttcatctgcaaaaaaggagggcatatggcgaaggattgtcctgataagcacaagaggaatgatcatcaatccacattatgtataagatgtggagaaacaggtcatgatatgtttggatgtgccaatgattacccaccagatgatatcgagcaaataagatgctacgcgtgtaatcagaagggccatctatgttgttccgacttctttgacaattctctggaacaggttagctgttataactgtgcccaatctggccattctggcctgggatgtgctaagcaacgcagggaagctagtgctgtcacaaccccaaccttatgcttcaaatgtggcgaggaaggtcacttcgcacgcggctgcacgaagaatgccaagtccgatgggccaaaaggctggtcgtcaccacacagtcagaggaagggaagatggaaaaacgatggcaagtcaccatcacacatccggaggaaggaaaaatggaagaaagattccagtgctagatcagctcctcatgatgcctgtacaacaagcaaaagcaatagcccctctttcgaggaaagaatgggcgcatctaatcataaatcgaaatggaggggtggttggactggtgatgacgatctaccatcgaagaagtacaaacccaatggatggggttcaccagctactcccaagaggtcttacacgaatcaccagtacttgtctggtggtggtgactacttcactccccagtcctcacgaaggcacaaccatggtaccgcgtcacccggtgctaggaaacacaggttctcgtcgtcaatattcgccgccagcaacacccatgtccggttcaaaagaagctagccggatgcacgtgtctgtttttgttgcttgtttagccattgataacagttatctcctggggttgaactctagctgctggttcatgcccttagataggtgtcttgtctgagattacatatttacatatgtaagcgcggttgaaactgattatttctactgtgaacaaagctttcatgccatggcgtcgccctccggataacaatgccttggtgcaaaaaaaaaacggcaactgaaaactgtttggtttgctgcctaaagcactacaatgtgcttaac

SEQ ID NO: 23310 - DNA, 2252 bp, Zea Mays
acaagcaaattgattttcccgagccgctgccgaaaaattgccgctgcggcgctgccaccatcccacttctccgcgccgcctccagatcgagcgcgttattaggttttctctgtccctcacccgccgccgcagaacgctgatggcccagcgctggcgctccagggcgcggtgggactcagacctggacgaagatggttccccgccttttcggcagccgcgcaggggcgggagcgacgaggaggacgacgaggtggggaacgaggacctcagcctggagatcatcgcgcgcgcgcagcggaagcggcgttgggcgtcctgcggtggagtcaccgggttcgccaacctgctctcggtgtcctccggcgacgacgaggacgccgtggtggagctcgctgaggcggatgagccccggaggaaacagaagaagaggcagcactggaagcaaaggaaaaggcaacggaaggaggcgaccgctgctgctgcggctgcggctgccgtggacgaggaagagaaggaggttggtaccacccaggaggagcaaattgggacagcagaatcggtgctaactgaagatggggttgatgcccctacatctcacagtatgtttctgcggaagctccttgtaagtgacatgtgaatttattgggtttgttctactaaaggaagcttactattaaattgtatgcactgatcagtccaacaaaaaagcttgagttgatggtagaggtggacaattcacttatacttcaacaccacctcacgtagaggatctcttaggtctcagtcgtggaatataagtgatcaataattattttatttaattgtgcctgccaagattcgagcttgagacctctagctttgattgcatgcactgaccagttcaaccgaaagcttaagttgatagggagaggtgggtagttcacttatacttgaacacttaacattgtgctacttctacttgtgaccagcgcataccaagatactttgatcctggggaaacattgttggagacttgctttaattgtagcgaggaaggacatgtagctgcaaactgcccaatgggaaagcggaagaagccttgctttgtttgtgggttgtttgggcacaatgcaaagcagtgcaagcagggtcaagactgtttcatctgcaaaaaaggagggcatatggcgaaggattgtcctgataagcacaagaggaatgatcatcaatccacattatgtataagatgtggagaaacaggtcatgatatgtttggatgtgccaatgattacccaccagatgatatcgagcaaataagatgctacgcgtgtaatcagaagggccatctatgttgttccgacttctttgacaattctctggaacaggttagctgttataactgtgcccaatctggccattctggcctgggatgtgctaagcaacgcagggaagctagtgctgtcacaaccccaaccttatgcttcaaatgtggcgaggaaggtcacttcgcacgcggctgcacgaagaatgccaagtccgatgggccaaaaggctggtcgtcaccacacagtcagaggaagggaagatggaaaaacgatggcaagtcaccatcacacatccggaggaaggaaaaatggaagaaagattccagtgctagatcagctcctcatgatgcctgtacaacaagcaaaagcaatagcccctctttcgaggaaagaatgggcgcatctaatcataaatcgaaatggaggggtggttggactggtgatgacgatctaccatcgaagaagtacaaacccaatggatggggttcaccagctactcccaagaggtcttacacgaatcaccagtacttgtctggtggtggtgactacttcactccccagtcctcacgaaggcacaaccatggtaccgcgtcacccggtgctaggaaacacaggttctcgtcgtcaatattcgccgccagcaacacccatgtccggttcaaaagaagctagccggatgcacgtgtctgtttttgttgcttgtttagccattgataacagttatctcctggggttgaactctagctgctggttcatgcccttagataggtgtcttgtctgagattacatatttacatatgtaagcgcggttgaaactgattatttctactgtgaacaaagctttcatgccatggcgtcgccctccggataacaatgccttggtgcaaaaaaaaaacggcaactgaaaactgtttggtttgctgcctaaagcactacaatgtgcttaac

SEQ ID NO: 23311 - DNA, 2767 bp, Zea Mays
cggcccaataagcgcagcaggcttacctacccgggccgacggccacatagggcttcctagttccttcccttcgtctccccaccatcggcttccgcatctccccgcctccacccacggcactcgcaagcagcgctcattagtcactagggttttaaactttccccccgatccgcctcgccgccggcgtcgtcctccgccggaaatccaccaccctacacccagccggagacgactatggtgggtttcggctcgatggcgggctacgggatccagtcgatgctcaaggaaggccaccgccacctctccgggctcgaggaggccgttctcaagaacatcgacgcctgccgcgagctgtccgccattacgcgcacctctctcggcccgaacggaatgaacaaaatggttatcaatcacttggacaagctgtttgtcacaaacgatgctgccaccattgtgaatgagctcgaagttcagcaccctgccgctaagattctggtactggctggtagggctcaacaggaggagattggggatggggccaatctcaccatatcgtttgccggtgaactgcttgagaaggctgaggagctcatcaggatgggcttgcatccaagtgagatcatcattggctacactaaagccatcaacaagacaattgagatcttggaggatcttgttgagaaaggctcagagaacatggatgtgagaaacaaggaggacgttgtgttgaggatgagatccgctgtcgcgagcaagcagtttggtcaggaggatataatgtgccctcttgtggctgatgcctgcattcaagtttgccccaaaaatccagcaaacttcaatgtcgacaatgttagagtggctaagctgcttggaggtggtttgcacaattcttctgtggtccgtgggatggttctaaaaaatgatgctgttggtagcatcaaaagggtggagaaggcaaaggtaagtcaaaatgctactcttcattcacattgcacacctgtcaaagttctgtacctttcttttctattgattttgatgtttttttaatgaaatgggccatggatggagctctaaacattattttcacaatgttatgaatatttgttgttggaaactcatggataatcatgtacgcattgtttgtatagtttgttattgtcaagtgaatcatatatgcttatgtagcattacatcactcatagaggatccagttcctttggtgatgcctggcaaaccaattcctacttaaagaggtcacatcacaacacttttcatttacttatgttatgcttggtgctgttgtaaagttttctgtatctaaaaaatcacactttttagaacactattttatttatttctgtctttttcgttcacgctgctgctgatggcaggtatatgctatagaatggtgcatagaacttcaatatgcaatggaatcctaacgcgttacagcatagtacccatcttctgtatgatgtctggcagtattccttgctgaattctaaaaccaatcaatattcagattgcagtatttgctggtggtgtcgatacctcagcaaccgaaacaaagggaacagtgttgatccattccgctgagcagctagaaaattatgctaagactgaggaagctaaggtggaggagcttataaaagctgttgctgactcaggtgccaaggttattgtcagtggagctgcagttggtgacatggcgctacatttttgtgaacgttacaagctgatggttctgaaaatcagctcgaagtttgaactgagaagattctgccgtactactggggctgttgcaattttgaaacttagccaacccaatgcggatgaactagggtacgcagactctgtttccgtggaagaaattggtggtactcgggttattgtcatcaagaacgaagaaggtggaaattcagtggctactgttgtcttgagaggcagtactgacagtatactagatgatcttgaaagagctgttgatgatggcgtcaatacgtacaagtcaatgtgcagggacagtaggataattcctggtgctgctgcaacagaaatagagctggcaaagagattgaaggagttctctttgaaggaaacagggttggaccagtatgctgttgcgaaatttgctgaaagctttgaaatggttccaagaaccctggcagaaaatgccggacttagcgcaatggatgtaatatcctctctttatgctgagcatgctagtggcaatgtgaaagttggcattgacctggaggaaggtgcctgcaaggacatcacgaccttgaaaatatgggacctttatgtcacaaagttctttgccctaaaatattctgccgatgccgcatgcaccgtgctgcgggttgaccagatcattatggcgaagccggcaggaggtccaagaagagatgcccagcctggtggcgggatggacgaggactagtttgactgtgattgttctctttgtgtatcacgtacgcaatgtttcagagcagggaacatcatgtcttatttagggtttggttctgtagaaggttttggtgcctgtagttcacgtttggaagggttgcacggctgtgctggtatcgtatggggaatttgcttgttctttcctggtgtattattgcagtgccgatgtattattcattcgagggttctttccttcagttcatcataccgactgagctcatatgagtgttacttcagtttttttattatagaagcaaaaatgttccagccttttatagtcttctgcgtaaaaaatatt

SEQ ID NO: 23312 - DNA, 1522 bp, Zea Mays
ccaattcctacttaaagaggtcacatcacaacacttttcatttacttatgttatgcttggtgctgttgtaaagttttctgtatctaaaaaatcacactttttagaacactattttatttatttctgtctttttcgttcacgctgctgctgatggcaggtatatgctatagaatggtgcatagaacttcaatatgcaatggaatcctaacgcgttacagcatagtacccatcttctgtatgatgtctggcagtattccttgctgaattctaaaaccaatcaatattcagattgcagtatttgctggtggtgtcgatacctcagcaaccgaaacaaagggaacagtgttgatccattccgctgagcagctagaaaattatgctaagactgaggaagctaaggtggaggagcttataaaagctgttgctgactcaggtgccaaggttattgtcagtggagctgcagttggtgacatggcgctacatttttgtgaacgttacaagctgatggttctgaaaatcagctcgaagtttgaactgagaagattctgccgtactactggggctgttgcaattttgaaacttagccaacccaatgcggatgaactagggtacgcagactctgtttccgtggaagaaattggtggtactcgggttattgtcatcaagaacgaagaaggtggaaattcagtggctactgttgtcttgagaggcagtactgacagtatactagatgatcttgaaagagctgttgatgatggcgtcaatacgtacaagggacagtaggataattcctggtgctgctgcaacagaaatagagctggcaaagagattgaaggagttctctttgaaggaaacagggttggaccagtatgctgttgcgaaatttgctgaaagctttgaaatggttccaagaaccctggcagaaaatgccggacttagcgcaatggatgtaatatcctctctttatgctgagcatgctagtggcaatgtgaaagttggcattgacctggaggaaggtgcctgcaaggacatcacgaccttgaaaatatgggacctttatgtcacaaagttctttgccctaaaatattctgccgatgccgcatgcaccgtgctgcgggttgaccagatcattatggcgaagccggcaggaggtccaagaagagatgcccagcctggtggcgggatggacgaggactagtttgactgtgattgttctctttgtgtatcacgtacgcaatgtttcagagcagggaacatcatgtcttatttagggtttggttctgtagaaggttttggtgcctgtagttcacgtttggaagggttgcacggctgtgctggtatcgtatggggaatttgcttgttctttcctggtgtattattgcagtgccgatgtattattcattcgagggttctttccttcagttcatcataccgactgagctcatatgagtgttacttcagtttttttattatagaagcaaaaatgttccagccttttatagtcttctgcgtaaaaaatatt

SEQ ID NO: 23313 - DNA, 3350 bp, Zea Mays
gacacactgatgaaacaatgtataagaagtagtaggcataagaacatgctagctgagaatattctcttggtagccacaaaaaattgcagagtgcaacaaacttgagaaaccaagactaagaatctgaagaacttcgatactataagaagactggcatcaagaaaaggcttaaaagcatacaaatagcatattttacagacaatgacacagtccaaccattccttggacgtggttcgagtgagaactcaattaaatgattagtatttggatgttgtgtcttggaaagctggaacagcaaaaacggtggtcctgctcagggttcagcacatccacattctctggatttgtaccctattcaggttgctgcgatcttgttctgagtttagcatatccacattctctcgatctctttttagatagcactcaaaattcagatgcaaggtctctatgatactggttatctataattctagtgcccttcttttgcaatgataattaggtcagttgtctcactaacgctacgctgagctagattgaatgcagggattgcagctgcagctaatgacgttttccttggcccagtccatacttatcagccaatagtgttcaagggagggtagttataagaatgttgatgttgccactatttttattggctcaaaggaagaattgaatcaggagaggaaacagtaacagagtgcagagataatgaattccaaactgctcaatgatctatctgagataaagtctgctgccaagcgttatttgtaagattgtgagaaggaggaaggcacgtgtgctcgtggaagaagtctatgacaaagttgaggtggatgctctaacacttgaagcgatgaagattagagatgaaccggaggaagagaagatgttccaaatggctgaggtttggcgtgaatagagggttggggtccagcggggttaacatgccttctgctcgtattttccaatcacaaagttcattgtaatttagcaattacagtgatgtcatgcagaaaacactcaagagttgacccaacatattgagaaaacaaagttaactataccaacctccaaatcttgtaggaccttctggtgtttcatgcctataactaagaccataaagctccttcatctcaaagttgtataaataacctacaaagcataccaaaagccaaaactttagttcataaatgaatcatagtgcaagcagttatacaaagtgcaaaaaatggttgtttgacatgcttccaagcaaggtagatgtgtcgttagctgttactttgttgatatgaaccaagtatgtgaccatctgtaaaatgattaaaggttggtatatgcagaataggatcaaatgtgtaccatgaccaggagaaatcaccaagctgtttgtaggtatagtatcatatccaacaaggttgtctatcaaaatttgctgccacctgaaaaaagaaaacatagaaaaaattgagttaacattcttttgccacctgattatcatgtacaacttgaagtatatataatttggaacggatagagtagccagttctccattcaatgtctaacaaaattatgcttcttatgcttgagcataggatagatcccttcaacatcacacacacataactgagctgttgctcgcattgcattcaactgtaggccttgcacatatcaaggcaaattaagacccagatcaaaacaaaagataaacaaactaatacaatactactactacaacaacaatgggaagatagcccttcaaatctgcatgagtattcattagtagtaacaacacatagtagaagcagtacaaccaaacagtttaaatggatggttggcttcttgctcgctcatgccttgcaaccacaaccacaaccatggccataaacacccatgcactgcactgtatatgacacctttaaattggcatgcatggatgagcacatgtgtgcaagtttttttctatgtcctgatgggctggaagaatttcagcaagtcgtctaattctttcaccacgacctggatctaggtcaggcagacatgccccttgcaagatgcttgttgttaccatatgctccaatggttcaccatttttgccacattgtccaaaactcggtggctgctgagttccgctctacagggccagaaattgcaatgggttaaagcttcacacactgcatgctgtagttagctccccttttataataacaagatgtaatacaaggttcgggggatcaaaaagtccacccaacacattataacataatttcatgagtgaagaaacaagaaccatacctgctcccttaatggttctatatgctcctcctcgacctgcataacctgcgaatccgtctctacgatgcatgcctacatatcggggcaaacaaaagcatcaaaatcaaatgctgaagtaatcaaaaccaagtctgcgcataggatagctcaaaatccttaaagaatgaaccagattctgagcatcaccgagacatttcagcatttacccccttacctgtttcctatccctggacatcgaactctcggttcttgatcatgagcttctaccattgcatgacggcgcggtccgtgggatctagaagggctcgcttcctgccgctcctcatgtcccccactcccccaccacactccctgccacatctccatcaccatcagggaaccccaacgccatgttcccctccatcaccaccgccctagcgcaggaatccctggcaaggaaatcctctagcgtcatctctgtggcaccgtcagcatcagagctagcagcgggtatggggagggaggatgggcgtggagagccctccagctgtggatatctccttccacacccccgacattcgctggaccgcaacctccaagtctacctgggaaggatccaccgggccggggctgacgctggcggcggcagcgttgacggtctcgtggtcgtagatgttacagatgatgtcgcccatgttcatggatatgatgccgctattcctaaattgagcgaggttcgaggacgagccgacctcggtgtgctgctgcggggacgacgacgccatcacctgtgatgaggcagaggcgacagagagcgatgcgcgggttgggcgggcacacgccgcagcgagagtgtgtggggagcatgttgagcgcaagcagggcgagatccaggtggcacaggaatgagagcaggctggtggtgacgagggcttggaaggagaggagcggtgtggtcggggaggaagaagactcctatcagattcactaattggaaaacggagcagaggggagaacccgcatcatcactcggcacgaccgcgcccatgccttcttgcagcgcatagtggacgagcgtg

SEQ ID NO: 23314 - DNA, 870 bp, Zea Mays
cctcactgcaccgttctgagcccacctgtcagcctccgaacccaccacaccaaaatcccgcgccggccctgctaaaaccctaaaccgtgcccctccgtcccaaccgtccgccgcctccctctccgctccgccaagaccctcctcctcactcagctcccctcgagcccagaagcaccgcgcgcaccatgcggccaccgagagggcgcggcggcggcggccggttcggcggaggtggaggccgaggcggcggcggtggccggttcggcggcggaggccgtggtggccggttcggcggcgggttccgcgacgagggcccgcccgcagagaggtgtcgacgttcgtgcacgcgtgcgagggagacgcggtgacgaaactcaccaacgagaaggtgccctacttcaacgcgcccatatacctgcagaacaagactcaggtcggcaaggtcgacgagatcttcggccccatcaacgaatccgtgagcatctcctcgcctccctaatctctgaacgtctcaagagtaaaaacaaaagaaatacatctttttttaccttctcatgggcacttgaggctgtggtgaattttctagtgtggcaagagcagtagtattgccacagcttgttgtaggtgtgtttcttagagagagcactgattatttacttagtgcagtgaggacttgctgcgtgattttgcagatgtttaatcttgtatgtagtagaggtgttctcacattcgaacagtaaaatgccccacggagcatggtgttcctttgaaattattgttgatccctgctctcgttcctggcttcctgggctatagactcacatacttgttgttctgatgtgtcattttagtagggtgacatttattaag

SEQ ID NO: 23315 - DNA, 1170 bp, Zea Mays
tcagcgggcagcatcagtagcacgaggagctgaagcagcactagtagtgcagaagatgacacagagacaacgtgtggtctccagcccatctttggatttatgttctctctctgctagtgttatgcacgagtgatagtgcacatgtccttctgctcccatgcgtatatatagcaacaagcagcagtcttggaccattgttgttgcaagcagcctgtgtgtgatactgtactagctacacgaataatggacttttgtgtactaaacatgggcatcaagtatgccagtcgatgcgggccgggtttgctggggggtagccctcctctgcaaaagacacatatctatgcatcgactaagcagttattacagcaagaaacgaaaagaaacttagtatgagtagaaattcacaggggcatgtacgtacaacctagagatcttggatcggcttttaaagcacaagagacagctaataaatggtatgatacaaccctaagctttcaacgggttcttgtctcttgtattttttatataacccctagaaactattcaagagacagtttattaaataggattatacataccacaattagtattctttcgtactaaaaaactttttcaaatgggtaatggctatcacatgcacagtctattcacagcaagcgctgaagaaatctttgagctactcataagctctccgcactgggagggcagcatccaaaatgcttgcagattggtgtgcgcgcggggcccggggaatcatttggtcgttcaataatggacgatgtatcggagtgttccgatgaatctcaacgcgtggggatagcagtgggttagacaacataaaaggaggcatttctatctgtcctaaaaaaaattaatcaactttggaattatcgtaattcaaacagtcttgagttagatattaggctcgaccgctcgagaggattttggctgccaggaatttttttaaaaaaaaacacacaatgcttaaagtaccctgtgcagctattattctggcttgtatatttacgctctggcttaggttaattattatgctatgtaaagcctagctagtgctggctgggactataatgcgcatgcgtataagcatgatcagatatatctcatgcatggatagcatactaccacagaccacaataaaaagcatcaaac

SEQ ID NO: 23316 - DNA, 2272 bp, Zea Mays
ctttgtccgccgccctggattattagcacgggagctcccgcgcaccggcaagagacgggaggtaggaggagagtagatcgataaagcgcggcctctttctttcccatctttcctcaccagaaaagccgagcggagcgagaccagaccagtgtgagagagagagcggggtcacagcagcgcccagcggccgcagcacaaaagcgttcgtcgggggctttggattcccaggaattccgttccaaagcagccgaatcgcgggaccccgcctgctcgctcctcttcttccctccaaccgcccccccctcccctcctcctcccgccgccgcagcgagagccgagagcggagcgagcaaatcttggcgtttcgcgcccgctctcgcagtctccgggcgggggccgcctggcggagtggttacttccccgctggcttcttgctgcgccccgccattaaagccggcgcatttgggtttctctctccacctctctctatccgccccccaccgcgctctcgccctccctctccctctctagcggtagattggtgctgttcccccctaatcggtcggcggttgggggccgggttccgacgtctgcccgggagctcgaccgggcctccgatccgggctcccaagccgccgcctcccggggcgcccctccggaattcttgctttctcgggctccgaatctcgccgcctgtcgtcgccagcggctggcgcgggggcttggttcccggcgtttcattgcgaattcgggggcgatctggggcccctggtctggatggcgaggatttgagtggattcgagacgaacaagtggaggtggagccctgatctgggtggcgcccccgccgtggtatgtgccatgaggaagctcttcttctccgagtcggcctgcaaagagaccaagcttcactccgcgccccactcatggctgcccctcgagagggggaagctctccaagttctccggccatgccgccgccggctcctccatattaaactgtcctgaggcggcaatgaggagtttgcagcttgctcgtgagcatgctgcgagtgatcatgaaaggcttgtctatgaaggatggatattgtatgatactggccactgcgaggaaggattgcagaaggcagaagcatccattgcaatacaaaggtcatttgaggcattttttctgaaagcttatgctttggctgattcgagtcttgatccttctacctcagcaacagttgtatcacttctagaagatgcattgcggtgtccctcagatagacttcggaagggtcaggctctaaacaacctcggaagtgtttatgtggattgtgggaagctagacctggcagctgaatgctacattaatgcactaaagatcggtcacaccagagcgcatcaaggccttgcaagggttcatttcctacggaacaacagagctggtgcatacgacgaaatgaccaagctgatagagaaggccaggaacaacgcttcggcatatgagaagagatccgagtactgtgaccgggagctgacgaaaacggacctgcagatggtcaccaaactcgaccctctgcgagtttatccttacagataccgtgctgctgtgctgatggacaaccacaaggagaaagaggcgatcgcggagctgaccaaggccatcgccttcaaggcggacctgaacctgctccacctgcgcgcggccttccacgagcacgtgggcgacgtctcgagcgccctccaggactgccgcgcggccctctcggtggaccccaaccaccaggagatgctggagcttcaccaccgggtgaacagccaggaaccctgagcgcgctcccacggtgtacatacaggacaggaagcccctcatcatagccaaccggccataccggtgtatgttttgtaccatacacagcagatcagatcaatgtaaggacacagtagaaagccacattagatccctccccttgaaaaccaaacaccccattccttgtgtccctaattattagatatatatatgtgttgtttgctatagcctccccttagtaagttgttgctgccgattgtgattaagcctcctaattgtacccgccatgtgccccagcggcccgtgcttccagaatcaagaagttttgactgtaccatgtgtatgtaagtgaaatgggggaacaaaggatggtggaagcttttgtccgcgccaaactgtcaagcatgcaggcacctgttcttgccgagcacttgattgattgcatatacagatgtgtgtttctggctggtgggtttttt

SEQ ID NO: 23317 - DNA, 3898 bp, Zea Mays
ggattattagcacgggagctcccgcgcaccggcaagagacgggaggtaggaggagagtagatcgataaagcgcggcctctttctttcccatctttcctcaccagaaaagccgagcggagcgagaccagaccagtgtgagagagagagcggggtcacagcagcgcccagcggccgcagcacaaaagcgttcgtcgggggctttggattcccaggaattccgttccaaagcagccgaatcgcgggaccccgcctgctcgctcctcttcttccctccaaccgcccccccctcccctcctcctcccgccgccgcagcgagagccgagagcggagcgagcaaatcttggcgtttcgcgcccgctctcgcagtctccgggcgggggccgcctggcggagtggttacttccccgctggcttcttgctgcgccccgccattaaagccggcgcatttgggtttctctctccacctctctctatccgccccccaccgcgctctcgccctccctctccctctctagcggtagattggtgctgttcccccctaatcggtcggcggttgggggccgggttccgacgtctgcccgggagctcgaccgggcctccgatccgggctcccaagccgccgcctcccggggcgcccctccggaattcttgctttctcgggctccgaatctcgccgcctgtcgtcgccagcggctggcgcgggggcttggttcccggcgtttcattgcgaattcgggggcgatctggggcccctggtctggatggcgaggatttgagtggattcgagacgaacaagtggaggtggagccctgatctgggtggcgcccccgccgtggtatgtgccatgaggaagctcttcttctccgagtcggcctgcaaagagaccaagcttcactccgcgccccactcatggctgcccctcgagagggggaagctctccaagttctccggccatgccgccgccggctcctccatagagtccttgatgaagatgccagagccggctgtgcttccgcacttcaagcccgcggactatgtcgacgtactggctcagatacacgaggagctggagtcctgcccccctgacgacaagtcctccctgtacctcctccagtatcaggtcttccgtggcctcggcgaggccaagctgtctcggaggagcctccagtctgcgtgggagaaggggagcaccatacacgagaagctcatcttcggggcatggctcaagtacgagaagaaaggggaggaggccatctccgacctgctcagctcgtgcagcaagtgcttgcaggagttcaggctgctggatttcgtgttgcaggtctccactgggtcacatgtgataaactacgatggtgatgatgatgagtttcggggttctgcggtggttcatttccggataagagatgatatggttgcgtgcgatcgtcggaagctcgcggcgctgtcaactccactgtatgcaatgcttaacggtggatttagggaatcatatctagaggtcattgacatgtctagaaatggtatctcccctattggcatgagggcaatcagtaaattcagcctatcaggaagactaccgtatttgtcagctgatgctatcttggagattcttgattttgccaataagttttgctgcaagggcctcaaggatgcctgtgagcgaaagcttgcttctttcgtctcttcaaggcaagatgctatagacttcatggagtgcgctcttgagctgggctgttccatccttgctgcttcatgcttgcaagtgctcttgaatgagcttccagagtgcttgaatgatgaacaagtggttaggatattctcttctgcaaataaggcacagagattgacaatggttggcaatgcatctttctccctatattgtcttcttagtgaagtctccatgagtaccaacccaacatcggatgtcactgtaagtttcttggaaaagctggtagagtcggcatcagattctaggcaaaatcagctggccttacatcagctggcatgcaccaaatttctaaggaaagattaccctgaatctgagcgcctgttcaatgctgcattttctgccggccatctctattcgatagtgggtttagctagattggcctctctgaggggtaataagcattttgctctcaagttgctagactctgtcatgtcatctcggtggcctcttgggtggatgtatcaagagagagctctatatttggatggtgataacaagttagaaaatcttaacaaggctactgagttggaccctactcttacatatccctatatgttccgagctgcatctttgatgaaaaggcaaagtgttgaagctgcattgatggagatcaaccggatacttggattcaagctggtgctggagtgcttagaactaaggttctgttgctaccttgcccttgaggattatagggctgccttatgtgacgtgcaggcaatactcactcttgccccagattatcgtatgattggtggccgggttgctgccaagcagctgagaatgctagtgctagagaatgtagagcagtggacagctgctgactgttggatgcagctttatgatcgctggtcatctgtggatgatatagggtccctctctgttatatatcaaatgttggagtcagataccgccaaaggagttttgtactttaggcaatctttgcttcttctcagattaaactgtcctgaggcggcaatgaggagtttgcagcttgctcgtgagcatgctgcgagtgatcatgaaaggcttgtctatgaaggatggatattgtatgatactggccactgcgaggaaggattgcagaaggcagaagcatccattgcaatacaaagcaacagttgtatcacttctagaagatgcattgcggtgtccctcagatagacttcggaagggtcaggctctaaacaacctcggaagtgtttatgtggattgtgggaagctagacctggcagctgaatgctacattaatgcactaaagatcggtcacaccagagcgcatcaaggccttgcaagggttcatttcctacggaacaacagagctggtgcatacgacgaaatgaccaagctgatagagaaggccaggaacaacgcttcggcatatgagaagagatccgagtactgtgaccgggagctgacgaaaacggacctgcagatggtcaccaaactcgaccctctgcgagtttatccttacagataccgtgctgctgtgctgatggacaaccacaaggagaaagaggcgatcgcggagctgaccaaggccatcgccttcaaggcggacctgaacctgctccacctgcgcgcggccttccacgagcacgtgggcgacgtctcgagcgccctccaggactgccgcgcggccctctcggtggaccccaaccaccaggagatgctggagcttcaccaccgggtgaacagccaggaaccctgagcgcgctcccacggtgtacatacaggacaggaagcccctcatcatagccaaccggccataccggtgtatgttttgtaccatacacagcagatcagatcaatgtaaggacacagtagaaagccacattagatccctccccttgaaaaccaaacaccccattccttgtgtccctaattattagatatatatatgtgttgtttgctatagcctccccttagtaagttgttgctgccgattgtgattaagcctcctaattgtacccgccatgtgccccagcggcccgtgcttccagaatcaagaagttttgactgtaccatgtgtatgtaagtgaaatgggggaacaaaggatggtggaagcttttgtccgcgccaaactgtcaagcatgcaggcacctgttcttgccgagcacttgattgattgcatatacagatgtgtgtttctggctggtgggtttttt

SEQ ID NO: 23318 - DNA, 4612 bp, Zea Mays
ccagaaaagccgagcggagcgagaccagaccagtgtgagagagagagcggggtcacagcagcgcccagcggccgcagcacaaaagcgttcgtcgggggctttggattcccaggaattccgttccaaagcagccgaatcgcgggaccccgcctgctcgctcctcttcttccctccaaccgcccccccctcccctcctcctcccgccgccgcagcgagagccgagagcggagcgagcaaatcttggcgtttcgcgcccgctctcgcagtctccgggcgggggccgcctggcggagtggttacttccccgctggcttcttgctgcgccccgccattaaagccggcgcatttgggtttctctctccacctctctctatccgccccccaccgcgctctcgccctccctctccctctctagcggtagattggtgctgttcccccctaatcggtcggcggttgggggccgggttccgacgtctgcccgggagctcgaccgggcctccgatccgggctcccaagccgccgcctcccggggcgcccctccggaattcttgctttctcgggctccgaatctcgccgcctgtcgtcgccagcggctggcgcgggggcttggttcccggcgtttcattgcgaattcgggggcgatctggggcccctggtctggatggcgaggatttgagtggattcgagacgaacaagtggaggtggagccctgatctgggtggcgcccccgccgtggtatgtgccatgaggaagctcttcttctccgagtcggcctgcaaagagaccaagcttcactccgcgccccactcatggctgcccctcgagagggggaagctctccaagttctccggccatgccgccgccggctcctccatagagtccttgatgaagatgccagagccggctgtgcttccgcacttcaagcccgcggactatgtcgacgtactggctcagatacacgaggagctggagtcctgcccccctgacgacaagtcctccctgtacctcctccagtatcaggtcttccgtggcctcggcgaggccaagctgtctcggaggagcctccagtctgcgtgggagaaggggagcaccatacacgagaagctcatcttcggggcatggctcaagtacgagaagaaaggggaggaggccatctccgacctgctcagctcgtgcagcaagtgcttgcaggagttcaggctgctggatttcgtgttgcaggtctccactgggtcacatgtgataaactacgatggtgatgatgatgagtttcggggttctgcggtggttcatttccggataagagatgatatggttgcgtgcgatcgtcggaagctcgcggcgctgtcaactccactgtatgcaatgcttaacggtggatttagggaatcatatctagaggtcattgacatgtctagaaatggtatctcccctattggcatgagggcaatcagtaaattcagcctatcaggaagactaccgtatttgtcagctgatgctatcttggagattcttgattttgccaataagttttgctgcaagggcctcaaggatgcctgtgagcgaaagcttgcttctttcgtctcttcaaggcaagatgctatagacttcatggagtgcgctcttgagctgggctgttccatccttgctgcttcatgcttgcaagtgctcttgaatgagcttccagagtgcttgaatgatgaacaagtggttaggatattctcttctgcaaataaggcacagagattgacaatggttggcaatgcatctttctccctatattgtcttcttagtgaagtctccatgagtaccaacccaacatcggatgtcactgtaagtttcttggaaaagctggtagagtcggcatcagattctaggcaaaatcagctggccttacatcagctggcatgcaccaaatttctaaggaaagattaccctgaatctgagcgcctgttcaatgctgcattttctgccggccatctctattcgatagtgggtttagctagattggcctctctgaggggtaataagcattttgctctcaagttgctagactctgtcatgtcatctcggtggcctcttgggtggatgtatcaagagagagctctatatttggatggtgataacaagttagaaaatcttaacaaggctactgagttggaccctactcttacatatccctatatgttccgagctgcatctttgatgaaaaggcaaagtgttgaagctgcattgatggagatcaaccggatacttggattcaagctggtgctggagtgcttagaactaaggttctgttgctaccttgcccttgaggattatagggctgccttatgtgacgtgcaggcaatactcactcttgccccagattatcgtatgattggtggccgggttgctgccaagcagctgagaatgctagtgctagagaatgtagagcagtggacagctgctgactgttggatgcagctttatgatcgctggtcatctgtggatgatatagggtccctctctgttatatatcaaatgttggagtcagataccgccaaaggagttttgtactttaggcaatctttgcttcttctcagattaaactgtcctgaggcggcaatgaggagtttgcagcttgctcgtgagcatgctgcgagtgatcatgaaaggcttgtctatgaaggatggatattgtatgatactggccactgcgaggaaggattgcagaaggcagaagcatccattgcaatacaaaggtcatttgaggcattttttctgaaagcttatgctttggctgattcgagtcttgatccttctacctcagcaacagttgtatcacttctagaagatgcattgcggtgtccctcagatagacttcggaagggtcaggtaagtttttttttctctctttgcatcatgtcctgaataatttcacttagctaaattgaccatggatggtttggagcagctgttttttcttcttctgccttgacatgcagcaaatgttgcgatttaagtgaccttgtaccaaaaattggaatatagttgtcactaatatttttttcctagactttcatcattctccttggaaaataagaagtggagttttattgctacatttattgagtagtctcttttttgggggtagggtggggtcttagattcttgttattgctttcatcctttgcctatatatttgttcaattgccaggtgttgctacattttgttaggaagttaagatgtcctattagttcattgactattgttgcattgaatatggcaatgacactgccaccgttaaaaatgactgtcctgtttctcctagcatggcaactgatcacctagatctagattcttgggtacactcaaagtttaatattatttcctaccaactagttgacctattaggtaagttagagcatctgataccatcaccgtcactgggtattttactttaatcctatgtataagtggagcactcctttcaatggtcaatcaaacgaaaaattgaaaataaatacatgaacttgagaaactgcgctgtttatgtctctgtatcgttctgtaccattgtaatttgagatgttcgagaggatgcataactgcaacttactgataaatacttgacatgtaggctctaaacaacctcggaagtgtttatgtggattgtgggaagctagacctggcagctgaatgctacattaatgcactaaagatcggtcacaccagagcgcatcaaggccttgcaagggttcatttcctacggaacaacagagctggtgcatacgacgaaatgaccaagctgatagagaaggccaggaacaacgcttcggcatatgagaagagatccgagtactgtgaccgggagctgacgaaaacggacctgcagatggtcaccaaactcgaccctctgcgagtttatccttacagataccgtgctgctgtgctgatggacaaccacaaggagaaagaggcgatcgcggagctgaccaaggccatcgccttcaaggcggacctgaacctgctccacctgcgcgcggccttccacgagcacgtgggcgacgtctcgagcgccctccaggactgccgcgcggccctctcggtggaccccaaccaccaggagatgctggagcttcaccaccgggtgaacagccaggaaccctgagcgcgctcccacggtgtacatacaggacaggaagcccctcatcatagccaaccggccataccggtgtatgttttgtaccatacacagcagatcagatcaatgtaaggacacagtagaaagccacattagatccctccccttgaaaaccaaacaccccattccttgtgtccctaattattagatatatatatgtgttgtttgctatagcctccccttagtaagttgttgctgccgattgtgattaagcctcctaattgtacccgccatgtgccccagcggcccgtgcttccagaatcaagaagttttgactgtaccatgtgtatgtaagtgaaatgggggaacaaaggatggtggaagcttttgtccgcgccaaactgtcaagcatgcaggcacctgttcttgccgagcacttgattgattgcatatacagatgtgtgtttctggctggtgggtttttt

SEQ ID NO: 23319 - DNA, 320 bp, Zea Mays
ccgcgttataagatagcacagggcccttgctccatcctatggccgacgtgttcacatggtgatgaagccgagcgagaagcgtcgagttaggagagagagggcagtgagatctgtcgtgggctagatgagagccatgtcggtgataggcccgtggcgggctcaaggttaatcccgggcgtcctcggcgctgctccaatcgctcaccggagcgcggcagtcgccgtgggagcgctcctcgttgttggtagacctactcgctacacggacacgtgtcatccgaagagcaagttggtacctggaatctcaagtgccaggcaagt

SEQ ID NO: 23320 - DNA, 466 bp, Zea Mays
ccgcgttataagatagcacagggcccttgctccatcctatggccgacgtgttcacatggtgatgaagccgagcgagaagcgtcgagttaggagagagagggcagtgagatctgtcgtgggctagatgagagccatgtcggtgataggcccgtggcgggctcaaggttaatcccgggcgtcctcggcgctgctccaatcgctcaccggagcgcggcagtcgccgtgggagcgctcctcgttgttggtagacctactcgctacacggtcaagagcaggtaccgaaggatgaggcgcatgaaggatgctttgatgtgttcgtgagaggtctaggccgtcgtctcccagtcaactttaggttgctggaccgttgtctccttataatgtaattattcatttttgtatagaactcctgatatatagtaaagatgtgacattcgatcctgtgccatgattcatcatatgtgtg

SEQ ID NO: 23321 - DNA, 2728 bp, Zea Mays
aagcaagacactgttctgggctcgggcccaccatttgtcctcctccgccggcgactcgccgatgcccttgccggactgcggccgccgcggcttccccaccctaccgctcctccttctcgtccttcacgcgctccccaggcggctcccgcggtgcgcggccgagtcggcgacgtgcctcgcggtgtaccgggaggggggcgcccccgcggtgttccagtccgcgcactgcccgcgctggaccctccccccgcacgacggccaggggggtggcgggggaaagagcatccctatggggtgccacgtggcggcggatcgcggccgccgccggtcccaggaggaccgtgccgtctgtgccctcggcatccgcatccccttcagaacatgagaattaaggaggttgatgtgggagtggtggcaatatttgacggtcataatggagctgaggctagtgagatggcttctaagctttttctggattacttcttgctccatgtttattttcttctcgatggcatacactctctgcggttcagaaaatctactgggaaactgacatatagggaagttactatttttaacaatgtatttaatctgtacaagcatggccaatccgaccatgcagagaggtcatgttgggcatcaccagccattctagaccggtcatttcatacggaaattctgaaggaatcactaatgagggcagttcatgatattgatttaacattctccaaggaggcattacagaacaattttgaatctggttcaacagcgaccgtggtcttgatagctgatggacaaattatatctgccaatgttggagattcaaaagcttttctgtgctccgaaggatataatctgcaccatcgaaataggaaacgaaggagaaagagaaactcaattaatcacgaggaatttgctttggcaaattatgatggaccgttgtatcatgcaagggagttgacaaaggaccatcatcctaatagagaagacgagagaaaccgtgtggaggctgctggtggttatgttcttgagtgggctggtgtatatcgtgttaatggcgagctagcactatcaagagctattggtgatgttccttacaaaagatacggtgtaatatcaacacctgaattgacaggctggcagattctgtcagaaaatgacagttttcttattgcgtcatctgatgggatctttgagaaaatgactatgcaagatgtttgtgacctaatgctgcatgcaaaaattcgtgttaaacatgattttggatcctctgccataacacaacgtaatttggcagattacgtagttcatgttgctttacagaaaggcacaacagacaatgtggctgctgtggttgttccattgggatcacctggtagcactggtactacattaaaagattcgtcccagttcgaagaagatctcaagatatctatttctccaatgttgaatgttccatatggattgaagcctgatcatggacatagttcagctgtcattgacatggagtatttcaagcgctcatcaataaagttccagaggttcttggttgaagcaaaacctaagaaacttggttgtttctatttatccgagagtctggatgaagatatggactatatatttagggtgccggaagcataccagcgtgaagaagtccatgacttcaaccacataccagctgagactgccttatattctgatggtaatctggaaaaatacaaggacaaacacttttgcttgtaccttggtcccgaagatggcgaaatgggacagtgcaatggtcctgaagcttttgcaaacttttttggtctacttgactcccttccgcataatggaagcaaaccaaatggttcacactcctttggcaacacgatcgatttcaggtacaagctcaagagaaggtttgatcgtgggtcgtacggtgaagtctggttggcatttcattggaattgttctgaagatacagatgttcataaagagcctccacactttacaaatatatctcaatcagagatgtataattgcacaagttcaggcagaatgtcatctgatgaagatcatggttcaggcacagtaaatggtgatttattcatactgaagcgcataatggtggagaggggaaatgcagcttacttgagtggattgcgggagaaatactttggggaattattttcaaatgcttccaggactcttgaaggtttgtcgaggatagaatcatcgactatctcagtggacatgctatatgatcctgatatccatctagaaaagaacttgtcagctactgaagaaccacttaagcatgtggctaggtttatagaatcttttgaatcagaatcaagggaaatttggctggtgtatcacaatgaaggccactcattatcaaaattgatatatacagctgaagaaacgaagttagtcactggcaacaataatgagagggtcagacatatccaagttttgcacccatcgaagtggtggcattggctaaggacaacaaaagctgggctaaagcagatgcaaaacctcttatggcagctgagaacatgatcatttgctttgaggacatggagactggaaagtgtctaagagaggttccatctgaagcaaagcaaaataagctgaacatgcgtctgattgacttcggcagtgccattgatgattacacgttgaagaatctttatggtccaggacctactcgacatttgagtacactcctccagaggcactc

SEQ ID NO: 23322 - DNA, 2877 bp, Zea Mays
cactgttctgggctcgggcccaccatttgtcctcctccgccggcgactcgccgatgcccttgccggactgcggccgccgcggcttccccaccctaccgctcctccttctcgtccttcacgcgctccccaggcggctcccgcggtgcgcggccgagtcggcgacgtgcctcgcggtgtaccgggaggggggcgcccccgcggtgttccagtccgcgcactgcccgcgctggaccctccccccgcacgacggccaggggggtggcgggggaaagagcatccctatggggtgccacgtggcggcggatcgcggccgccgccggtcccaggaggaccgtgccgtctgtgccctcggcatccgcatccccttcagaacatgagaattaaggaggttgatgtgggagtggtggcaatatttgacggtcataatggagctgaggctagtgagatggcttctaagctttttctggattacttcttgctccatgtttattttcttctcgatggcatacactctctgcggttcagaaaatctactgggaaactgacatatagggaagttactatttttaacaatgtatttaatctgtacaagcatggccaatccgaccatgcagagaggtcatgttgggcatcaccagccattctagaccggtcatttcatacggaaattctgaaggaatcactaatgagggcagttcatgatattgatttaacattctccaaggaggcattacagaacaattttgaatctggttcaacagcgaccgtggtcttgatagctgatggacaaattatatctgccaatgttggagattcaaaagcttttctgtgctccgaaggatataatctgcaccatcgaaataggaaacgaaggagaaagagaaactcaattaatcacgaggaatttgctttggcaaattatgatggaccgttgtatcatgcaagggagttgacaaaggaccatcatcctaatagagaagacgagagaaaccgtgtggaggctgctggtggttatgttcttgagtgggctggtgtatatcgtgttaatggcgagctagcactatcaagagctattggtgatgttccttacaaaagatacggtgtaatatcaacacctgaattgacaggctggcagattctgtcagaaaatgacagttttcttattgcgtcatctgatgggatctttgagaaaatgactatgcaagatgtttgtgacctaatgctgcatgcaaaaattcgtgttaaacatgattttggatcctctgccataacacaacgtaatttggcagattacgtagttcatgttgctttacagaaaggcacaacagacaatgtggctgctgtggttgttccattgggatcacctggtagcactggtactacattaaaagattcgtcccagttcgaagaagatctcaagatatctatttctccaatgttgaatgttccatatggattgaagcctgatcatggacatagttcagctgtcattgacatggagtatttcaagcgctcatcaataaagttccagaggttcttggttgaagcaaaacctaagaaacttggttgtttctatttatccgagagtctggatgaagatatggactatatatttagggtgccggaagcataccagcgtgaagaagtccatgacttcaaccacataccagctgagactgccttatattctgatggtaatctggaaaaatacaaggacaaacacttttgcttgtaccttggtcccgaagatggcgaaatgggacagtgcaatggtcctgaagcttttgcaaacttttttggtctacttgactcccttccgcataatggaagcaaaccaaatggttcacactcctttggcaacacgatcgatttcaggtacaagctcaagagaaggtttgatcgtgggtcgtacggtgaagtctggttggcatttcattggaattgttctgaagatacagatgttcataaagagcctccacactttacaaatatatctcaatcagagatgtataattgcacaagttcaggcagaatgtcatctgatgaagatcatggttcaggcacagtaaatggtgatttattcatactgaagcgcataatggtggagaggggaaatgcagcttacttgagtggattgcgggagaaatactttggggaattattttcaaatgcttccaggactcttgaaggtttgtcgaggatagaatcatcgactatctcagtggacatgctatatgatcctgatatccatctagaaaagaacttgtcagctactgaagaaccacttaagcatgtggctaggtttatagaatcttttgaatcagaatcaagggaaatttggctggtgtatcacaatgaaggccactcattatcaaaattgatatatacagctgaagaaacgaagttagtcactggcaacaataatgagagggtcagacatatccaagttttgcacccatcgaagtggtggcattggctaaggacaacaaaagctgggctaaagcagatgcaaaacctcttatggcagctgagaacatgatcatttgctttgaggacatggagactggaaagtgtctaagagaggttccatctgaagcaaagcaaaataagctgaacatgcgtctgattgacttcggcagtgccattgatgattacacgttgaagaatctttatggtccaggacctactcgatctgaacagacatttgagtacactcctccagaggcactccttaattcaaactggtttcaaggatcaagaagtgcaaggcttaaataagtgaccgtacacgcattttaatggatcagcatctcggagggtggagtgaacaaacaaaggagcttgcatacaagttgaggtcatacatggagttgtgca

SEQ ID NO: 23323 - DNA, 2821 bp, Zea Mays
gcggtgttccagtccgcgcactgcccgcgctggaccctccccccgcacgacggccaggggggtggcgggggaaagagcatccctatggggtgccacgtggcggcggatcgcggccgccgccggtcccaggaggaccgtgccgtctgtgccctcggcatccgcatccccttcgggttgataagatggaaagcaccgaagtccaaactggacgctgattccagatagtaacaccaggaacattctggaggtttactgttcaaagatacacaccataagctgggtgtcaatcgtaacactgtgaatttgctggagagaacatgagaattaaggaggttgatgtgggagtggtggcaatatttgacggtcataatggagctgaggctagtgagatggcttctaagctttttctggattacttcttgctccatgtttattttcttctcgatggcatacactctctgcggttcagaaaatctactgggaaactgacatatagggaagttactatttttaacaatgtatttaatctgtacaagcatggccaatccgaccatgcagagaggtcatgttgggcatcaccagccattctagaccggtcatttcatacggaaattctgaaggaatcactaatgagggcagttcatgatattgatttaacattctccaaggaggcattacagaacaattttgaatctggttcaacagcgaccgtggtcttgatagctgatggacaaattatatctgccaatgttggagattcaaaagcttttctgtgctccgaaggatataatctgcaccatcgaaataggaaacgaaggagaaagagaaactcaattaatcacgaggaatttgctttggcaaattatgatggaccgttgtatcatgcaagggagttgacaaaggaccatcatcctaatagagaagacgagagaaaccgtgtggaggctgctggtggttatgttcttgagtgggctggtgtatatcgtgttaatggcgagctagcactatcaagagctattggtgatgttccttacaaaagatacggtgtaatatcaacacctgaattgacaggctggcagattctgtcagaaaatgacagttttcttattgcgtcatctgatgggatctttgagaaaatgactatgcaagatgtttgtgacctaatgctgcatgcaaaaattcgtgttaaacatgattttggatcctctgccataacacaacgtaatttggcagattacgtagttcatgttgctttacagaaaggcacaacagacaatgtggctgctgtggttgttccattgggatcacctggtagcactggtactacattaaaagattcgtcccagttcgaagaagatctcaagatatctatttctccaatgttgaatgttccatatggattgaagcctggtagtcttgctgatcattgactgtattttgttaattgtatttatcatggacatagttcagctgtcattgacatggagtatttcaagcgctcatcaataaagttccagaggttcttggttgaagcaaaacctaagaaacttggttgtttctatttatccgagagtctggatgaagatatggactatatatttagggtgccggaagcataccagcgtgaagaagtccatgacttcaaccacataccagctgagactgccttatattctgatggtaatctggaaaaatacaaggacaaacacttttgcttgtaccttggtcccgaagatggcgaaatgggacagtgcaatggtcctgaagcttttgcaaacttttttggtctacttgactcccttccgcataatggaagcaaaccaaatggttcacactcctttggcaacacgatcgatttcaggtacaagctcaagagaaggtttgatcgtgggtcgtacggtgaagtctggttggcatttcattggaattgttctgaagatacagatgttcataaagagcctccacactttacaaatatatctcaatcagagatgtataattgcacaagttcaggcagaatgtcatctgatgaagatcatggttcaggcacagtaaatggtgatttattcatactgaagcgcataatggtggagaggggaaatgcagcttacttgagtggattgcgggagaaatactttggggaattattttcaaatgcttccaggactcttgaaggtttgtcgaggatagaatcatcgactatctcagtggacatgctatatgatcctgatatccatctagaaaagaacttgtcagctactgaagaaccacttaagcatgtggctaggtttatagaatcttttgaatcagaatcaagggaaatttggctggtgtatcacaatgaaggccactcattatcaaaattgatatatacagctgaagaaacgaagttagtcactggcaacaataatgagagggtcagacatatccaagttttgcacccatcgaagtggtggcattggctaaggacaacaaaagctgggctaaagcagatgcaaaacctcttatggcagctgagaacatgatcatttgctttgaggacatggagactggaaagtgtctaagagaggttccatctgaagcaaagcaaaataagctgaacatgcgtctgattgacttcggcagtgccattgatgattacacgttgaagaatctttatggtccaggacctactcgatctgaacagacatttgagtacactcctccagaggcactccttaattcaaactggtttcaaggatcaagaagtgcaaggcttaaataagtgaccgtacacgcattttaatggatcagcatctcggagggtggagtgaacaaacaa

SEQ ID NO: 23324 - DNA, 2778 bp, Zea Mays
gcggtgttccagtccgcgcactgcccgcgctggaccctccccccgcacgacggccaggggggtggcgggggaaagagcatccctatggggtgccacgtggcggcggatcgcggccgccgccggtcccaggaggaccgtgccgtctgtgccctcggcatccgcatccccttcgggttgataagatggaaagcaccgaagtccaaactggacgctgattccagatagtaacaccaggaacattctggaggtttactgttcaaagatacacaccataagctgggtgtcaatcgtaacactgtgaatttgctggagagaacatgagaattaaggaggttgatgtgggagtggtggcaatatttgacggtcataatggagctgaggctagtgagatggcttctaagctttttctggattacttcttgctccatgtttattttcttctcgatggcatacactctctgcggttcagaaaatctactgggaaactgacatatagggaagttactatttttaacaatgtatttaatctgtacaagcatggccaatccgaccatgcagagaggtcatgttgggcatcaccagccattctagaccggtcatttcatacggaaattctgaaggaatcactaatgagggcagttcatgatattgatttaacattctccaaggagggtttcatgtttcacctgtataattaaattttgtaacattatattcatacgtcaaaaaatgattcttctttgtgttcaatgcaggaagcattacagaacaattttgaatctggttcaacagcgaccgtggtcttgatagctgatggacaaattatatctgccaatgttggagattcaaaagcttttctgtgctccgaaggatataatctgcaccatcgaaataggaaacgaaggagaaagagaaactcaattaatcacgaggaatttgctttggcaaattatgatggaccgttgtatcatgcaagggagttgacaaaggaccatcatcctaatagagaagacgagagaaaccgtgtggaggctgctggtggttatgttcttgagtgggctggtgtatatcgtgttaatggcgagctagcactatcaagagctattggtgatgttccttacaaaagatacggtgtaatatcaacacctgaattgacaggctggcagattctgtcagaaaatgacagttttcttattgcgtcatctgatgggatctttgagaaaatgactatgcaagatgtttgtgacctaatgctgcatgcaaaaattcgtgttaaacatgattttggatcctctgccataacacaacgtaatttggcagattacgtagttcatgttgctttacagaaaggcacaacagacaatgtggctgctgtggttgttccattgggatcacctggtagcactggtactacattaaaagattcgtcccagttcgaagaagatctcaagatatctatttctccaatgttgaatgttccatatggattgaagcctgatcatggacatagttcagctgtcattgacatggagtatttcaagcgctcatcaataaagttccagaggttcttggttgaagcaaaacctaagaaacttggttgtttctatttatccgagagtctggatgaagatatggactatatatttagggtgccggaagcataccagcgtgaagaagtccatgacttcaaccacataccagctgagactgccttatattctgatggtaatctggaaaaatacaaggacaaacacttttgcttgtaccttggtcccgaagatggcgaaatgggacagtgcaatggtcctgaagcttttgcaaacttttttggtctacttgactcccttccgcataatggaagcaaaccaaatggttcacactcctttggcaacacgatcgatttcaggtacaagctcaagagaaggtttgatcgtgggtcgtacggtgaagtctggttggcatttcattggaattgttctgaagatacagatgttcataaagagcctccacactttacaaatatatctcaatcagagatgtataattgcacaagttcaggcagaatgtcatctgatgaagatcatggttcaggcacagtaaatggtgatttattcatactgaagcgcataatggtggagaggggaaatgcagcttacttgagtggattgcgggagaaatactttggggaattattttcaaatgcttccaggactcttgaaggtttgtcgaggatagaatcatcgactatctcagtggacatgctatatgatcctgatatccatctagaaaagaacttgtcagctactgaagaaccacttaagcatgtggctaggtttatagaatcttttgaatcagaatcaagggaaatttggctggtgtatcacaatgaaggccactcattatcaaaattgatatatacagctgaagaaacgaagttagtcactggcaacaataatgagagggtcagacatatccaagttttgcacccatcgaagtggtggcattggctaaggacaacaaaagctgggctaaagcagatgcaaaacctcttatggcagctggcgtctgattgacttcggcagtgccattgatgattacacgttgaagaatctttatggtccaggacctactcgatctgaacagacatttgagtacactcctccagaggcactccttaattcaaactggtttcaaggatcaagaagtgcaaggcttaaataagtgaccgtacacgcattttaatggatcagcatctcggagggtggagtgaacaaacaa

SEQ ID NO: 23325 - DNA, 2997 bp, Zea Mays
gcggtgttccagtccgcgcactgcccgcgctggaccctccccccgcacgacggccaggggggtggcgggggaaagagcatccctatggggtgccacgtggcggcggatcgcggccgccgccggtcccaggaggaccgtgccgtctgtgccctcggcatccgcatccccttcgggttgataagatggaaagcaccgaagtccaaactggacgctgattccagatagtaacaccaggaacattctggaggtttactgttcaaagatacacaccataagctgggtgtcaatcgtaacactgtgaatttgctggagagaacatgagaattaaggaggttgatgtgggagtggtggcaatatttgacggtcataatggagctgaggctagtgagatggcttctaagctttttctggattacttcttgctccatgtttattttcttctcgatggcatacactctctgcggttcagaaaatctactgggaaactgacatatagggaagttactatttttaacaatgtatttaatctgtacaagcatggccaatccgaccatgcagagaggtcatgttgggcatcaccagccattctagaccggtcatttcatacggaaattctgaaggaatcactaatgagggcagttcatgatattgatttaacattctccaaggaggcattacagaacaattttgaatctggttcaacagcgaccgtggtcttgatagctgatggacaaattatatctgccaatgttggagattcaaaagcttttctgtgctccgaaggatataatctgcaccatcgaaataggaaacgaaggagaaagagaaactcaattaatcacgaggaatttgctttggcaaattatgatggaccgttgtatcatgcaagggagttgacaaaggaccatcatcctaatagagaagacgagagaaaccgtgtggaggctgctggtggttatgttcttgagtgggctggtgtatatcgtgttaatggcgagctagcactatcaagagctattggtgatgttccttacaaaagatacggtgtaatatcaacacctgaattgacaggctggcagattctgtcagaaaatgacagttttcttattgcgtcatctgatgggatctttgagaaaatgactatgcaagatgtttgtgacctaatgctgcatgcaaaaattcgtgttaaacatgattttggatcctctgccataacacaacgtaatttggcagattacgtagttcatgttgctttacagaaaggcacaacagacaatgtggctgctgtggttgttccattgggatcacctggtagcactggtactacattaaaagattcgtcccagttcgaagaagatctcaagatatctatttctccaatgttgaatgttccatatggattgaagcctgatcatggacatagttcagctgtcattgacatggagtatttcaagcgctcatcaataaagttccagaggttcttggttgaagcaaaacctaagaaacttggttgtttctatttatccgagagtctggatgaagatatggactatatatttagggtgccggaagcataccagcgtgaagaagtccatgacttcaaccacataccagctgagactgccttatattctgatggtaatctggaaaaatacaaggacaaacacttttgcttgtaccttggtcccgaagatggcgaaatgggacagtgcaatggtcctgaagcttttgcaaacttttttggtctacttgactcccttccgcataatggaagcaaaccaaatggttcacactcctttggcaacacgatcgatttcaggtacaagctcaagagaaggtttgatcgtgggtcgtacggtgaagtctggttggcatttcattggaattgttctgaagatacagatgttcataaagagcctccacactttacaaatatatctcaatcagagatgtataattgcacaagttcaggcagaatgtcatctgatgaagatcatggttcaggcacagtaaatggtgatttattcatactgaagcgcataatggtggagaggggaaatgcagcttacttgagtggattgcgggagaaatactttggggaattattttcaaatgcttccaggactcttgaaggtttgtcgaggatagaatcatcgactatctcagtggacatgctatatgatcctgatatccatctagaaaagaacttgtcagctactgaagaaccacttaagcatgtggctaggtttatagaatcttttgaatcagaatcaagggaaatttggctggtgtatcacaatgaaggccactcattatcaaaattgatatatacagctgaagaaacgaagttagtcactggcaacaataatgagagggtcagacatatccaagttttgcacccatcgaagtggtggcattggctaaggacaacaaaagctgggctaaagcagatgcaaaacctcttatggcagctgtagcttttgggcatttccctacatcaggataacctccacaaagttgatgggactgaaggcttgtcatgatcgtaatatcacccaccgggatatcaaacctggtagaaatgatgtcgctgcctattttttccttgttttctatacttcttgaatccttttctgttaacaatttctattaactagtcatgttaacattgcttatttttacgccatggaagagaacatgatcatttgctttgaggacatggagactggaaagtgtctaagagaggttccatctgaagcaaagcaaaataagctgaacatgcgtctgattgacttcggcagtgccattgatgattacacgttgaagaatctttatggtccaggacctactcgatctgaacagacatttgagtacactcctccagaggcactccttaattcaaactggtttcaaggatcaagaagtgcaaggcttaaataagtgaccgtacacgcattttaatggatcagcatctcggagggtggagtgaacaaacaa

SEQ ID NO: 23326 - DNA, 2273 bp, Zea Mays
cccgcacgacggccaggggggtggcgggggaaagagcatccctatggggtgccacgtggcggcggatcgcggccgccgccggtcccaggaggaccgtgccgtctgtgccctcggcatccgcatccccttcgtagagaacatgagaattaaggaggttgatgtgggagtggtggcaatatttgacggtcataatggagctgaggctagtgagatggcttctaagctttttctggattacttcttgctccatgtttattttcttctcgatggcatacactctctgcggttcagaaaatctactgggaaactgacatatagggaagttactatttttaacaatgtatttaatctgtacaagcatggccaatccgaccatgcagagaggtcatgttgggcatcaccagccattctagaccggtcatttcatacggaaattctgaaggaatcactaatgagggcagttcatgatattgatttaacattctccaaggaggggaaacgaaggagaaagagaaactcaattaatcacgaggaatttgctttggcaaattatgatggaccgttgtatcatgcaagggagttgacaaaggaccatcatcctaatagagaagacgagagaaaccgtgtggaggctgctggtggttatgttcttgagtgggctggtgtatatcgtgttaatggcgagctagcactatcaagagctattggtgatgttccttacaaaagatacggtgtaatatcaacacctgaattgacaggctggcagattctgtcagaaaatgacagttttcttattgcgtcatctgatgggatctttgagaaaatgactatgcaagatgtttgtgacctaatgctgcatgcaaaaattcgtgttaaacatgattttggatcctctgccataacacaacgtaatttggcagattacgtagttcatgttgctttacagaaaggcacaacagacaatgtggctgctgtggttgttccattgggatcacctggtagcactggtactacattaaaagattcgtcccagttcgaagaagatctcaagatatctatttctccaatgttgaatgttccatatggattgaagcctgatcatggacatagttcagctgtcattgacatggagtatttcaagcgctcatcaataaagttccagaggttcttggttgaagcaaaacctaagaaacttggttgtttctatttatccgagagtctggatgaagatatggactatatatttagggtgccggaagcataccagcgtgaagaagtccatgacttcaaccacataccagctgagactgccttatattctgatggtaatctggaaaaatacaaggacaaacacttttgcttgtaccttggtcccgaagatggcgaaatgggacagtgcaatggtcctgaagcttttgcaaacttttttggtctacttgactcccttccgcataatggaagcaaaccaaatggttcacactcctttggcaacacgatcgatttcaggtacaagctcaagagaaggtttgatcgtgggtcgtacggtgaagtctggttggcatttcattggaattgttctgaagatacagatgttcataaagagcctccacactttacaaatatatctcaatcagagatgtataattgcacaagttcaggcagaatgtcatctgatgaagatcatggttcaggcacagtaaatggtgatttattcatactgaagcgcataatggtggagaggggaaatgcagcttacttgagtggattgcgggagaaatactttggggaattattttcaaatgcttccaggactcttgaaggtttgtcgaggatagaatcatcgactatctcagtggacatgctatatgatcctgatatccatctagaaaagaacttgtcagctactgaagaaccacttaagcatgtggctaggtttatagaatcttttgaatcagaatcaagggaaatttggctggtgtatcacaatgaaggccactcattatcaaaattgatatatacagctgaagaaacgaagttagtcactggcaacaataatgagagggtcagacatatccaagttttgcacccatcgaagtggtggcattggctaaggacaacaaaagctgggctaaagcagatgcaaaacctcttatggcagctggcgtctgattgacttcggcagtgccattgatgattacacgttgaagaatctttatggtccaggacctactcgatctgaacagacatttgagtacactcctccagaggcactc

SEQ ID NO: 23327 - DNA, 2523 bp, Zea Mays
ggggaaagagcatccctatggggtgccacgtggcggcggatcgcggccgccgccggtcccaggaggaccgtgccgtctgtgccctcggcatccgcatccccttcagaacatgagaattaaggaggttgatgtgggagtggtggcaatatttgacggtcataatggagctgaggctagtgagatggcttctaagctttttctggattacttcttgctccatgtttattttcttctcgatggcatacactctctgcggttcagaaaatctactgggaaactgacatatagggaagttactatttttaacaatgtatttaatctgtacaagcatggccaatccgaccatgcagagaggtcatgttgggcatcaccagccattctagaccggtcatttcatacggaaattctgaaggaatcactaatgagggcagttcatgatattgatttaacattctccaaggaggcattacagaacaattttgaatctggttcaacagcgaccgtggtcttgatagctgatggacaaattatatctgccaatgttggagattcaaaagcttttctgtgctccgaaggatataatctgcaccatcgaaataggaaacgaaggagaaagagaaactcaattaatcacgaggaatttgctttggcaaattatgatggaccgttgtatcatgcaagggagttgacaaaggaccatcatcctaatagagaagacgagagaaaccgtgtggaggctgctggtggttatgttcttgagtgggctggtgtatatcgtgttaatggcgagctagcactatcaagagctattggtgatgttccttacaaaagatacggtgtaatatcaacacctgaattgacaggctggcagattctgtcagaaaatgacagttttcttattgcgtcatctgatgggatctttgagaaaatgactatgcaagatgtttgtgacctaatgctgcatgcaaaaattcgtgttaaacatgattttggatcctctgccataacacaacgtaatttggcagattacgtagttcatgttgctttacagaaaggcacaacagacaatgtggctgctgtggttgttccattgggatcacctggtagcactggtactacattaaaagattcgtcccagttcgaagaagatctcaagatatctatttctccaatgttgaatgttccatatggattgaagcctgatcatggacatagttcagctgtcattgacatggagtatttcaagcgctcatcaataaagttccagaggttcttggttgaagcaaaacctaagaaacttggttgtttctatttatccgagagtctggatgaagatatggactatatatttagggtgccggaagcataccagcgtgaagaagtccatgacttcaaccacataccagctgagactgccttatattctgatggtaatctggaaaaatacaaggacaaacacttttgcttgtaccttggtcccgaagatggcgaaatgggacagtgcaatggtcctgaagcttttgcaaacttttttggtctacttgactcccttccgcataatggaagcaaaccaaatggttcacactcctttggcaacacgatcgatttcaggtacaagctcaagagaaggtttgatcgtgggtcgtacggtgaagtctggttggcatttcattggaattgttctgaagatacagatgttcataaagagcctccacactttacaaatatatctcaatcagagatgtataattgcacaagttcaggcagaatgtcatctgatgaagatcatggttcaggcacagtaaatggtgatttattcatactgaagcgcataatggtggagaggggaaatgcagcttacttgagtggattgcgggagaaatactttggggaattattttcaaatgcttccaggactcttgaaggtttgtcgaggatagaatcatcgactatctcagtggacatgctatatgatcctgatatccatctagaaaagaacttgtcagctactgaagaaccacttaagcatgtggctaggtttatagaatcttttgaatcagaatcaagggaaatttggctggtgtatcacaatgaaggccactcattatcaaaattgatatatacagctgaagaaacgaagttagtcactggcaacaataatgagagggtcagacatatccaagttttgcacccatcgaagtggtggcattggctaaggacaacaaaagctgggctaaagcagatgcaaaacctcttatggcagctgagaacatgatcatttgctttgaggacatggagactggaaagtgtctaagagaggttccatctgaagcaaagcaaaataagctgaacatgcgtctgattgacttcggcagtgccattgatgattacacgttgaagaatctttatggtccaggacctactcgatctgaacagacatttgagtacactcctccagaggcactccttaattcaaactggtttcaaggatcaagaagtgcaaggcttaagtatgacatctgg

SEQ ID NO: 23328 - DNA, 2581 bp, Zea Mays
ggggaaagagcatccctatggggtgccacgtggcggcggatcgcggccgccgccggtcccaggaggaccgtgccgtctgtgccctcggcatccgcatccccttcagaacatgagaattaaggaggttgatgtgggagtggtggcaatatttgacggtcataatggagctgaggctagtgagatggcttctaagctttttctggattacttcttgctccatgtttattttcttctcgatggcatacactctctgcggttcagaaaatctactgggaaactgacatatagggaagttactatttttaacaatgtatttaatctgtacaagcatggccaatccgaccatgcagagaggtcatgttgggcatcaccagccattctagaccggtcatttcatacggaaattctgaaggaatcactaatgagggcagttcatgatattgatttaacattctccaaggaggcattacagaacaattttgaatctggttcaacagcgaccgtggtcttgatagctgatggacaaattatatctgccaatgttggagattcaaaagcttttctgtgctccgaaggatataatctgcaccatcgaaataggaaacgaaggagaaagagaaactcaattaatcacgaggaatttgctttggcaaattatgatggaccgttgtatcatgcaagggagttgacaaaggaccatcatcctaatagagaagacgagagaaaccgtgtggaggctgctggtggttatgttcttgagtgggctggtgtatatcgtgttaatggcgagctagcactatcaagagctattggtgatgttccttacaaaagatacggtgtaatatcaacacctgaattgacaggctggcagattctgtcagaaaatgacagttttcttattgcgtcatctgatgggatctttgagaaaatgactatgcaagatgtttgtgacctaatgctgcatgcaaaaattcgtgttaaacatgattttggatcctctgccataacacaacgtaatttggcagattacgtagttcatgttgctttacagaaaggcacaacagacaatgtggctgctgtggttgttccattgggatcacctggtagcactggtactacattaaaagattcgtcccagttcgaagaagatctcaagatatctatttctccaatgttgaatgttccatatggattgaagcctgatcatggacatagttcagctgtcattgacatggagtatttcaagcgctcatcaataaagttccagaggttcttggttgaagcaaaacctaagaaacttggttgtttctatttatccgagagtctggatgaagatatggactatatatttagggtgccggaagcataccagcgtgaagaagtccatgacttcaaccacataccagctgagactgccttatattctgatggtaatctggaaaaatacaaggacaaacacttttgcttgtaccttggtcccgaagatggcgaaatgggacagtgcaatggtcctgaagcttttgcaaacttttttggtctacttgactcccttccgcataatggaagcaaaccaaatggttcacactcctttggcaacacgatcgatttcaggtacaagctcaagagaaggtttgatcgtgggtcgtacggtgaagtctggttggcatttcattggaattgttctgaagatacagatgttcataaagagcctccacactttacaaatatatctcaatcagagatgtataattgcacaagttcaggcagaatgtcatctgatgaagatcatggttcaggcacagtaaatggtgatttattcatactgaagcgcataatggtggagaggggaaatgcagcttacttgagtggattgcgggagaaatactttggggaattattttcaaatgcttccaggactcttgaaggtttgtcgaggatagaatcatcgactatctcagtggacatgctatatgatcctgatatccatctagaaaagaacttgtcagctactgaagaaccacttaagcatgtggctaggtttatagaatcttttgaatcagaatcaagggaaatttggctggtgtatcacaatgaaggccactcattatcaaaattgatatatacagctgaagaaacgaagttagtcactggcaacaataatgagagggtcagacatatccaagttttgcacccatcgaagtggtggcattggctaaggacaacaaaagctgggctaaagcagatgcaaaacctcttatggcagctgttgatgggactgaaggcttgtcatgatcgtaatatcacccaccgggatatcaaacctgagaacatgatcatttgctttgaggacatggagactggaaagtgtctaagagaggttccatctgaagcaaagcaaaataagctgaacatgcgtctgattgacttcggcagtgccattgatgattacacgttgaagaatctttatggtccaggacctactcgatctgaacagacatttgagtacactcctccagaggcactccttaattcaaactggtttcaaggatcaagaagtgcaaggcttaagtatgacatctgg

SEQ ID NO: 23329 - DNA, 2331 bp, Zea Mays
gaaagagcatccctatggggtgccacgtggcggcggatcgcggccgccgccggtcccaggaggaccgtgccgtctgtgccctcggcatccgcatccccttcagaacatgagaattaaggaggttgatgtgggagtggtggcaatatttgacggtcataatggagctgaggctagtgagatggcttctaagctttttctggattacttcttgctccatgtttattttcttctcgatggcatacactctctgcggttcagaaaatctactgggaaactgacatatagggaagttactatttttaacaatgtatttaatctgtacaagcatggccaatccgaccatgcagagaggtcatgttgggcatcaccagccattctagaccggtcatttcatacggaaattctgaaggaatcactaatgagggcagttcatgatattgatttaacattctccaaggaggcattacagaacaattttgaatctggttcaacagcgaccgtggtcttgatagctgatggacaaattatatctgccaatgttggagattcaaaagcttttctgtgctccgaaggatataatctgcaccatcgaaataggaaacgaaggagaaagagaaactcaattaatcacgaggaatttgctttggcaaattatgatggaccgttgtatcatgcaagggagttgacaaaggaccatcatcctaatagagaagacgagagaaaccgtgtggaggctgctggtggttatgttcttgagtgggctggtgtatatcgtgttaatggcgagctagcactatcaagagctattggtgatgttccttacaaaagatacggtgtaatatcaacacctgaattgacaggctggcagattctgtcagaaaatgacagttttcttattgcgtcatctgatgggatctttgagaaaatgactatgcaagatgtttgtgacctaatgctgcatgcaaaaattcgtgttaaacatgattttggatcctctgccataacacaacgtaatttggcagattacgtagttcatgttgctttacagaaaggcacaacagacaatgtggctgctgtggttgttccattgggatcacctggtagcactggtactacattaaaagattcgtcccagttcgaagaagatctcaagatatctatttctccaatgttgaatgttccatatggattgaagcctgatcatggacatagttcagctgtcattgacatggagtatttcaagcgctcatcaataaagttccagaggttcttggttgaagcaaaacctaagaaacttggttgtttctatttatccgagagtctggatgaagatatggactatatatttagggtgccggaagcataccagcgtgaagaagtccatgacttcaaccacataccagctgagactgccttatattctgatggtaatctggaaaaatacaaggacaaacacttttgcttgtaccttggtcccgaagatggcgaaatgggacagtgcaatggtcctgaagcttttgcaaacttttttggtctacttgactcccttccgcataatggaagcaaaccaaatggttcacactcctttggcaacacgatcgatttcaggtacaagctcaagagaaggtttgatcgtgggtcgtacggtgaagtctggttggcatttcattggaattgttctgaagatacagatgttcataaagagcctccacactttacaaatatatctcaatcagagatgtataattgcacaagttcaggcagaatgtcatctgatgaagatcatggttcaggcacagtaaatggtgatttattcatactgaagcgcataatggtggagaggggaaatgcagcttacttgagtggattgcgggagaaatactttggggaattattttcaaatgcttccaggactcttgaaggtttgtcgaggatagaatcatcgactatctcagtggacatgctatatgatcctgatatccatctagaaaagaacttgtcagctactgaagaaccacttaagcatgtggctaggtttatagaatcttttgaatcagaatcaagggaaatttggctggtgtatcacaatgaaggccactcattatcaaaattgatatatacagctgaagaaacgaagttagtcactggcaacaataatgagagggtcagacatatccaagttttgcacccatcgaagtggtggcattggctaaggacaacaaaagctgggctaaagcagatgcaaaacctcttatggcagctgtagcttttgggcatttccctacatcaggataacctccacaaagttgatgggactgaaggcttgtcatg

SEQ ID NO: 23330 - DNA, 2386 bp, Zea Mays
agagcatccctatggggtgccacgtggcggcggatcgcggccgccgccggtcccaggaggaccgtgccgtctgtgccctcggcatccgcatccccttcgtagagaacatgagaattaaggaggttgatgtgggagtggtggcaatatttgacggtcataatggagctgaggctagtgagatggcttctaagctttttctggattacttcttgctccatgtttattttcttctcgatggcatacactctctgcggttcagaaaatctactgggaaactgacatatagggaagttactatttttaacaatgtatttaatctgtacaagcatggccaatccgaccatgcagagaggtcatgttgggcatcaccagccattctagaccggtcatttcatacggaaattctgaaggaatcactaatgagggcagttcatgatattgatttaacattctccaaggaggggaaacgaaggagaaagagaaactcaattaatcacgaggaatttgctttggcaaattatgatggaccgttgtatcatgcaagggagttgacaaaggaccatcatcctaatagagaagacgagagaaaccgtgtggaggctgctggtggttatgttcttgagtgggctggtgtatatcgtgttaatggcgagctagcactatcaagagctattggtgatgttccttacaaaagatacggtgtaatatcaacacctgaattgacaggctggcagattctgtcagaaaatgacagttttcttattgcgtcatctgatgggatctttgagaaaatgactatgcaagatgtttgtgacctaatgctgcatgcaaaaattcgtgttaaacatgattttggatcctctgccataacacaacgtaatttggcagattacgtagttcatgttgctttacagaaaggcacaacagacaatgtggctgctgtggttgttccattgggatcacctggtagcactggtactacattaaaagattcgtcccagttcgaagaagatctcaagatatctatttctccaatgttgaatgttccatatggattgaagcctgatcatggacatagttcagctgtcattgacatggagtatttcaagcgctcatcaataaagttccagaggttcttggttgaagcaaaacctaagaaacttggttgtttctatttatccgagagtctggatgaagatatggactatatatttagggtgccggaagcataccagcgtgaagaagtccatgacttcaaccacataccagctgagactgccttatattctgatggtaatctggaaaaatacaaggacaaacacttttgcttgtaccttggtcccgaagatggcgaaatgggacagtgcaatggtcctgaagcttttgcaaacttttttggtctacttgactcccttccgcataatggaagcaaaccaaatggttcacactcctttggcaacacgatcgatttcaggtacaagctcaagagaaggtttgatcgtgggtcgtacggtgaagtctggttggcatttcattggaattgttctgaagatacagatgttcataaagagcctccacactttacaaatatatctcaatcagagatgtataattgcacaagttcaggcagaatgtcatctgatgaagatcatggttcaggcacagtaaatggtgatttattcatactgaagcgcataatggtggagaggggaaatgcagcttacttgagtggattgcgggagaaatactttggggaattattttcaaatgcttccaggactcttgaaggtttgtcgaggatagaatcatcgactatctcagtggacatgctatatgatcctgatatccatctagaaaagaacttgtcagctactgaagaaccacttaagcatgtggctaggtttatagaatcttttgaatcagaatcaagggaaatttggctggtgtatcacaatgaaggccactcattatcaaaattgatatatacagctgaagaaacgaagttagtcactggcaacaataatgagagggtcagacatatccaagttttgcacccatcgaagtggtggcattggctaaggacaacaaaagctgggctaaagcagatgcaaaacctcttatggcagctgagaacatgatcatttgctttgaggacatggagactggaaagtgtctaagagaggttccatctgaagcaaagcaaaataagctgaacatgcgtctgattgacttcggcagtgccattgatgattacacgttgaagaatctttatggtccaggacctactcgatctgaacagacatttgagtacactcctccagaggcactccttaattcaaactggtttcaaggatcaagaagtgcaaggcttaagtatgacatctgg

SEQ ID NO: 23331 - DNA, 2372 bp, Zea Mays
agagcatccctatggggtgccacgtggcggcggatcgcggccgccgccggtcccaggaggaccgtgccgtctgtgccctcggcatccgcatccccttcgtagagaacatgagaattaaggaggttgatgtgggagtggtggcaatatttgacggtcataatggagctgaggctagtgagatggcttctaagctttttctggattacttcttgctccatgtttattttcttctcgatggcatacactctctgcggttcagaaaatctactgggaaactgacatatagggaagttactatttttaacaatgtatttaatctgtacaagcatggccaatccgaccatgcagagaggtcatgttgggcatcaccagccattctagaccggtcatttcatacggaaattctgaaggaatcactaatgagggcagttcatgatattgatttaacattctccaaggaggcattacagaacaattttgaatctggttcaacagcgaccgtggtcttgatagctgatggacaaattatatctgccaatgttggagattcaaaagcttttctgtgctccgaaggatataatctgcaccatcgaaataggaaacgaaggagaaagagaaactcaattaatcacgaggaatttgctttggcaaattatgatggaccgttgtatcatgcaagggagttgacaaaggaccatcatcctaatagagaagacgagagaaaccgtgtggaggctgctggtggttatgttcttgagtgggctggtgtatatcgtgttaatggcgagctagcactatcaagagctattggtgatgttccttacaaaagatacggtgtaatatcaacacctgaattgacaggctggcagattctgtcagaaaatgacagttttcttattgcgtcatctgatgggatctttgagaaaatgactatgcaagatgtttgtgacctaatgctgcatgcaaaaattcgtgttaaacatgattttggatcctctgccataacacaacgtaatttggcagattacgtagttcatgttgctttacagaaaggcacaacagacaatgtggctgctgtggttgttccattgggatcacctggtagcactggtactacattaaaagattcgtcccagttcgaagaagatctcaagatatctatttctccaatgttgaatgttccatatggattgaagcctgatcatggacatagttcagctgtcattgacatggagtatttcaagcgctcatcaataaagttccagaggttcttggttgaagcaaaacctaagaaacttggttgtttctatttatccgagagtctggatgaagatatggactatatatttagggtgccggaagcataccagcgtgaagaagtccatgacttcaaccacataccagctgagactgccttatattctgatggtaatctggaaaaatacaaggacaaacacttttgcttgtaccttggtcccgaagatggcgaaatgggacagtgcaatggtcctgaagcttttgcaaacttttttggtctacttgactcccttccgcataatggaagcaaaccaaatggttcacactcctttggcaacacgatcgatttcaggtacaagctcaagagaaggtttgatcgtgggtcgtacggtgaagtctggttggcatttcattggaattgttctgaagatacagatgttcataaagagcctccacactttacaaatatatctcaatcagagatgtataattgcacaagttcaggcagaatgtcatctgatgaagatcatggttcaggcacagtaaatggtgatttattcatactgaagcgcataatggtggagaggggaaatgcagcttacttgagtggattgcgggagaaatactttggggaattattttcaaatgcttccaggactcttgaaggtttgtcgaggatagaatcatcgactatctcagtggacatgctatatgatcctgatatccatctagaaaagaacttgtcagctactgaagaaccacttaagcatgtggctaggtttatagaatcttttgaatcagaatcaagggaaatttggctggtgtatcacaatgaaggccactcattatcaaaattgatatatacagctgaagaaacgaagttagtcactggcaacaataatgagagggtcagacatatccaagttttgcacccatcgaagtggtggcattggctaaggacaacaaaagctgggctaaagcagatgcaaaacctcttatggcagctgttgatgggactgaaggcttgtcatgatcgtaatatcacccaccgggatatcaaacctggtagaaatgatgtcactgcctattttttccttgttttctatacttcttga

SEQ ID NO: 23332 - DNA, 2558 bp, Zea Mays
atggggtgccacgtggcggcggatcgcggccgccgccggtcccaggaggaccgtgccgtctgtgccctcggcatccgcatccccttcgtagagaacatgagaattaaggaggttgatgtgggagtggtggcaatatttgacggtcataatggagctgaggctagtgagatggcttctaagctttttctggattacttcttgctccatgtttattttcttctcgatggcatacactctctgcggttcagaaaatctactgggaaactgacatatagggaagttactatttttaacaatgtatttaatctgtacaagcatggccaatccgaccatgcagagaggtcatgttgggcatcaccagccattctagaccggtcatttcatacggaaattctgaaggaatcactaatgagggcagttcatgatattgatttaacattctccaaggaggcattacagaacaattttgaatctggttcaacagcgaccgtggtcttgatagctgatggacaaattatatctgccaatgttggagattcaaaagcttttctgtgctccgaaggatataatctgcaccatcgaaataggaaacgaaggagaaagagaaactcaattaatcacgaggaatttgctttggcaaattatgatggaccgttgtatcatgcaagggagttgacaaaggaccatcatcctaatagagaagacgagagaaaccgtgtggaggctgctggtggttatgttcttgagtgggctggtgtatatcgtgttaatggcgagctagcactatcaagagctattggtgatgttccttacaaaagatacggtgtaatatcaacacctgaattgacaggctggcagattctgtcagaaaatgacagttttcttattgcgtcatctgatgggatctttgagaaaatgactatgcaagatgtttgtgacctaatgctgcatgcaaaaattcgtgttaaacatgattttggatcctctgccataacacaacgtaatttggcagattacgtagttcatgttgctttacagaaaggcacaacagacaatgtggctgctgtggttgttccattgggatcacctggtagcactggtactacattaaaagattcgtcccagttcgaagaagatctcaagatatctatttctccaatgttgaatgttccatatggattgaagcctgatcatggacatagttcagctgtcattgacatggagtatttcaagcgctcatcaataaagttccagaggttcttggttgaagcaaaacctaagaaacttggttgtttctatttatccgagagtctggatgaagatatggactatatatttagggtgccggaagcataccagcgtgaagaagtccatgacttcaaccacataccagctgagactgccttatattctgatggtaatctggaaaaatacaaggacaaacacttttgcttgtaccttggtcccgaagatggcgaaatgggacagtgcaatggtcctgaagcttttgcaaacttttttggtctacttgactcccttccgcataatggaagcaaaccaaatggttcacactcctttggcaacacgatcgatttcaggtacaagctcaagagaaggtttgatcgtgggtcgtacggtgaagtctggttggcatttcattggaattgttctgaagatacagatgttcataaagagcctccacactttacaaatatatctcaatcagagatgtataattgcacaagttcaggcagaatgtcatctgatgaagatcatggttcaggcacagtaaatggtgatttattcatactgaagcgcataatggtggagaggggaaatgcagcttacttgagtggattgcgggagaaatactttggggaattattttcaaatgcttccaggactcttgaaggtttgtcgaggatagaatcatcgactatctcagtggacatgctatatgatcctgatatccatctagaaaagaacttgtcagctactgaagaaccacttaagcatgtggctaggtttatagaatcttttgaatcagaatcaagggaaatttggctggtgtatcacaatgaaggccactcattatcaaaattgatatatacagctgaagaaacgaagttagtcactggcaacaataatgagagggtcagacatatccaagttttgcacccatcgaagtggtggcattggctaaggacaacaaaagctgggctaaagcagatgcaaaacctcttatggcagctgagaacatgatcatttgctttgaggacatggagactggaaagtgtctaagagaggttccatctgaagcaaagcaaaataagctgaacatgcgtctgattgacttcggcagtgccattgatgattacacgttgaagaatctttatggtccaggacctactcgatctgaacagacatttgagtacactcctccagaggcactccttaattcaaactggtttcaaggatcaagaagtgcaaggcttaaataagtgaccgtacacgcattttaatggatcagcatctcggagggtggagtgaacaaacaa

SEQ ID NO: 23333 - DNA, 2129 bp, Zea Mays
atggggtgccacgtggcggcggatcgcggccgccgccggtcccaggaggaccgtgccgtctgtgccctcggcatccgcatccccttcgtagagaacatgagaattaaggaggttgatgtgggagtggtggcaatatttgacggtcataatggagctgaggctagtgagatggcttctaagctttttctggattacttcttgctccatgtttattttcttctcgatggcatacactctctgcggttcagaaaatctactgggaaactgacatatagggaagttactatttttaacaatgtatttaatctgtacaagcatggccaatccgaccatgcagagaggtcatgttgggcatcaccagccattctagaccggtcatttcatacggaaattctgaaggaatcactaatgagggcagttcatgatattgatttaacattctccaaggaggcattacagaacaattttgaatctggttcaacagcgaccgtggtcttgatagctgatggacaaattatatctgccaatgttggagattcaaaagcttttctgtgctccgaaggatataatctgcaccatcgaaataatacggtgtaatatcaacacctgaattgacaggctggcagattctgtcagaaaatgacagttttcttattgcgtcatctgatgggatctttgagaaaatgactatgcaagatgtttgtgacctaatgctgcatgcaaaaattcgtgttaaacatgattttggatcctctgccataacacaacgtaatttggcagattacgtagttcatgttgctttacagaaaggcacaacagacaatgtggctgctgtggttgttccattgggatcacctggtagcactggtactacattaaaagattcgtcccagttcgaagaagatctcaagatatctatttctccaatgttgaatgttccatatggattgaagcctgatcatggacatagttcagctgtcattgacatggagtatttcaagcgctcatcaataaagttccagaggttcttggttgaagcaaaacctaagaaacttggttgtttctatttatccgagagtctggatgaagatatggactatatatttagggtgccggaagcataccagcgtgaagaagtccatgacttcaaccacataccagctgagactgccttatattctgatggtaatctggaaaaatacaaggacaaacacttttgcttgtaccttggtcccgaagatggcgaaatgggacagtgcaatggtcctgaagcttttgcaaacttttttggtctacttgactcccttccgcataatggaagcaaaccaaatggttcacactcctttggcaacacgatcgatttcaggtacaagctcaagagaaggtttgatcgtgggtcgtacggtgaagtctggttggcatttcattggaattgttctgaagatacagatgttcataaagagcctccacactttacaaatatatctcaatcagagatgtataattgcacaagttcaggcagaatgtcatctgatgaagatcatggttcaggcacagtaaatggtgatttattcatactgaagcgcataatggtggagaggggaaatgcagcttacttgagtggattgcgggagaaatactttggggaattattttcaaatgcttccaggactcttgaaggtttgtcgaggatagaatcatcgactatctcagtggacatgctatatgatcctgatatccatctagaaaagaacttgtcagctactgaagaaccacttaagcatgtggctaggtttatagaatcttttgaatcagaatcaagggaaatttggctggtgtatcacaatgaaggccactcattatcaaaattgatatatacagctgaagaaacgaagttagtcactggcaacaataatgagagggtcagacatatccaagttttgcacccatcgaagtggtggcattggctaaggacaacaaaagctgggctaaagcagatgcaaaacctcttatggcagctgttgatgggactgaaggcttgtcatgatcgtaatatcacccaccgggatatcaaacctggtagaaatgatgtcactgcctattttttccttgttttctatacttcttga

SEQ ID NO: 23334 - DNA, 2222 bp, Zea Mays
atggggtgccacgtggcggcggatcgcggccgccgccggtcccaggaggaccgtgccgtctgtgccctcggcatccgcatccccttcagaacatgagaattaaggaggttgatgtgggagtggtggcaatatttgacggtcataatggagctgaggctagtgagatggcttctaagctttttctggattacttcttgctccatgtttattttcttctcgatggcatacactctctgcggttcagaaaatctactgggaaactgacatatagggaagttactatttttaacaatgtatttaatctgtacaagcatggccaatccgaccatgcagagaggtcatgttgggcatcaccagccattctagaccggtcatttcatacggaaattctgaaggaatcactaatgagggcagttcatgatattgatttaacattctccaaggaggggaaacgaaggagaaagagaaactcaattaatcacgaggaatttgctttggcaaattatgatggaccgttgtatcatgcaagggagttgacaaaggaccatcatcctaatagagaagacgagagaaaccgtgtggaggctgctggtggttatgttcttgagtgggctggtgtatatcgtgttaatggcgagctagcactatcaagagctattggtgatgttccttacaaaagatacggtgtaatatcaacacctgaattgacaggctggcagattctgtcagaaaatgacagttttcttattgcgtcatctgatgggatctttgagaaaatgactatgcaagatgtttgtgacctaatgctgcatgcaaaaattcgtgttaaacatgattttggatcctctgccataacacaacgtaatttggcagattacgtagttcatgttgctttacagaaaggcacaacagacaatgtggctgctgtggttgttccattgggatcacctggtagcactggtactacattaaaagattcgtcccagttcgaagaagatctcaagatatctatttctccaatgttgaatgttccatatggattgaagcctgatcatggacatagttcagctgtcattgacatggagtatttcaagcgctcatcaataaagttccagaggttcttggttgaagcaaaacctaagaaacttggttgtttctatttatccgagagtctggatgaagatatggactatatatttagggtgccggaagcataccagcgtgaagaagtccatgacttcaaccacataccagctgagactgccttatattctgatggtaatctggaaaaatacaaggacaaacacttttgcttgtaccttggtcccgaagatggcgaaatgggacagtgcaatggtcctgaagcttttgcaaacttttttggtctacttgactcccttccgcataatggaagcaaaccaaatggttcacactcctttggcaacacgatcgatttcaggtacaagctcaagagaaggtttgatcgtgggtcgtacggtgaagtctggttggcatttcattggaattgttctgaagatacagatgttcataaagagcctccacactttacaaatatatctcaatcagagatgtataattgcacaagttcaggcagaatgtcatctgatgaagatcatggttcaggcacagtaaatggtgatttattcatactgaagcgcataatggtggagaggggaaatgcagcttacttgagtggattgcgggagaaatactttggggaattattttcaaatgcttccaggactcttgaaggtttgtcgaggatagaatcatcgactatctcagtggacatgctatatgatcctgatatccatctagaaaagaacttgtcagctactgaagaaccacttaagcatgtggctaggtttatagaatcttttgaatcagaatcaagggaaatttggctggtgtatcacaatgaaggccactcattatcaaaattgatatatacagctgaagaaacgaagttagtcactggcaacaataatgagagggtcagacatatccaagttttgcacccatcgaagtggtggcattggctaaggacaacaaaagctgggctaaagcagatgcaaaacctcttatggcagctgttgatgggactgaaggcttgtcatgatcgtaatatcacccaccgggatatcaaacctggtagaaatgatgtcactgcctattttttccttgttttctatacttcttga

SEQ ID NO: 23335 - DNA, 2609 bp, Zea Mays
taagatggaaagcaccgaagtccaaactggacgctgattccagatagtaacaccaggaacattctggaggtttactgttcaaagatacacaccataagctgggtgtcaatcgtaacactgtgaatttgctggagagaacatgagaattaaggaggttgatgtgggagtggtggcaatatttgacggtcataatggagctgaggctagtgagatggcttctaagctttttctggattacttcttgctccatgtttattttcttctcgatggcatacactctctgcggttcagaaaatctactgggaaactgacatatagggaagttactatttttaacaatgtatttaatctgtacaagcatggccaatccgaccatgcagagaggtcatgttgggcatcaccagccattctagaccggtcatttcatacggaaattctgaaggaatcactaatgagggcagttcatgatattgatttaacattctccaaggaggcttttctgtgctccgaaggatataatctgcaccatcgaaataggaaacgaaggagaaagagaaactcaattaatcacgaggaatttgctttggcaaattatgatggaccgttgtatcatgcaagggagttgacaaaggaccatcatcctaatagagaagacgagagaaaccgtgtggaggctgctggtggttatgttcttgagtgggctggtgtatatcgtgttaatggcgagctagcactatcaagagctattggtgatgttccttacaaaagatacggtgtaatatcaacacctgaattgacaggctggcagattctgtcagaaaatgacagttttcttattgcgtcatctgatgggatctttgagaaaatgactatgcaagatgtttgtgacctaatgctgcatgcaaaaattcgtgttaaacatgattttggatcctctgccataacacaacgtaatttggcagattacgtagttcatgttgctttacagaaaggcacaacagacaatgtggctgctgtggttgttccattgggatcacctggtagcactggtactacattaaaagattcgtcccagttcgaagaagatctcaagatatctatttctccaatgttgaatgttccatatggattgaagcctgatcatggacatagttcagctgtcattgacatggagtatttcaagcgctcatcaataaagttccagaggttcttggttgaagcaaaacctaagaaacttggttgtttctatttatccgagagtctggatgaagatatggactatatatttagggtgccggaagcataccagcgtgaagaagtccatgacttcaaccacataccagctgagactgccttatattctgatggtaatctggaaaaatacaaggacaaacacttttgcttgtaccttggtcccgaagatggcgaaatgggacagtgcaatggtcctgaagcttttgcaaacttttttggtctacttgactcccttccgcataatggaagcaaaccaaatggttcacactcctttggcaacacgatcgatttcaggtacaagctcaagagaaggtttgatcgtgggtcgtacggtgaagtctggttggcatttcattggaattgttctgaagatacagatgttcataaagagcctccacactttacaaatatatctcaatcagagatgtataattgcacaagttcaggcagaatgtcatctgatgaagatcatggttcaggcacagtaaatggtgatttattcatactgaagcgcataatggtggagaggggaaatgcagcttacttgagtggattgcgggagaaatactttggggaattattttcaaatgcttccaggactcttgaaggtttgtcgaggatagaatcatcgactatctcagtggacatgctatatgatcctgatatccatctagaaaagaacttgtcagctactgaagaaccacttaagcatgtggctaggtttatagaatcttttgaatcagaatcaagggaaatttggctggtgtatcacaatgaaggccactcattatcaaaattgatatatacagctgaagaaacgaagttagtcactggcaacaataatgagagggtcagacatatccaagttttgcacccatcgaagtggtggcattggctaaggacaacaaaagctgggctaaagcagatgcaaaacctcttatggcagctgtagcttttgggcatttccctacatcaggataacctccacaaagttgatgggactgaaggcttgtcatgatcgtaatatcacccaccgggatatcaaacctgagaacatgatcatttgctttgaggacatggagactggaaagtgtctaagagaggttccatctgaagcaaagcaaaataagctgaacatgcgtctgattgacttcggcagtgccattgatgattacacgttgaagaatctttatggtccaggacctactcgatctgaacagacatttgagtacactcctccagaggcactccttaattcaaactggtttcaaggatcaagaagtgcaaggcttaaataagtgaccgtacacgcattttaatggatcagcatctcggagggtggagtgaacaaacaa

SEQ ID NO: 23336 - DNA, 2684 bp, Zea Mays
ccgaagtccaaactggacgctgattccagatagtaacaccaggaacattctggaggtttactgttcaaagatacacaccataagctgggtgtcaatcgtaacactgtgaatttgctggagagaacatgagaattaaggaggttgatgtgggagtggtggcaatatttgacggtcataatggagctgaggctagtgagatggcttctaagctttttctggattacttcttgctccatgtttattttcttctcgatggcatacactctctgcggttcagaaaatctactgggaaactgacatatagggaagttactatttttaacaatgtatttaatctgtacaagcatggccaatccgaccatgcagagaggtcatgttgggcatcaccagccattctagaccggtcatttcatacggaaattctgaaggaatcactaatgagggcagttcatgatattgatttaacattctccaaggagggtttcatgtttcacctgtataattaaattttgtaacattatattcatacgtcaaaaaatgattcttctttgtgttcaatgcaggaagcattacagaacaattttgaatctggttcaacagcgaccgtggtcttgatagctgatggacaaattatatctgccaatgttggagattcaaaagcttttctgtgctccgaaggatataatctgcaccatcgaaataggaaacgaaggagaaagagaaactcaattaatcacgaggaatttgctttggcaaattatgatggaccgttgtatcatgcaagggagttgacaaaggaccatcatcctaatagagaagacgagagaaaccgtgtggaggctgctggtggttatgttcttgagtgggctggtgtatatcgtgttaatggcgagctagcactatcaagagctattggtgatgttccttacaaaagatacggtgtaatatcaacacctgaattgacaggctggcagattctgtcagaaaatgacagttttcttattgcgtcatctgatgggatctttgagaaaatgactatgcaagatgtttgtgacctaatgctgcatgcaaaaattcgtgttaaacatgattttggatcctctgccataacacaacgtaatttggcagattacgtagttcatgttgctttacagaaaggcacaacagacaatgtggctgctgtggttgttccattgggatcacctggtagcactggtactacattaaaagattcgtcccagttcgaagaagatctcaagatatctatttctccaatgttgaatgttccatatggattgaagcctgatcatggacatagttcagctgtcattgacatggagtatttcaagcgctcatcaataaagttccagaggttcttggttgaagcaaaacctaagaaacttggttgtttctatttatccgagagtctggatgaagatatggactatatatttagggtgccggaagcataccagcgtgaagaagtccatgacttcaaccacataccagctgagactgccttatattctgatggtaatctggaaaaatacaaggacaaacacttttgcttgtaccttggtcccgaagatggcgaaatgggacagtgcaatggtcctgaagcttttgcaaacttttttggtctacttgactcccttccgcataatggaagcaaaccaaatggttcacactcctttggcaacacgatcgatttcaggtacaagctcaagagaaggtttgatcgtgggtcgtacggtgaagtctggttggcatttcattggaattgttctgaagatacagatgttcataaagagcctccacactttacaaatatatctcaatcagagatgtataattgcacaagttcaggcagaatgtcatctgatgaagatcatggttcaggcacagtaaatggtgatttattcatactgaagcgcataatggtggagaggggaaatgcagcttacttgagtggattgcgggagaaatactttggggaattattttcaaatgcttccaggactcttgaaggtttgtcgaggatagaatcatcgactatctcagtggacatgctatatgatcctgatatccatctagaaaagaacttgtcagctactgaagaaccacttaagcatgtggctaggtttatagaatcttttgaatcagaatcaagggaaatttggctggtgtatcacaatgaaggccactcattatcaaaattgatatatacagctgaagaaacgaagttagtcactggcaacaataatgagagggtcagacatatccaagttttgcacccatcgaagtggtggcattggctaaggacaacaaaagctgggctaaagcagatgcaaaacctcttatggcagctgttgatgggactgaaggcttgtcatgatcgtaatatcacccaccgggatatcaaacctgagaacatgatcatttgctttgaggacatggagactggaaagtgtctaagagaggttccatctgaagcaaagcaaaataagctgaacatgcgtctgattgacttcggcagtgccattgatgattacacgttgaagaatctttatggtccaggacctactcgatctgaacagacatttgagtacactcctccagaggcactccttaattcaaactggtttcaaggatcaagaagtgcaaggcttaagtatgacatctgg

SEQ ID NO: 23337 - DNA, 2389 bp, Zea Mays
cgaagtccaaactggacgctgattccagatagtaacaccaggaacattctggaggtttactgttcaaagatacacaccataagctgggtgtcaatcgtaacactgtgaatttgctggagagaacatgagaattaaggaggttgatgtgggagtggtggcaatatttgacggtcataatggagctgaggctagtgagatggcttctaagctttttctggattacttcttgctccatgtttattttcttctcgatggcatacactctctgcggttcagaaaatctactgggaaactgacatatagggaagttactatttttaacaatgtatttaatctgtacaagcatggccaatccgaccatgcagagaggtcatgttgggcatcaccagccattctagaccggtcatttcatacggaaattctgaaggaatcactaatgagggcagttcatgatattgatttaacattctccaaggaggcattacagaacaattttgaatctggttcaacagcgaccgtggtcttgatagctgatggacaaattatatctgccaatgttggagattcaaaagcttttctgtgctccgaaggatataatctgcaccatcgaaataggaaacgaaggagaaagagaaactcaattaatcacgaggaatttgctttggcaaattatgatggaccgttgtatcatgcaagggagttgacaaaggaccatcatcctaatagagaagacgagagaaaccgtgtggaggctgctggtggttatgttcttgagtgggctggtgtatatcgtgttaatggcgagctagcactatcaagagctattggtgatgttccttacaaaagatacggtgtaatatcaacacctgaattgacaggctggcagattctgtcagaaaatgacagttttcttattgcgtcatctgatgggatctttgagaaaatgactatgcaagatgtttgtgacctaatgctgcatgcaaaaattcgtgttaaacatgattttggatcctctgccataacacaacgtaatttggcagattacgtagttcatgttgctttacagaaaggcacaacagacaatgtggctgctgtggttgttccattgggatcacctggtagcactggtactacattaaaagattcgtcccagttcgaagaagatctcaagatatctatttctccaatgttgaatgttccatatggattgaagcctgatcatggacatagttcagctgtcattgacatggagtatttcaagcgctcatcaataaagttccagaggttcttggttgaagcaaaacctaagaaacttggttgtttctatttatccgagagtctggatgaagatatggactatatatttagggtgccggaagcataccagcgtgaagaagtccatgacttcaaccacataccagctgagactgccttatattctgatggtaatctggaaaaatacaaggacaaacacttttgcttgtaccttggtcccgaagatggcgaaatgggacagtgcaatggtcctgaagcttttgcaaacttttttggtctacttgactcccttccgcataatggaagcaaaccaaatggttcacactcctttggcaacacgatcgatttcaggtacaagctcaagagaaggtttgatcgtgggtcgtacggtgaagtctggttggcatttcattggaattgttctgaagatacagatgttcataaagagcctccacactttacaaatatatctcaatcagagatgtataattgcacaagttcaggcagaatgtcatctgatgaagatcatggttcaggcacagtaaatggtgatttattcatactgaagcgcataatggtggagaggggaaatgcagcttacttgagtggattgcgggagaaatactttggggaattattttcaaatgcttccaggactcttgaaggtttgtcgaggatagaatcatcgactatctcagtggacatgctatatgatcctgatatccatctagaaaagaacttgtcagctactgaagaaccacttaagcatgtggctaggtttatagaatcttttgaatcagaatcaagggaaatttggctggtgtatcacaatgaaggccactcattatcaaaattgatatatacagctgaagaaacgaagttagtcactggcaacaataatgagagggtcagacatatccaagttttgcacccatcgaagtggtggcattggctaaggacaacaaaagctgggctaaagcagatgcaaaacctcttatggcagctgttgatgggactgaaggcttgtcatgatcgtaatatcacccaccgggatatcaaacctggtagaaatgatgtcactgcctattttttccttgttttctatacttcttga

SEQ ID NO: 23338 - DNA, 2444 bp, Zea Mays
caaactggacgctgattccagatagtaacaccaggaacattctggaggtttactgttcaaagatacacaccataagctgggtgtcaatcgtaacactgtgaatttgctggagagaacatgagaattaaggaggttgatgtgggagtggtggcaatatttgacggtcataatggagctgaggctagtgagatggcttctaagctttttctggattacttcttgctccatgtttattttcttctcgatggcatacactctctgcggttcagaaaatctactgggaaactgacatatagggaagttactatttttaacaatgtatttaatctgtacaagcatggccaatccgaccatgcagagaggtcatgttgggcatcaccagccattctagaccggtcatttcatacggaaattctgaaggaatcactaatgagggcagttcatgatattgatttaacattctccaaggaggggaaacgaaggagaaagagaaactcaattaatcacgaggaatttgctttggcaaattatgatggaccgttgtatcatgcaagggagttgacaaaggaccatcatcctaatagagaagacgagagaaaccgtgtggaggctgctggtggttatgttcttgagtgggctggtgtatatcgtgttaatggcgagctagcactatcaagagctattggtgatgttccttacaaaagatacggtgtaatatcaacacctgaattgacaggctggcagattctgtcagaaaatgacagttttcttattgcgtcatctgatgggatctttgagaaaatgactatgcaagatgtttgtgacctaatgctgcatgcaaaaattcgtgttaaacatgattttggatcctctgccataacacaacgtaatttggcagattacgtagttcatgttgctttacagaaaggcacaacagacaatgtggctgctgtggttgttccattgggatcacctggtagcactggtactacattaaaagattcgtcccagttcgaagaagatctcaagatatctatttctccaatgttgaatgttccatatggattgaagcctgatcatggacatagttcagctgtcattgacatggagtatttcaagcgctcatcaataaagttccagaggttcttggttgaagcaaaacctaagaaacttggttgtttctatttatccgagagtctggatgaagatatggactatatatttagggtgccggaagcataccagcgtgaagaagtccatgacttcaaccacataccagctgagactgccttatattctgatggtaatctggaaaaatacaaggacaaacacttttgcttgtaccttggtcccgaagatggcgaaatgggacagtgcaatggtcctgaagcttttgcaaacttttttggtctacttgactcccttccgcataatggaagcaaaccaaatggttcacactcctttggcaacacgatcgatttcaggtacaagctcaagagaaggtttgatcgtgggtcgtacggtgaagtctggttggcatttcattggaattgttctgaagatacagatgttcataaagagcctccacactttacaaatatatctcaatcagagatgtataattgcacaagttcaggcagaatgtcatctgatgaagatcatggttcaggcacagtaaatggtgatttattcatactgaagcgcataatggtggagaggggaaatgcagcttacttgagtggattgcgggagaaatactttggggaattattttcaaatgcttccaggactcttgaaggtttgtcgaggatagaatcatcgactatctcagtggacatgctatatgatcctgatatccatctagaaaagaacttgtcagctactgaagaaccacttaagcatgtggctaggtttatagaatcttttgaatcagaatcaagggaaatttggctggtgtatcacaatgaaggccactcattatcaaaattgatatatacagctgaagaaacgaagttagtcactggcaacaataatgagagggtcagacatatccaagttttgcacccatcgaagtggtggcattggctaaggacaacaaaagctgggctaaagcagatgcaaaacctcttatggcagctgagaacatgatcatttgctttgaggacatggagactggaaagtgtctaagagaggttccatctgaagcaaagcaaaataagctgaacatgcgtctgattgacttcggcagtgccattgatgattacacgttgaagaatctttatggtccaggacctactcgatctgaacagacatttgagtacactcctccagaggcactccttaattcaaactggtttcaaggatcaagaagtgcaaggcttaaataagtgaccgtacacgcattttaatggatcagcatctcggagggtggagtgaacaaacaa

SEQ ID NO: 23339 - DNA, 2579 bp, Zea Mays
caaactggacgctgattccagatagtaacaccaggaacattctggaggtttactgttcaaagatacacaccataagctgggtgtcaatcgtaacactgtgaatttgctggagagaacatgagaattaaggaggttgatgtgggagtggtggcaatatttgacggtcataatggagctgaggctagtgagatggcttctaagctttttctggattacttcttgctccatgtttattttcttctcgatggcatacactctctgcggttcagaaaatctactgggaaactgacatatagggaagttactatttttaacaatgtatttaatctgtacaagcatggccaatccgaccatgcagagaggtcatgttgggcatcaccagccattctagaccggtcatttcatacggaaattctgaaggaatcactaatgagggcagttcatgatattgatttaacattctccaaggaggcattacagaacaattttgaatctggttcaacagcgaccgtggtcttgatagctgatggacaaattatatctgccaatgttggagattcaaaagcttttctgtgctccgaaggatataatctgcaccatcgaaataggaaacgaaggagaaagagaaactcaattaatcacgaggaatttgctttggcaaattatgatggaccgttgtatcatgcaagggagttgacaaaggaccatcatcctaatagagaagacgagagaaaccgtgtggaggctgctggtggttatgttcttgagtgggctggtgtatatcgtgttaatggcgagctagcactatcaagagctattggtgatgttccttacaaaagatacggtgtaatatcaacacctgaattgacaggctggcagattctgtcagaaaatgacagttttcttattgcgtcatctgatgggatctttgagaaaatgactatgcaagatgtttgtgacctaatgctgcatgcaaaaattcgtgttaaacatgattttggatcctctgccataacacaacgtaatttggcagattacgtagttcatgttgctttacagaaaggcacaacagacaatgtggctgctgtggttgttccattgggatcacctggtagcactggtactacattaaaagattcgtcccagttcgaagaagatctcaagatatctatttctccaatgttgaatgttccatatggattgaagcctgatcatggacatagttcagctgtcattgacatggagtatttcaagcgctcatcaataaagttccagaggttcttggttgaagcaaaacctaagaaacttggttgtttctatttatccgagagtctggatgaagatatggactatatatttagggtgccggaagcataccagcgtgaagaagtccatgacttcaaccacataccagctgagactgccttatattctgatggtaatctggaaaaatacaaggacaaacacttttgcttgtaccttggtcccgaagatggcgaaatgggacagtgcaatggtcctgaagcttttgcaaacttttttggtctacttgactcccttccgcataatggaagcaaaccaaatggttcacactcctttggcaacacgatcgatttcaggtacaagctcaagagaaggtttgatcgtgggtcgtacggtgaagtctggttggcatttcattggaattgttctgaagatacagatgttcataaagagcctccacactttacaaatatatctcaatcagagatgtataattgcacaagttcaggcagaatgtcatctgatgaagatcatggttcaggcacagtaaatggtgatttattcatactgaagcgcataatggtggagaggggaaatgcagcttacttgagtggattgcgggagaaatactttggggaattattttcaaatgcttccaggactcttgaaggtttgtcgaggatagaatcatcgactatctcagtggacatgctatatgatcctgatatccatctagaaaagaacttgtcagctactgaagaaccacttaagcatgtggctaggtttatagaatcttttgaatcagaatcaagggaaatttggctggtgtatcacaatgaaggccactcattatcaaaattgatatatacagctgaagaaacgaagttagtcactggcaacaataatgagagggtcagacatatccaagttttgcacccatcgaagtggtggcattggctaaggacaacaaaagctgggctaaagcagatgcaaaacctcttatggcagctgagaacatgatcatttgctttgaggacatggagactggaaagtgtctaagagaggttccatctgaagcaaagcaaaataagctgaacatgcgtctgattgacttcggcagtgccattgatgattacacgttgaagaatctttatggtccaggacctactcgatctgaacagacatttgagtacactcctccagaggcactccttaattcaaactggtttcaaggatcaagaagtgcaaggcttaaataagtgaccgtacacgcattttaatggatcagcatctcggagggtggagtgaacaaacaa

SEQ ID NO: 23340 - DNA, 2265 bp, Zea Mays
ggtgtcaatcgtaacactgtgaatttgctggagagaacatgagaattaaggaggttgatgtgggagtggtggcaatatttgacggtcataatggagctgaggctagtgagatggcttctaagctttttctggattacttcttgctccatgtttattttcttctcgatggcatacactctctgcggttcagaaaatctactgggaaactgacatatagggaagttactatttttaacaatgtatttaatctgtacaagcatggccaatccgaccatgcagagaggtcatgttgggcatcaccagccattctagaccggtcatttcatacggaaattctgaaggaatcactaatgagggcagttcatgatattgatttaacattctccaaggaggcattacagaacaattttgaatctggttcaacagcgaccgtggtcttgatagctgatggacaaattatatctgccaatgttggagattcaaaagcttttctgtgctccgaaggatataatctgcaccatcgaaataggaaacgaaggagaaagagaaactcaattaatcacgaggaatttgctttggcaaattatgatggaccgttgtatcatgcaagggagttgacaaaggaccatcatcctaatagagaagacgagagaaaccgtgtggaggctgctggtggttatgttcttgagtgggctggtgtatatcgtgttaatggcgagctagcactatcaagagctattggtgatgttccttacaaaagatacggtgtaatatcaacacctgaattgacaggctggcagattctgtcagaaaatgacagttttcttattgcgtcatctgatgggatctttgagaaaatgactatgcaagatgtttgtgacctaatgctgcatgcaaaaattcgtgttaaacatgattttggatcctctgccataacacaacgtaatttggcagattacgtagttcatgttgctttacagaaaggcacaacagacaatgtggctgctgtggttgttccattgggatcacctggtagcactggtactacattaaaagattcgtcccagttcgaagaagatctcaagatatctatttctccaatgttgaatgttccatatggattgaagcctgatcatggacatagttcagctgtcattgacatggagtatttcaagcgctcatcaataaagttccagaggttcttggttgaagcaaaacctaagaaacttggttgtttctatttatccgagagtctggatgaagatatggactatatatttagggtgccggaagcataccagcgtgaagaagtccatgacttcaaccacataccagctgagactgccttatattctgatggtaatctggaaaaatacaaggacaaacacttttgcttgtaccttggtcccgaagatggcgaaatgggacagtgcaatggtcctgaagcttttgcaaacttttttggtctacttgactcccttccgcataatggaagcaaaccaaatggttcacactcctttggcaacacgatcgatttcaggtacaagctcaagagaaggtttgatcgtgggtcgtacggtgaagtctggttggcatttcattggaattgttctgaagatacagatgttcataaagagcctccacactttacaaatatatctcaatcagagatgtataattgcacaagttcaggcagaatgtcatctgatgaagatcatggttcaggcacagtaaatggtgatttattcatactgaagcgcataatggtggagaggggaaatgcagcttacttgagtggattgcgggagaaatactttggggaattattttcaaatgcttccaggactcttgaaggtttgtcgaggatagaatcatcgactatctcagtggacatgctatatgatcctgatatccatctagaaaagaacttgtcagctactgaagaaccacttaagcatgtggctaggtttatagaatcttttgaatcagaatcaagggaaatttggctggtgtatcacaatgaaggccactcattatcaaaattgatatatacagctgaagaaacgaagttagtcactggcaacaataatgagagggtcagacatatccaagttttgcacccatcgaagtggtggcattggctaaggacaacaaaagctgggctaaagcagatgcaaaacctcttatggcagctgagtagcttttgggcatttccctacatcaggataacctccacaaagttgatgggactgaaggcttgtcatg

SEQ ID NO: 23341 - DNA, 2023 bp, Zea Mays
gtcaatcgtaacactgtgaatttgctggagagaacatgagaattaaggaggttgatgtgggagtggtggcaatatttgacggtcataatggagctgaggctagtgagatggcttctaagctttttctggattacttcttgctccatgtttattttcttctcgatggcatacactctctgcggttcagaaaatctactgggaaactgacatatagggaagttactatttttaacaatgtatttaatctgtacaagcatggccaatccgaccatgcagagaggtcatgttgggcatcaccagccattctagaccggtcatttcatacggaaattctgaaggaatcactaatgagggcagttcatgatattgatttaacattctccaaggaggcattacagaacaattttgaatctggttcaacagcgaccgtggtcttgatagctgatggacaaattatatctgccaatgttggagattcaaaagcttttctgtgctccgaaggatataatctgcaccatcgaaataatacggtgtaatatcaacacctgaattgacaggctggcagattctgtcagaaaatgacagttttcttattgcgtcatctgatgggatctttgagaaaatgactatgcaagatgtttgtgacctaatgctgcatgcaaaaattcgtgttaaacatgattttggatcctctgccataacacaacgtaatttggcagattacgtagttcatgttgctttacagaaaggcacaacagacaatgtggctgctgtggttgttccattgggatcacctggtagcactggtactacattaaaagattcgtcccagttcgaagaagatctcaagatatctatttctccaatgttgaatgttccatatggattgaagcctgatcatggacatagttcagctgtcattgacatggagtatttcaagcgctcatcaataaagttccagaggttcttgagtctggatgaagatatggactatatatttagggtgccggaagcataccagcgtgaagaagtccatgacttcaaccacataccagctgagactgccttatattctgatggtaatctggaaaaatacaaggacaaacacttttgcttgtaccttggtcccgaagatggcgaaatgggacagtgcaatggtcctgaagcttttgcaaacttttttggtctacttgactcccttccgcataatggaagcaaaccaaatggttcacactcctttggcaacacgatcgatttcaggtacaagctcaagagaaggtttgatcgtgggtcgtacggtgaagtctggttggcatttcattggaattgttctgaagatacagatgttcataaagagcctccacactttacaaatatatctcaatcagagatgtataattgcacaagttcaggcagaatgtcatctgatgaagatcatggttcaggcacagtaaatggtgatttattcatactgaagcgcataatggtggagaggggaaatgcagcttacttgagtggattgcgggagaaatactttggggaattattttcaaatgcttccaggactcttgaaggtttgtcgaggatagaatcatcgactatctcagtggacatgctatatgatcctgatatccatctagaaaagaacttgtcagctactgaagaaccacttaagcatgtggctaggtttatagaatcttttgaatcagaatcaagggaaatttggctggtgtatcacaatgaaggccactcattatcaaaattgatatatacagctgaagaaacgaagttagtcactggcaacaataatgagagggtcagacatatccaagttttgcacccatcgaagtggtggcattggctaaggacaacaaaagctgggctaaagcagatgcaaaacctcttatggcagctgttgatgggactgaaggcttgtcatgatcgtaatatcacccaccgggatatcaaacctggtagaaatgatgtcactgcctattttttccttgttttctatacttcttga

SEQ ID NO: 23342 - DNA, 2027 bp, Zea Mays
  misc_feature (1)..(1): n is a, c, g, or t
nttaactgtaaatgttggtctgcatcctactgctgtggtgtatagtatgctaatggatgggtactgtcttgttggcaagatggagaaagcattaagagtatttgatgctatggtgtcagctggcattgaaccagacgatgtagtgtatggtacacttgttaatggctattgtaaaattggaaggattgatgaaggattgagtcttttcagagaaatgctgcaaaagggaataaagccttcaactattttgtacaacatcataattgatgggttatttcaggatgggagaacagttcctgcaaaggtgaaattccatgaaatgacagaaagtggtatcgctatggacaaatatacatacaacatagttcttcgtggactttttaaaaatagatgctttgatgaagcaatctttcttttcaaagaattacgtgcaatgaatgtaaagatcaatatcataactctcaataccatgatagctggaatgtttcaaaccaggagagttgaagaagctaaggatctgtttgcttctatctcgagaagtgggctggtgccttgtgttgtgacttacagtataatgatcacaaatcttataaaagaaggattggtggaagaggcagaagatatgttttcatccatgcagaatgctggctgtgagcccaattctcgattgctgaatcatgtagtcagggaattactaaagaaaaatgaaatagtcagggctggagcttacctgtccaagattgacgagaggaatttctcacttgaacatttaaccgcaatgttgctggtcgatctcttctcaagcaaaggaacttgtagggaacaaataagatttctccctgcaaagtatcattttcttgcagaggccagtccgtgattgatatgttgattttttttggaatcagtccttgcacgcacctgtcacagttaaactagtatatgatcttaactaaaaccattggtttacttcatgttcatgtttctcggaagattttcttctcatttgacctgcttgatatgcagatgttcatttacttttgatccaatatatgcagagcgttttatgtttttcgaagcatattcgttccggtgctgatgtagctatgtgctctccgtacacaactgatgtgtgattctctcttgtagcatgttttatcatgtctgttaacacagccgatgttgcatttatgaggaatgacgttataactgctgggagaataatgtagcatgctgaatcctgttttgggccctggctgagccgcccagttcgtcatgaccagcaagtgattgcaaccaaaggcagtctggcctaatgctgtggcttgtaagggcaaagtggataccctgctgctgggtagtactagtatattgctgttcaaacctgcaaatatctgggatcagctgatggatgaagaacaatcagtagtctctgggtaaaatagcatgcctgcgcaagcgagcggacatgagtgacaagaagcgattgacaacgcaacaagagcgaagccacaagaggtttcaggccttgtcgatgagctcctgtggatgtgggggatgacgccgccgccgctggcggcgatggtagccttgatcagggtttccagctcgtcgttcccgtggatcgccagctgaagcataagcagagaagcatatggtggccatggctatgctatttaggaacagaaggcaaaaacagagagggaaattgaacaaggaataaacaagagattgtataggaagcttgatacgaaatggaagcagagcattgtggtcagaccagcaccatctctaagggagaacaaagagaaggattgtggaaatgtaaaccgttcaagttgctgcattagtagcagctagtagtatctgtgattcagaaatctaaaagttgtgacttgttcatgtagaatgaaccttgtgtagatgagttgcaaggtgtgagtgttccatatattattgtaggatgagttagaatcctgaatgtcaagtgcttattacgtggatgcaaaatgcaaataaataaagtgatg

SEQ ID NO: 23343 - DNA, 2188 bp, Zea Mays
taactgtaaatgttggtctgcatcctactgctgtggtgtatagtatgctaatggatgggtactgtcttgttggcaagatggagaaagcattaagagtatttgatgctatggtgtcagctggcattgaaccagacgatgtagtgtatggtacacttgttaatggctattgtaaaattggaaggattgatgaaggattgagtcttttcagagaaatgctgcaaaagggaataaagccttcaactattttgtacaacatcataattgatgggttatttcaggatgggagaacagttcctgcaaaggtgaaattccatgaaatgacagaaagtggtatcgctatggacaaatatacatacaacatagttcttcgtggactttttaaaaatagatgctttgatgaagcaatctttcttttcaaagaattacgtgcaatgaatgtaaagatcaatatcataactctcaataccatgatagctggaatgtttcaaaccaggagagttgaagaagctaaggatctgtttgcttctatctcgagaagtgggctggtgccttgtgttgtgacttacagtataatgatcacaaatcttataaaagaaggattggtggaagaggcagaagatatgttttcatccatgcagaatgctggctgtgagcccaattctcgattgctgaatcatgtagtcagggaattactaaagaaaaatgaaatagtcagggctggagcttacctgtccaagattgacgagaggaatttctcacttgaacatttaaccgcaatgttgctggtcgatctcttctcaagcaaaggaacttgtagggaacaaataagatttctccctgcaaagtatcattttcttgcagaggccagtccgtgattgatatgttgattttttttggaatcagtccttgcacgcacctgtcacagttaaactagtatatgatcttaactaaaaccattggtttacttcatgttcatgtttctcggaagattttcttctcatttgacctgcttgatatgcagatgttcatttacttttgatccaatatatgcagagcgttttatgtttttcgaagcatattcgttccggtgctgatgtagctatgtgctctccgtacacaactgatgtgtgattctctcttgtagcatgttttatcatgtctgttaacacagccgatgttgcatttatgaggaatgacgttataactgctgggagaataatgtagcatgctgaatcctgttttgggccctggctgagccgcccagttcgtcatgaccagcaagtgattgcaaccaaaggcagtctggcctaatgctgtggcttgtaagggcaaagtggataccctgctgctgggtagtactagtatattgctgttcaaacctgcaaatatctgggatcagctgatggatgaagaacaatcagtagtctctgggtaaaatagcatgcctgcgcaagcgagcggacatgagtgacaagaagcggattaggtgggattaaaatccatggtgggattgggtgtaagaatgaccggacaaggcctaatgtgtatcagcagattgacaacgcaacaagagcgaagccacaagaggtttcaggccttgtcgatgagctcctgtggatgtgggggatgacgccgccgccgctggcggcgatggtagccttgatcagggtttccagctcgtcgttcccgtggatcgccagctgaagcataagcagagaagcatatggtggccatggctatgctatttaggaacagaaggcaaaaacagagagggaaattgaacaaggaataaacaagagattgtataggaagcttgatacgaaatggaagcagagcattgtggtcagaccagcaccatctctaagggagaacaaagagaaggcaagcagagcctgtgcacgtattggttggttcagttgtgcggttgctctttttggctcttatcttcgtcgccattcttgtatttgtaggattgtggaaatgtaaaccgttcaagttgctgcattagtagcagctagtagtatctgtgattcagaaatctaaaagttgtgacttgttcatgtagaatgaaccttgtgtagatgagttgcaaggtgtgagtgttccatatattattgtaggatgagttagaatcctgaatgtcaagtgcttattacgtggatgcaaaatgcaaataaataaagtgatg

SEQ ID NO: 23344 - DNA, 2000 bp, Zea Mays
gtatagtatgctaatggatgggtactgtcttgttggcaagatggagaaagcattaagagtatttgatgctatggtgtcagctggcattgaaccagacgatgtagtgtatggtacacttgttaatggctattgtaaaattggaaggattgatgaaggattgagtcttttcagagaaatgctgcaaaagggaataaagccttcaactattttgtacaacatcataattgatgggttatttcaggatgggagaacagttcctgcaaaggtgaaattccatgaaatgacagaaagtggtatcgctatggacaaatatacatacaacatagttcttcgtggactttttaaaaatagatgctttgatgaagcaatctttcttttcaaagaattacgtgcaatgaatgtaaagatcaatatcataactctcaataccatgatagctggaatgtttcaaaccaggagagttgaagaagctaaggatctgtttgcttctatctcgagaagtgggctggtgccttgtgttgtgacttacagtataatgatcacaaatcttataaaagaaggattggtggaagaggcagaagatatgttttcatccatgcagaatgctggctgtgagcccaattctcgattgctgaatcatgtagtcagggaattactaaagaaaaatgaaatagtcagggctggagcttacctgtccaagattgacgagaggaatttctcacttgaacatttaaccgcaatgttgctggtcgatctcttctcaagcaaaggaacttgtagggaacaaataagatttctccctgcaaagtatcattttcttgcagaggccagtccgtgattgatatgttgattttttttggaatcagtccttgcacgcacctgtcacagttaaactacatgttttatcatgtctgttaacacagccgatgttgcatttatgaggaatgacgttataactgctgggagaataatgtagcatgctgaatcctgttttgggccctggctgagccgcccagttcgtcatgaccagcaagtgattgcaaccaaaggcagtctggcctaatgctgtggcttgtaagggcaaagtggataccctgctgctgggtagtactagtatattgctgttcaaacctgcaaatatctgggatcagctgatggatgaagaacaatcagtagtctctgggtaaaatagcatgcctgcgcaagcgagcggacatgagtgacaagaagcggattaggtgggattaaaatccatggtgggattgggtgtaagaatgaccggacaaggcctaatgtgtatcagcagattgacaacgcaacaagagcgaagccacaagaggtttcagggtagggtaccatctaatgtgtatcagcagcagcaggtttttctcaggtgttaagaaccaccgacatgaaaaagcaccgagtttgctcgttcattccttggcagccttgtcgatgagctcctgtggatgtgggggatgacgccgccgccgctggcggcgatggtagccttgatcagggtttccagctcgtcgttcccgtggatcgccagctgaaggaacagaaggcaaaaacagagagggaaattgaacaaggaataaacaagagattgtataggaagcttgatacgaaatggaagcagagcattgtggtcagaccagcaccatctctaagggagaacaaagagaaggcaagcagagcctgtgcacgtattggttggttcagttgtgcggttgctctttttggctcttatcttcgtcgccattcttgtatttgtaggattgtggaaatgtaaaccgttcaagttgctgcattagtagcagctagtagtatctgtgattcagaaatctaaaagttgtgacttgttcatgtagaatgaaccttgtgtagatgagttgcaaggtgtgagtgttccatatattattgtaggatgagttagaatcctgaatgtcaagtgcttattacgtggatgcaaaatgcaaataaataaagtgatg

SEQ ID NO: 23345 - DNA, 1816 bp, Zea Mays
tagtatgctaatggatgggtactgtcttgttggcaagatggagaaagcattaagagtatttgatgctatggtgtcagctggcattgaaccagacgatgtagtgtatggtacacttgttaatggctattgtaaaattggaaggattgatgaaggattgagtcttttcagagaaatgctgcaaaagggaataaagccttcaactattttgtacaacatcataattgatgggttatttcaggatgggagaacagttcctgcaaaggtgaaattccatgaaatgacagaaagtggtatcgctatggacaaatatacatacaacatagttcttcgtggactttttaaaaatagatgctttgatgaagcaatctttcttttcaaagaattacgtgcaatgaatgtaaagatcaatatcataactctcaataccatgatagctggaatgtttcaaaccaggagagttgaagaagctaaggatctgtttgcttctatctcgagaagtgggctggtgccttgtgttgtgacttacagtataatgatcacaaatcttataaaagaaggattggtggaagaggcagaagatatgttttcatccatgcagaatgctggctgtgagcccaattctcgattgctgaatcatgtagtcagggaattactaaagaaaaatgaaatagtcagggctggagcttacctgtccaagattgacgagaggaatttctcacttgaacatttaaccgcaatgttgctggtcgatctcttctcaagcaaaggaacttgtagggaacaaataagatttctccctgcaaagtatcattttcttgcagaggccagtccgtgattgatatgttgattttttttggaatcagtccttgcacgcacctgtcacagttaaactagtatatgatcttaactaaaaccattggtttacttcatgttcatgtttctcggaagattttcttctcatttgacctgcttgatatgcagatgttcatttacttttgatccaatatatgcagagcgttttatgtttttcgaagcatattcgttccggtgctgatgtagctatgtgctctccgtacacaactgatgtgtgattctctcttgtagcatgttttatcatgtctgttaacacagccgatgttgcatttatgaggaatgacgttataactgctgggagaataatgtagcatgctgaatcctgttttgggccctggctgagccgcccagttcgtcatgaccagcaagtgattgcaaccaaaggcagtctggcctaatgctgtggcttgtaagggcaaagtggataccctgctgctgggtagtactagtatattgctgttcaaacctgcaaatatctgggatcagctgatggatgaagaacaatcagtagtctctgggtaaaatagcatgcctgcgcaagcgagcggacatgagtgacaagaagcggattagacgaaatggaagcagagcattgtggtcagaccagcaccatctctaagggagaacaaagagaaggcaagcagagcctgtgcacgtattggttggttcagttgtgcggttgctctttttggctcttatcttcgtcgccattcttgtatttgtaggattgtggaaatgtaaaccgttcaagttgctgcattagtagcagctagtagtatctgtgattcagaaatctaaaagttgtgacttgttcatgtagaatgaaccttgtgtagatgagttgcaaggtgtgagtgttccatatattattgtaggatgagttagaatcctgaatgtcaagtgcttattacgtggatgcaaaatgcaaataaataaagtgatg

SEQ ID NO: 23346 - DNA, 2245 bp, Zea Mays
tgggtactgtcttgttggcaagatggagaaagcattaagagtatttgatgctatggtgtcagctggcattgaaccagacgatgtagtgtatggtacacttgttaatggctattgtaaaattggaaggattgatgaaggattgagtcttttcagagaaatgctgcaaaagggaataaagccttcaactattttgtacaacatcataattgatgggttatttcaggatgggagaacagttcctgcaaaggtgaaattccatgaaatgacagaaagtggtatcgctatggacaaatatacatacaacatagttcttcgtggactttttaaaaatagatgctttgatgaagcaatctttcttttcaaagaattacgtgcaatgaatgtaaagatcaatatcataactctcaataccatgatagctggaatgtttcaaaccaggagagttgaagaagctaaggatctgtttgcttctatctcgagaagtgggctggtgccttgtgttgtgacttacagtataatgatcacaaatcttataaaagaaggattggtggaagaggcagaagatatgttttcatccatgcagaatgctggctgtgagcccaattctcgattgctgaatcatgtagtcagggaattactaaagaaaaatgaaatagtcagggctggagcttacctgtccaagattgacgagaggaatttctcacttgaacatttaaccgcaatgttgctggtcgatctcttctcaagcaaaggaacttgtagggaacaaataagatttctccctgcaaagtatcattttcttgcagaggccagtccgtgattgatatgttgattttttttggaatcagtccttgcacgcacctgtcacagttaaactagtatatgatcttaactaaaaccattggtttacttcatgttcatgtttctcggaagattttcttctcatttgacctgcttgatatgcagatgttcatttacttttgatccaatatatgcagagcgttttatgtttttcgaagcatattcgttccggtgctgatgtagctatgtgctctccgtacacaactgatgtgtgattctctcttgtagcatgttttatcatgtctgttaacacagccgatgttgcatttatgaggaatgacgttataactgctgggagaataatgtagcatgctgaatcctgttttgggccctggctgagccgcccagttcgtcatgaccagcaaggcagtctggcctaatgctgtggcttgtaagggcaaagtggataccctgctgctgggtagtactagtatattgctgttcaaacctgcaaatatctgggatcagctgatggatgaagaacaatcagtagtctctgggtaaaatagcatgcctgcgcaagcgagcggacatgagtgacaagaagcggtgagtgcctgcctgcctccatttaagggcctgttcgttctcatcttaattcatgtggattggataggattaggtgggattaaaatccatggtgggattgggtgtaagaatgaccggacaaggcctaatgtgtatcagcagattgacaacgcaacaagagcgaagccacaagaggtttcagggtagggtaccatctaatgtgtatcagcagcagcaggtttttctcaggtgttaagaaccaccgacatgaaaaagcaccgagtttgctcgttcattccttggcagccttgtcgatgagctcctgtggatgtgggggatgacgccgccgccgctggcggcgatggtagccttgatcagggtttccagctcgtcgttcccgtggatcgccagctgaaggaacagaaggcaaaaacagagagggaaattgaacaaggaataaacaagagattgtataggaagcttgatacgaaatggaagcagagcattgtggtcagaccagcaccatctctaagggagaacaaagagaaggcaagcagagcctgtgcacgtattggttggttcagttgtgcggttgctctttttggctcttatcttcgtcgccattcttgtatttgtaggattgtggaaatgtaaaccgttcaagttgctgcattagtagcagctagtagtatctgtgattcagaaatctaaaagttgtgacttgttcatgtagaatgaaccttgtgtagatgagttgcaaggtgtgagtgttccatatattattgtaggatgagttagaatcctgaatgtcaagtgcttattacgtggatgcaaaatgcaaataaataaagtgatg

SEQ ID NO: 23347 - DNA, 574 bp, Zea Mays
gtcaactgagcttagatgatctagacgttataaaagtgatcgggaaaggtagcagcggaaatgtgcaattggtccgccataaatttactggccagttttttgctctgaaggttattcaactaaatattgacgagagtatacacacacagattgccactgtctcctgagcttcgtgcacaagcaactgatccgaagagcaggcaaggtcacaggaccctggatggaagtttgggaggtggccatacactgtcacactataaaggactttgttcagtgtattttctgtttgaagattcttccttctagaattaaaagatttaaacagcacctgtagatcggtcctatgcatttttattgtgatctagctagctatctgtaaatgatctagttgtgaatgatgttataattgtgatgcttttgtgaatatataattgtggtgcttttgtgtttatgtgatggatctatgactgtggtatactgattaactgtgtatgcctttatgatttgtgtataaaaatctgtgatttgcggtgcttaattaaatgtatattattattaataacaactataaaag

SEQ ID NO: 23348 - DNA, 183 bp, Zea Mays
gttgatgggactgaaggcttgtcatgatcgtaatatcacccaccgggatatcaaacctgagaacatgatcatttgctttgaggacatcgagactggaaagtgtctaagagaggttccatctgaagcaaagcaaaataagctgaacatgcgtctgattgacttcggcagtgccattgatgatta

SEQ ID NO: 23349 - DNA, 712 bp, Zea Mays
cctacttgatctgaacagacatttgagtacactcctccagaggcactccttaattcaaactggtttcaaggatcaagaagtgcaaggcttaaatatgacatctagagcattggagttgtcatgctagagttgatgatgggttctccccatgtttttcagataagtgaccgtacacgtattttaatggatcagcatctcggagggtggagtgaacaaacaaaggagcttgcatacaagttgaggtcatacatggagttgtgcattttagtcccagggatttcctcgcagcatcatggcactggtagcccagaacagggtcaatttgggttagcttcttggaaatgctctgaagaatcatttgcacatcaagtgaagatcggatttcctctcaagattggttttcctaatttatgggcgttgcgacttgcacgccagctacttgtgtggcatcctgaggatcggctaagtgtcgatgaagcactaaatcatccttacttccaggagccaatgtaatgtaaggagaggagattagtgataactaaccgacgaatcttcagctcggtcctttcaagttcaagccgcgtgcatttggtcagaggaattcatgaatcgtttgtaatttaccatcctagctgtgtcataaagatgttgtgaatataacataacatgaagtaaaagatagtagcatatgtgaaattacatgtgtaacgac

SEQ ID NO: 23350 - DNA, 1195 bp, Zea Mays
ggcactcacagctctaaatggaggcaggcaggcactcacagcttcttgtcactcatgtccgctcgcttgcgcaggcatgctattttacccagagactactcattgttcttcatccatcagctgatcccagatctgtggcatcagtatttcagtgttgtgaatcggccggtgcatgaacttaatcattaatgcatatacttatatgctaactgaacatgaatgaaagttatatgtttcaagtgcaagtgcatagtacaatagatagaaatggcaggtttgttttaaaacttacatttgcaggtttcaacagcaatacactagtactacccagcagcagggtatccactttgcccttacaaaccacagcattaggccagactgcctttggttgcaatcactaatgaggaagaacgttatctatttgttaatgtaaacagcacaatccttctctttgttctcccttggagatggtggtggtctgaccacaatgctctgcttccatttcgtctaatctcatctaatccacatgtattaagatgagaacgaacaggcccttaaatggaggcaggcaggcactcaccgcttcttgtcactcatgtccgctcgcttgcgcaggcatgatattttacccagagactactgattgttctttcatccatcagctgatcccagatctgtggcatcagtatttcagtgttgtgaatcggccggtgcatgaacttaatcattaatgcatatacttatatgctaactgaacatgaatgaaagttatatgtttcaagtgcaagtgcatagtacagtagatagaaatggcaggtttgtttaaaacttacatttgcaggtttgaacagcaatatactagtactacccagcagcagggtatccactttgcccttacaagccacagcattaggccaaactgcctttggttgcaatcactaatgaggaagaacgttatctatttgttaatgtaaacagctaagggtgtcccttctcaaagacaagatgagcaaactagacatgtagatgaacattaccctgctggtcatgacgaactgggcggctcggccaggggccaaaacaggattcagcatgctacattattcttcatcacaattcagcagttataacgtcattcctcataaatgcaacatcggctgtgttaacagacatgataaaacatgctacaagagag

SEQ ID NO: 23351 - DNA, 1305 bp, Zea Mays
taagattctgtttcagagctagcatgacgagttgtgtaatgttgagctacagagtaattaggcttgtgaccaagggaagtttcagttaattttttgctggcttgaatgacagtccactgaaaaaaaatcaattttcctcccagctttagtcagtggcaggagcagattatttttttcttggaatccaaaacttggaagcagttttactctcggtacatgttattctctcgatcgggtaatcgtttccatggacaagaccaagcggaggtgtggaaaaaacttactgggagacatgtagacagccgtgccaagtgaatcctggatgaacctctggcatgggattttgcagaggttcgtgcacattccgacacagttggtgctttccagaaatctgtcagagtaggataatgaagaaaaaagaggctattctgggaagaaagaaatactctagttattttaattatacctcacatggtccgacgagccaagggaagaacaccgtggtgaaggcggcgaaatactcccgcgagaatcgagagggtggcatcatcaccttgatctgcatatgcatgcaacagtcagctttgctcgcaggcagcatgtgtatatgttaaaatcaagtgtgtgtatatatatatacttgccatggtgaggatgtagctggggaaggcccgttggagagcgctggccacagtgtcccactgctggtcaaccctgaacagcgcggagatggccagggccgcctctatcaggccctcgtagccgtcctttctgttcttcatccctgcaatgcatgcacacaatacaacagacaacatatgcatgaaccagatatgctactagctgctatgtcgacacagaattaattttacaagagagatggaaaaataaaataggattttttaagctggtgtccttagttttgttggtgtcctcgtttttaaaacttagtcgtgtttttttttctcagttttaaccttctagtgttatatatagagcagaaaggtaaaactgaaaaaaacatgactaatgataaaaatgaggataccattaaaaccgatgacaccagcttaaaaaaacccaataaagtagacatcaagtacgctagttgttatattagtcgacccagctgctacaagcgatataatctacatgcatcgcgtgcatgcagtcgcttattagttacatggcggatccaccaagaagggtcgaccgatcgaccattgacatgcatgcagcacaaagatttggatcgctagcagccggtgctgtgtgcagcgtgtgcagggcgcaacaagtgtgctg

SEQ ID NO: 23352 - DNA, 435 bp, Zea Mays
atggaggtcgccgccgccacttgtacgctccttgctgccgtcgccctaccagcatcgtcgtcctcagcagcagcacgctctgcgacgaaacagagctacgcgaggaggaagacgacgccgcatcaggtgccgccgcctgccaccgccaccgccaccacgtaccgcgacaactggttcgacaagctggccatcgggtacctgtcccggaaccttcaagaagcttctgggacgaacgtcgacgagcaggaagcgtggtcggtcgagtagggagcgggacaggggtcggggaacgcggacggtgagtacgaactccggtgagtctccacggacggcggcgatggctctaacggtgaggagagtgagagagatggtggcgagctcgggtaggaagagagaagctcgaggtggaagagagtcccggattttatagggagg

SEQ ID NO: 23353 - DNA, 257 bp, Zea Mays
tccagatctggacagacatttgagtacactcctccagaggcactccttaattcaagctggtttcaaggatcaagaagtgcaaggcttaagtatgacatctggagcgttggagttgtcatgctagagttgatgatgggttctccccatgtttttcagataagtgaccgtacacgtattttattggatcggcatctcggagggtggagtgaacaaacaaaggagcttgcatacaactttccttggtttcctgttctgat

SEQ ID NO: 23354 - DNA, 1674 bp, Zea Mays
ggcacaagcacaagtcacaacgccctagagtagaggctgagctgcatatatcaccgagcaccctctctctctctgttcccctccctcgctcgacatggaggtcgccgccgccacttgtacgctccttgctgccgtcgccctaccagtttcgtcctcagcagcagcagcacgctctgcgacgaaacagagctactcgaggaggaagacgacggccgtgcgagccgtcatggcgaggccgcatcaggtgccgccgcctgccactgccaccgccaccgccaccacgtaccgcgacaactggttcgacaagctggccatcgggtacctgtcccggaaccttcaagaagcttctgggatgaagaacggaaaggacggctacgagggcctgatagaggcggccctggccatctccgcgctgttcagggttgaccagcagtgggacactgtggccagcgctctccaacgggccttccccagctacatcctcaccatggcaaatatatatatacacacacacttgattttaacatatacacatgctgcctgcgagcaaagctattgcaaaacaagattataaaaataaataaaactctttcgtcacgaaaggaaaaaagaaaaaaagaaaagaaagaaagcctacacattaaagtagggtcaggggttctttgaatataataaaaaggtggattttggttgcgtttttatttccttacctgactgttgcatgcatatgcagatcaaggtgatgatgccaccctctcgattctcgcgggagtatttcgccgccttcaccacggtgttcttcccttggctcgtcggaccatgtgaggtcagggaatcccaagtggatggaagggaagagaggaacgtggtctacatacccaaatgcagatttctggaaagcaccaactgtgtcggaatgtgcacgaacctctgcaaaatcccatgccagaggttcatccaggattcacttggcacggctgtctacatgtctcccaattttgaggacatgagctgcgagatgatctttggacagcaaccacctgaagatgatccagcactgaagcagccctgcttccggacaaaatgcatcgcaaagcagaatcatcaagtgaattgctctatttgatttgagaggaagtggatatgtaaattactatactactatcagtggaaattcccaaaattacatgctttcatgtttattcccttagtaagcagcatcagtttcatagattctttttacttgaaaacatagcagaaggcaattctagtatacgtcaaattgttaggaaactggttgctgatcaagaggattgaagaggaaacacaagatatgcctttggaaaatgcacaggattttagtgaatcccttgtaagaaagatatattaaagaagtgtgaagaatggaattacccataccagaaagtttcatgttaattgaggaaactaaactagataagaaaagtaggctagaccaaataatagatgtaaactaaacaaaagaatatgttttatggtatttttatgtatctcaagctaatggtgcagagatataacgtgctccacctagatggtgaccagtattaatagaggttttaaagtcgtctgactaatcatgattagtcggcctcatcgctagagggagcttgattagggcctccgactcgattagag

SEQ ID NO: 23355 - DNA, 1792 bp, Zea Mays
ctcccagtaagttttttccacacctccgcttggtcttgtccatggaaacgattacccgatcgagagaataacatttaccgagagtaaaactgcttccaagttttggattccaagaaaaaattaatctgctcctgccactgactaaagctgggaggaaaattgaatttttttttcagtggactgtcattcaagccagcaaaacattaactgaaacttcccttggtcacaagcctaattactctgtagctcaacattacacaactcgtcatgctagctctgaaacagaatcttaatgactctgaaagcaacgcaccaagattctcacatggaaaaaataacaatacagaagttagtttcataatgtaaatctatctaatgatcctgccacgcacaccgtctgaactgagacactacgcctttttttgggcatgggaatcacaaggtgccgtttggtggacagaaaagactgaagtggaccaacatgtctgtaggttatagagcaattgcaatcaatctgtacagagaaaatagggtagctcttacttgtaactcttagtggaaaactactagtaacagagacaagtgttgagatggtagtgtctattccaaccattccacaatttagtgcttaccaagtacagtacaagcaccttgactagccagcatgtttcaatgaacaaagcattaatctctcttactccccccccaagcaattatttcgagcgttgactgattcttggcgaatatttcaagcacacaaatcattgtatcaaggtcaaaagatgttgacatttaataacatcggtccaaataattggacaccagtttgtgttggacattactaggcactccttttgtcatgtcaagttgctatcaccgataagtggtaacagccatgaatgttagcttaatggcaccgattatgatctacaggcttatcttcactactttgtccattcttatatattgcaaagcagtgttttaaaccttactaaattatctctgtatctgatccataccaaaaaaaaaaagaggatattagcttatgttctgttctaataagccctttctcagggataatggaacttactgtactatattaccactgttcagattttgaggacatgagctgcgagatgatctttggacagcaaccacctgaagatgatccagcactgaagcagccctgcttccggacaaaatgcatcgcaaagcagaatcatcaagtgaattgctctatttgatttgagaggaagtggatatgtaaattactatactactatcagtggaaattcccaaaattacatgctttcatgtttattcccttagtaagcagcatcagtttcatagattctttttacttgaaaacatagcagaaggcaattctagtatacgtcaaattgttaggaaactggttgctgatcaagaggattgaagaggaaacacaagatatgcctttggaaaatgcacaggattttagtgaatcccttgtaagaaagatatattaaagaagtgtgaagaatggaattacccataccagaaagtttcatgttaattgaggaaactaaactagataagaaaagtaggctagaccaaataatagatgtaaactaaacaaaagaatatgttttatggtatttttatgtatctcaagctaatggtgcagagatataacgtgctccacctagatggtgaccagtattaatagaggttttaaagtcgtctgactaatcatgattagtcggcctcatcgctagagggagcttgattagggcctccgactcgattagag

SEQ ID NO: 23356 - DNA, 247 bp, Zea Mays
gcggtgaggagcggacaccttcctggctcgatgcattgggcccgaggccggaaacgagggcgtcagccgcaggattcatcgttcatgcgcccccagcagcaccggcaccgccaagcagcgtagggccttccacctacaccacgcgcattccagccagcgaagcctgacgaaccccacgtgaagcgctgacgccgatgcatcaaacaaccagcactgttctagtactcatttacgtcgtggtttcgtc

SEQ ID NO: 23357 - DNA, 579 bp, Zea Mays
caagcaaaagactggatttttttccgcggtaacgagcaggttagaagccttgccggagaacggaaatagagcagagccttactccgcctgaccctcggagatggccgtggccgcagacgcggcaagagtgtgggcgaaacggcgaggaggcggcggggcccggcgtgcagcggccgggagggcggaacgatggggcggggttgcggaggagcaggggcggagcgaagcgaggaggatgcggtggcgcaggcctcggctcccgaggcggagcaccgcggccgcagtgagaggggcgagcggcgccgccatcgcgttcgaggtggtgtgaggcagacgccagaggagaggagagggctgcgaggataaccgtttggactcacggcgcccgtccgatctacgaggagcggccagcaaaattcgctgtttcaagactctcggttcatcaggatacacacgttctttagttcgattttttttgtgagcatcatcatctcgataaacaatgcacaaaaaaaactctacaagatctatgtaatgagagacatattccgaagctattttaaagcggatatcatcaaa

SEQ ID NO: 23358 - DNA, 1251 bp, Zea Mays
cgctgagatgctgacccgacccggcgagtcggctactcgctgtctctctctcccaccacaaatattcttcccgccacgatccctctcatccggaagaaaggggggaaaaaactcgcctttttctctctgctggttcaagaacgccatggaaaatctcgagcgctcgctgtgattcctgcgaatacccaagcccaaccaaaccctagcccggcagccattctcttcgttccctctttgctctgcgcgccacaccgcacgacctccccgaagcagacgtgcccgctgcccgtccgtcccccgtggccatggccgcgacgtggtcttcgtcttgctgcgccgcgaccgcgtcgagcagcgctctgcttcgtcatgcccgcgtcaagagcgcgccttgggtagccggtgccagccggagtagctacaggcagcggcggcggcggcgggagctgtccatccgcgccacggccgcggcgccgccgccgcccgtggtctacgcggacgccggcgccgacaacgtggcctcgctgaagatcaagctcctgagcgcggtgtccgggctgaaccgtggcctggcagcgagccaggaggacctggaccgcgcggacgcggcggcgcgggagctggaggcggcggcggggtgccccgtcgacctcagcagggacctcgataagctgcagggccggtggcggctgctgtacagcagcgcgttctcttcgcggacgctcggcggcagccgccctggcccgcccaccggccgcctcctccccatcacgctcggccaggtgttccagcggatcgacgtggtgagccgcgacttcgacaacatcgtggagctggagctcggcgcgccgtggcctctgccgccgctcgaggccacggcgacgctggcgcacaagttcgagatcatcgggacctcgggcatcaagatcacgttcgagaagacgacggtgaagaccaagggcaacctgtcgcagcttcctccgctggaggtgccccgcatcccggacaacctccggccgccgtccaacaccgggagcggcgagttcgaggtgacctacctcgacgacgacacgcgcgtcacccgcggggacaggggggagctcagggtgtttgtcatcgcgtgacctgatcgcgcttgcggcgccgttctgctggtggctctggatatctcctgctctaacagctccacaaaaattgcattcaacacatgcccccctgtttttcgaatgaacatagtgtgtcgaaaaacac

SEQ ID NO: 23359 - DNA, 690 bp, Zea Mays
ataatactttcctttttttaagacgatgacacctatcggccatgttttcagccaataccaatcttgggcccatctcctgtactgaaatcagcccaaacaacatggttccaagaaattgggtgtgctgtggcgaccgggctttccctacgggctggtcatcattttcgggagcgtcgtggctacctccggtgctgcggctagcgcgactaggccagatcgacccagcgcgatgacggctgtgtgcggcgtcctcggacatcgctccgccagctcaaatctccaagcgctcgagctcgaaactcctccaaccggtcatccgctgccagcaatcgacctccatccgcagagcactcaccgaaaggtatatccttccccaaatcgattctacatgtgctattatgtgctcatacggcctgctcacctcagccagtataagaattattagattatacccggctccaactataaggagactctaactccgctactagtttcaaatcttagcacgccccctgccacacgctaggataatactttttcaaatacttaccgttgagtgctttgggtaatttctttccttgcaaatcctcaacgaaatatgcatttccgtgcacaatacctacaactttgaatggtccttcccaattcggcgaccatttgccgaatttattatttttgactcccacgggt

SEQ ID NO: 23360 - DNA, 1301 bp, Zea Mays
cggtattccaaccaaaacttgaacgaaggagaaaaggcagagaaaaaaaaagaagagaagctaagagcttgggagttcagctccaagccgttcgacgagagagacgaccgaacccggccggaaggggaggagcgggaggaccgcctgcgccgtcggtgagctgcaagttaggctttcaaagaatgtggaggagtgtgtggactttgcgccagagggaggtaaggtggtggtgagtgctactccaaaaggccactccgatggaagtcatggtgttgagcttcctgttgctctgcaggcattggagattattgatgccctagactatgggatggcaaaaattgcagattcgatgatgaagcatattctggttccagcaatcagtaacatacatgtgtcagtgcttgtggaatgtggtccagaacacactgtatcagtcttgagtgtagtccattccgaggaaaacaaagacaatagagatggttcaaatctgtactcaagaatagttgatgtcatcaagtttgtgtgcaaattcatctgcatggaaaatagcaagtgggttcaattttttgcgaagttaacctggccaagaatttctgatctagttatcacacactttctctccaaggctgtaccaaatgaggcatccaagctaattgagttccaagatgtcgtgcaaagtacaactgaattcgagaacaaacttaggagcatgatgtttcttttgcctgatagaaaggatggcaagctgacccaatttgttgatgatgttgaagttcattttgctgtacggaagagaagtgaaatcttggtgaaagcaaggaacattcttgtacaatatgattatgatagtcctctggaatctggtgaccaaggtgattctgttgttgatctactttttcagccagagaagtgttttacatctaaatcagcacttctagtaatgaaattggttcatggagccctcaaggatgcatctttgtcatcagcaagagtagctaaggagttctgctttgctgctagggatgttttgctcctttatagggctattgtgccggttcagtaccgtgcagattttcctagtgatctacagaaacaggttgtttttgtggatttagccccaatcttctcccagatggcggatgctatattgagaagacaaatacaactcactgttgatactataagtgaggctatagatggtgctgaaggttttcagaacacacaccaacctcagcattatgaatccgcaaaatttagtattgagcaggtctgttccactgttaaagagtatgagctttttg

SEQ ID NO: 23361 - DNA, 1908 bp, Zea Mays
ttccaaccaaaacttgaacgaaggagaaaaggcagagaaaaaaaaagaagagaagctaagagcttgggagttcagctccaagccgttcgacgagagagacgaccgaacccggccggaaggggaggagcgggaggaccgcctgcgccgtcggtgagcgcagttgctcaagtcagcaaactgaacccgtccggattcgtgcgccgccgagcacccctcgacgccagcggcgatggcagccgacgacgtgcgcgagctcctcctctccaccacagccgacgcctctgacccgtccacgcccctctcagcgcccgacctccgcctcctcatcgaccgcctacgcttttgctccgaccgcctgaacgcctcggccctctccttcgctgcctctaaccgcggggtcctcgctaatgctctcctccgcgcagcctccgccgccgattcctccgcctccctcgagtcttccctcgactccgcgcttgccccgctcgcctcctggcccgacctctccgacctcagggcccttgccgaccgcctcctcgctgcccgccgcgagctcgctgagcgccaggagcacctagccgctgcctccatgattgcctcgctttcctcccgcctccgcgaggcccgtgccgcagcgagcccccttgacgcggccgctgccatcgctgaactcaagaccctcctgatcgatctcgagcgatctggatctggtcaagacgacccggtcgtatttaggctcctcaggagcgactgggagcaacttgtcgatgagctgcaagttaggctttcaaagaatgtggaggagtgtgtggactttgcgccagagggaggtaaggtggtggtgagtgctactccaaaaggccactccgatggaagtcatggtgttgagcttcctgttgctctgcaggcattggagattattgatgccctagactatgggatggcaaaaattgcagattcgatgatgaagcatattctggttccagcaatcagtaacatacatgtgtcagtgcttgtggaatgtggtccagaacacactgtatcagtcttgagtgtagtccattccgaggaaaacaaagacaatagagatggttcaaatctgtactcaagaatagttgatgtcatcaagtttgtgtgcaaattcatctgcatggaaaatagcaagtgggttcaattttttgcgaagttaacctggccaagaatttctgatctagttatcacacactttctctccaaggctgtaccaaatgaggcatccaagctaattgagttccaagatgtcgtgcaaagtacaactgaattcgagaacaaacttaggagcatgatgtttcttttgcctgatagaaaggatggcaagctgacccaatttgttgatgatgttgaagttcattttgctgtacggaagagaagtgaaatcttggtgaaagcaaggaacattcttgtacaatatgattatgatagtcctctggaatctggtgaccaaggtgattctgttgttgatctactttttcagccagagaagtgttttacatctaaatcagcacttctagtaatgaaattggttcatggagccctcaaggatgcatctttgtcatcagcaagagtagctaaggagttctgctttgctgctagggatgttttgctcctttatagggctattgtgccggttcagtaccgtgcagattttcctagtgatctacagaaacaggttgtttttgtggatttagccccaatcttctcccagatggcggatgctatattgagaagacaaatacaactcactgttgatactataagctatagatggtgctgaaggttttcagaacacacaccaacctcagcattatgaatccgcaaaatttagtattgagcaggtctgttccactgttaaagagtatgagctttttg

SEQ ID NO: 23362 - DNA, 907 bp, Zea Mays
caaaacttgaacgaaggagaaaaggcagagaaaaaaaaagaagagaagctaagagcttgggagttcagctccaagccgttcgacgagagagacgaccgaacccggccggaaggggaggagcgggaggaccgcctgcgccgtcggtgagattattgatgccctagactatgggatggcaaaaattgcagattcgatgatgaagcatattctggttccagcaatcagtaacatacatgtgtcagtgcttgtggaatgtggtccagaacacactgtatcagtcttgagtgtagtccattccgaggaaaacaaagacaatagagatggttcaaatctgtactcaagaatagttgatgtcatcaagtttgtgtgcaaattcatctgcatggaaaatagcaagtgggttcaattttttgcgaagttaacctggccaagaatttctgatctagttatcacacactttctctccaaggctgtaccaaatgaggcatccaagctaattgagttccaagatgtcgtgcaaagtacaactgaattcgagaacaaacttaggagcatgatgtttcttttgcctgatagaaaggatggcaagctgacccaatttgttgatgatgttgaagttcattttgctgtacggaagagaagtgaaatcttggtgaaagcaaggaacattcttgtacaatatgattatgatagtcctctggaatctggtgaccaaggtgattctgttgttgatctactttttcagccagagaagtgttttacatctaaatcagcacttctagtaatgaaattggttcatggagccctcaagctagagaagcaatttgatagcttaagtcaagtggctgctattgttcacaatgacttttaccatttgtcccaagaaattctgggccttgcatttcag

SEQ ID NO: 23363 - DNA, 1854 bp, Zea Mays
caaaacttgaacgaaggagaaaaggcagagaaaaaaaaagaagagaagctaagagcttgggagttcagctccaagccgttcgacgagagagacgaccgaacccggccggaaggggaggagcgggaggaccgcctgcgccgtcggtgagcgcagttgctcaagtcagcaaactgaacccgtccggattcgtgcgccgccgagcacccctcgacgccagcggcgatggcagccgacgacgtgcgcgagctcctcctctccaccacagccgacgcctctgacccgtccacgcccctctcagcgcccgacctccgcctcctcatcgaccgcctacgcttttgctccgaccgcctgaacgcctcggccctctccttcgctgcctctaaccgcggggtcctcgctaatgctctcctccgcgcagcctccgccgccgattcctccgcctccctcgagtcttccctcgactccgcgcttgccccgctcgcctcctggcccgacctctccgacctcagggcccttgccgaccgcctcctcgctgcccgccgcgagctcgctgagcgccaggagcacctagccgctgcctccatgattgcctcgctttcctcccgcctccgcgaggcccgtgccgcagcgagcccccttgacgcggccgctgccatcgctgaactcaagaccctcctgatcgatctcgagcgatctggatctggtcaagacgacccggtcgtatttaggctcctcaggagcgactgggagcaacttgtcgatgaggtgatgatgaaattccgctttagaatgattcagcttatgtcagggtttgcatttgtgctaatgctaattgttgttgggttgtggttatgatggtgatacagctgcaagttaggctttcaaagaatgtggaggagtgtgtggactttgcgccagagggaggtaaggtggtggtgagtgctactccaaaaggccactccgatggaagtcatggtgttgagcttcctgttgctctgcaggcattggagattattgatgccctagactatgggatggcaaaaattgcagattcgatgatgaagcatattctggttccagcaatcagtaacatacatgtgtcagtgcttgtggaatgtggtccagaacacactgtatcagtcttgagtgtagtccattccgaggaaaacaaaagatggttcaaatctgtactcaagaatagttgatgtcatcaagtttgtgtgcaaattcatctgcatggaaaatagcaagtgggttcaattttttgcgaagttaacctggccaagaatttctgatctagttatcacacactttctctccaaggctgtaccaaatgaggcatccaagctaattgagttccaagatgtcgtgcaaagtacaactgaattcgagaacaaacttaggagcatgatgtttcttttgcctgatagaaaggatggcaagctgacccaatttgttgatgatgttgaagttcattttgctgtacggaagagaagtgaaatcttggtgaaagcaaggaacattcttgtacaatatgattatgatagtcctctggaatctggtgaccaaggtgattctgttgttgatctactttttcagccagagaagtgttttacatctaaatcagcacttctagtaatgaaattggttcatggagccctcaaggatgcatctttgtcatcagcaagagtagctaaggagttctgctttgctgctagggatgttttgctcctttatagggctattgtgccggttcagctagagaagcaatttgatagcttaagtcaagtggctgctattgttcacaatgacttttaccatttgtcccaagaaattctgggccttgcatttcag

SEQ ID NO: 23364 - DNA, 1992 bp, Zea Mays
caaaacttgaacgaaggagaaaaggcagagaaaaaaaaagaagagaagctaagagcttgggagttcagctccaagccgttcgacgagagagacgaccgaacccggccggaaggggaggagcgggaggaccgcctgcgccgtcggtgagcgcagttgctcaagtcagcaaactgaacccgtccggattcgtgcgccgccgagcacccctcgacgccagcggcgatggcagccgacgacgtgcgcgagctcctcctctccaccacagccgacgcctctgacccgtccacgcccctctcagcgcccgacctccgcctcctcatcgaccgcctacgcttttgctccgaccgcctgaacgcctcggccctctccttcgctgcctctaaccgcggggtcctcgctaatgctctcctccgcgcagcctccgccgccgattcctccgcctccctcgagtcttccctcgactccgcgcttgccccgctcgcctcctggcccgacctctccgacctcagggcccttgccgaccgcctcctcgctgcccgccgcgagctcgctgagcgccaggagcacctagccgctgcctccatgattgcctcgctttcctcccgcctccgcgaggcccgtgccgcagcgagcccccttgacgcggccgctgccatcgctgaactcaagaccctcctgatcgatctcgagcgatctggatctggtcaagacgacccggtcgtatttaggctcctcaggagcgactgggagcaacttgtcgatgagctgcaagttaggctttcaaagaatgtggaggagtgtgtggactttgcgccagagggaggtaaggtggtggtgagtgctactccaaaaggccactccgatggaagtcatggtgttgagcttcctgttgctctgcaggcattggagattattgatgccctagactatgggatggcaaaaattgcagattcgatgatgaagcatattctggttccagcaatcagtaacatacatgtgtcagtgcttgtggaatgtggtccagaacacactgtatcagtcttgagtgtagtccattccgaggaaaacaaagacaatagagatggttcaaatctgtactcaagaatagttgatgtcatcaagtttgtgtgcaaattcatctgcatggaaaatagcaagtgggttcaattttttgcgaagttaacctggccaagaatttctgatctagttatcacacactttctctccaaggctgtaccaaatgaggcatccaagctaattgagttccaagatgtcgtgcaaagtacaactgaattcgagaacaaacttaggagcatgatgtttcttttgcctgatagaaaggatggcaagctgacccaatttgttgatgatgttgaagttcattttgctgtacggaagagaagtgaaatcttggtgaaagcaaggaacattcttgtacaatatgattatgatagtcctctggaatctggtgaccaaggtgattctgttgttgatctactttttcagccagagaagtgttttacatctaaatcagcacttctagtaatgaaattggttcatggagccctcaaggatgcatctttgtcatcagcaagagtagctaaggagttctgctttgctgctagggatgttttgctcctttatagggctattgtgccggttcagctagagaagcaatttgatagcttaagtcaagtggctgctattgttcacaatgacttttaccatttgtcccaagaaattctgggccttgcatttcagattttcctagtgatctacagaaacaggttgtttttgtggatttagccccaatcttctcccagatggcggatgctatattgagaagacaaatacaactcactgttgatactataagtgaggctatagatggtgctgaaggttttcagaacacacaccaacctcagcattatgaatccgcaaaatttagtattgagcaggtctgttccactgttaaagagtatgagctttttg

SEQ ID NO: 23365 - DNA, 1901 bp, Zea Mays
caaaacttgaacgaaggagaaaaggcagagaaaaaaaaagaagagaagctaagagcttgggagttcagctccaagccgttcgacgagagagacgaccgaacccggccggaaggggaggagcgggaggaccgcctgcgccgtcggtgagttgctcaagtcagcaaactgaacccgtccggattcgtgcgccgccgagcacccctcgacgccagcggcgatggcagccgacgacgtgcgcgagctcctcctctccaccacagccgacgcctctgacccgtccacgcccctctcagcgcccgacctccgcctcctcatcgaccgcctacgcttttgctccgaccgcctgaacgcctcggccctctccttcgctgcctctaaccgcggggtcctcgctaatgctctcctccgcgcagcctccgccgccgattcctccgcctccctcgagtcttccctcgactccgcgcttgccccgctcgcctcctggcccgacctctccgacctcagggcccttgccgaccgcctcctcgctgcccgccgcgagctcgctgagcgccaggagcacctagccgctgcctccatgattgcctcgctttcctcccgcctccgcgaggcccgtgccgcagcgagcccccttgacgcggccgctgccatcgctgaactcaagaccctcctgatcgatctcgagcgatctggatctggtcaagacgacccggtcgtatttaggctcctcaggagcgactgggagcaacttgtcgatgagctgcaagttaggctttcaaagaatgtggaggagtgtgtggactttgcgccagagggaggtaaggtggtggtgagtgctactccaaaaggccactccgatggaagtcatggtgttgagcttcctgttgctctgcaggcattggagattattgatgccctagactatgggatggcaaaaattgcagattcgatgatgaagcatattctggttccagcaatcagtaacatacatgtgtcagtgcttgtggaatgtggtccagaacacactgtatcagtcttgagtgtagtccattccgaggaaaacaaagacaatagagatggttcaaatctgtactcaagaatagttgatgtcatcaagtttgtgtgcaaattcatctgcatggaaaatagcaagtgggttcaattttttgcgaagttaacctggccaagaatttctgatctagttatcacacactttctctccaaggctgtaccaaatgaggcatccaagctaattgagttccaagatgtcgtgcaaagtacaactgaattcgagaacaaacttaggagcatgatgtttcttttgcctgatagaaaggatggcaagctgacccaatttgttgatgatgttgaagttcattttgctgtacggaagagaagtgaaatcttggtgaaagcaaggaacattcttgtacaatatgattatgatagtcctctggaatctggtgaccaaggtgattctgttgttgatctactttttcagccagagaagtgttttacatctaaatcagcacttctagtaatgaaattggttcatggagccctcaaggatgcatctttgtcatcagcaagagtagctaaggagttctgctttgctgctagggatgttttgctcctttatagggctattgtgccggttcagtaccgtgcagattttcctagtgatctacagaaacaggttgtttttgtggatttagccccaatcttctcccagatggcggatgctatattgagaagacaaatacaactcactgttgatactataagtgaggctatagatggtgctgaaggttttcagaacacacaccaacctcagcattatgaatccgcaaaatttagtattgagcaggtctgttccactgttaaagagtatgagctttttg

SEQ ID NO: 23366 - DNA, 2892 bp, Zea Mays
caaaacttgaacgaaggagaaaaggcagagaaaaaaaaagaagagaagctaagagcttgggagttcagctccaagccgttcgacgagagagacgaccgaacccggccggaaggggaggagcgggaggaccgcctgcgccgtcggtgagcgcagttgctcaagtcagcaaactgaacccgtccggattcgtgcgccgccgagcacccctcgacgccagcggcgatggcagccgacgacgtgcgcgagctcctcctctccaccacagccgacgcctctgacccgtccacgcccctctcagcgcccgacctccgcctcctcatcgaccgcctacgcttttgctccgaccgcctgaacgcctcggccctctccttcgctgcctctaaccgcggggtcctcgctaatgctctcctccgcgcagcctccgccgccgattcctccgcctccctcgagtcttccctcgactccgcgcttgccccgctcgcctcctggcccgacctctccgacctcagggcccttgccgaccgcctcctcgctgcccgccgcgagctcgctgagcgccaggagcacctagccgctgcctccatgattgcctcgctttcctcccgcctccgcgaggcccgtgccgcagcgagcccccttgacgcggccgctgccatcgctgaactcaagaccctcctgatcgatctcgagcgatctggatctggtcaagacgacccggtcgtatttaggctcctcaggagcgactgggagcaacttgtcgatgagctgcaagttaggctttcaaagaatgtggaggagtgtgtggactttgcgccagagggaggtaaggtggtggtgagtgctactccaaaaggccactccgatggaagtcatggtgttgagcttcctgttgctctgcaggcattggagattattgatgccctagactatgggatggcaaaaattgcagattcgatgatgaagcatattctggttccagcaatcagtaacatacatgtgtcagtgcttgtggaatgtggtccagaacacactgtatcagtcttgagtgtagtccattccgaggaaaacaaagacaatagagatggttcaaatctgtactcaagaatagttgatgtcatcaagtttgtgtgcaaattcatctgcatggaaaatagcaagtgggttcaattttttgcgaagttaacctggccaagaatttctgatctagttatcacacactttctctccaaggctgtaccaaatgaggcatccaagctaattgagttccaagatgtcgtgcaaagtacaactgaattcgagaacaaacttaggagcatgatgtttcttttgcctgatagaaaggatggcaagctgacccaatttgttgatgatgttgaagttcattttgctgtacggaagagaagtgaaatcttggtgaaagcaaggaacattcttgtacaatatgattatgatagtcctctggaatctggtgaccaaggtgattctgttgttgatctactttttcagccagagaagtgttttacatctaaatcagcacttctagtaatgaaattggttcatggagccctcaaggatgcatctttgtcatcagcaagagtagctaaggagttctgctttgctgctagggatgttttgctcctttatagggctattgtgccggttcagctagagaagcaatttgatagcttaagtcaagtggctgctattgttcacaatgacttttaccatttgtcccaagaaattctgggccttgcatttcaggtgtgcatgcccaacttgttgctgcttgttatcattattgatcatgagttttgcttatgcatgttagtgtgttcttgcttaaaaatgcagatatgtcatatgtacaaactatttattctttatcttccatgtattaaattgtgttgtattgttatcctatactctatatagcattgaaattcgtttcattttgggtttggtactagggaatgccttaggatttgcactggaggaagccctgtttgtttcagtcggataatagtgcttttagcttttataatccctagatgaaacaaacagccagcttccgaccgtagattccagaatacaggaattttactggattgtagcacacctgacctgattgtccgttccactccccttcctgtgctaccacctcactttctgcagccaacaccaataaaatttcttatcggccatgttgtctgagctcatgtactgccttcagcggtccagccccacccatcatgctggtgcacttgctgccacctaccaccactgcccacagggggactttgtgaaaacccaagacaaccttaactcaccaagttgtggctggctgttgtgttcaagttctactaatgcgttctgtggcgatgggacaacattattgtgataatttagagtgtttactttctcataaaaactagtatggacatgaaaaaaaatctatgcctctatgtcctggattgatcttgtttagtgtttacttccaacaaaacaaaaagaatcaacctcatgctgctgtaatttttcctctcgggcaaccaaatcaaatagcactttttaagagagatttttcttaagatattttatgtgttttcaaaatgcaatgttttctgctaacctttctggatgcttttttccagtaccgtgcagattttcctagtgatctacagaaacaggttgtttttgtggatttagccccaatcttctcccagatggcggatgctatattgagaagacaaatacaactcactgttgatactataagtgaggctatagatggtgctgaaggttttcagaacacacaccaacctcagcattatgaatccgcaaaatttagtattgagcaggtctgttccactgttaaagagtatgagctttttg

SEQ ID NO: 23367 - DNA, 1906 bp, Zea Mays
caaaacttgaacgaaggagaaaaggcagagaaaaaaaaagaagagaagctaagagcttgggagttcagctccaagccgttcgacgagagagacgaccgaacccggccggaaggggaggagcgggaggaccgcctgcgccgtcggtgagcgcagttgctcaagtcagcaaactgaacccgtccggattcgtgcgccgccgagcacccctcgacgccagcggcgatggcagccgacgacgtgcgcgagctcctcctctccaccacagccgacgcctctgacccgtccacgcccctctcagcgcccgacctccgcctcctcatcgaccgcctacgcttttgctccgaccgcctgaacgcctcggccctctccttcgctgcctctaaccgcggggtcctcgctaatgctctcctccgcgcagcctccgccgccgattcctccgcctccctcgagtcttccctcgactccgcgcttgccccgctcgcctcctggcccgacctctccgacctcagggcccttgccgaccgcctcctcgctgcccgccgcgagctcgctgagcgccaggagcacctagccgctgcctccatgattgcctcgctttcctcccgcctccgcgaggcccgtgccgcagcgagcccccttgacgcggccgctgccatcgctgaactcaagaccctcctgatcgatctcgagcgatctggatctggtcaagacgacccggtcgtatttaggctcctcaggagcgactgggagcaacttgtcgatgagctgcaagttaggctttcaaagaatgtggaggagtgtgtggactttgcgccagagggaggtaaggtggtggtgagtgctactccaaaaggccactccgatggaagtcatggtgttgagcttcctgttgctctgcaggcattggagattattgatgccctagactatgggatggcaaaaattgcagattcgatgatgaagcatattctggttccagcaatcagtaacatacatgtgtcagtgcttgtggaatgtggtccagaacacactgtatcagtcttgagtgtagtccattccgaggaaaacaaagacaatagagatggttcaaatctgtactcaagaatagttgatgtcatcaagtttgtgtgcaaattcatctgcatggaaaatagcaagtgggttcaattttttgcgaagttaacctggccaagaatttctgatctagttatcacacactttctctccaaggctgtaccaaatgaggcatccaagctaattgagttccaagatgtcgtgcaaagtacaactgaattcgagaacaaacttaggagcatgatgtttcttttgcctgatagaaaggatggcaagctgacccaatttgttgatgatgttgaagttcattttgctgtacggaagagaagtgaaatcttggtgaaagcaaggaacattcttgtacaatatgattatgatagtcctctggaatctggtgaccaaggtgattctgttgttgatctactttttcagccagagaagtgttttacatctaaatcagcacttctagtaatgaaattggttcatggagccctcaaggatgcatctttgtcatcagcaagagtagctaaggagttctgctttgctgctagggatgttttgctcctttatagggctattgtgccggttcagtaccgtgcagattttcctagtgatctacagaaacaggttgtttttgtggatttagccccaatcttctcccagatggcggatgctatattgagaagacaaatacaactcactgttgatactataagtgaggctatagatggtgctgaaggttttcagaacacacaccaacctcagcattatgaatccgcaaaatttagtattgagcaggtctgttccactgttaaagagtatgagctttttg

SEQ ID NO: 23368 - DNA, 1052 bp, Zea Mays
caaaacttgaacgaaggagaaaaggcagagaaaaaaaaagaagagaagctaagagcttgggagttcagctccaagccgttcgacgagagagacgaccgaacccggccggaaggggaggagcgggaggaccgcctgcgccgtcggtgagattattgatgccctagactatgggatggcaaaaattgcagattcgatgatgaagcatattctggttccagcaatcagtaacatacatgtgtcagtgcttgtggaatgtggtccagaacacactgtatcagtcttgagtgtagtccattccgaggaaaacaaagacaatagagatggttcaaatctgtactcaagaatagttgatgtcatcaagtttgtgtgcaaattcatctgcatggaaaatagcaagtgggttcaattttttgcgaagttaacctggccaagaatttctgatctagttatcacacactttctctccaaggctgtaccaaatgaggcatccaagctaattgagttccaagatgtcgtgcaaagtacaactgaattcgagaacaaacttaggagcatgatgtttcttttgcctgatagaaaggatggcaagctgacccaatttgttgatgatgttgaagttcattttgctgtacggaagagaagtgaaatcttggtgaaagcaaggaacattcttgtacaatatgattatgatagtcctctggaatctggtgaccaaggtgattctgttgttgatctactttttcagccagagaagtgttttacatctaaatcagcacttctagtaatgaaattggttcatggagccctcaagtaccgtgcagattttcctagtgatctacagaaacaggttgtttttgtggatttagccccaatcttctcccagatggcggatgctatattgagaagacaaatacaactcactgttgatactataagtgaggctatagatggtgctgaaggttttcagaacacacaccaacctcagcattatgaatccgcaaaatttagtattgagcaggtctgttccactgttaaagagtatgagctttttg

SEQ ID NO: 23369 - DNA, 2275 bp, Zea Mays
caaaacttgaacgaaggagaaaaggcagagaaaaaaaaagaagagaagctaagagcttgggagttcagctccaagccgttcgacgagagagacgaccgaacccggccggaaggggaggagcgggaggaccgcctgcgccgtcggtgagctgcaagttaggctttcaaagaatgtggaggagtgtgtggactttgcgccagagggaggtaaggtggtggtgagtgctactccaaaaggccactccgatggaagtcatggtgttgagcttcctgttgctctgcaggcattggagattattgatgccctagactatgggatggcaaaaattgcagattcgatgatgaagcatattctggttccagcaatcagtaacatacatgtgtcagtgcttgtggaatgtggtccagaacacactgtatcagtcttgagtgtagtccattccgaggaaaacaaagacaatagagatggttcaaatctgtactcaagaatagttgatgtcatcaagtttgtgtgcaaattcatctgcatggaaaatagcaagtgggttcaattttttgcgaagttaacctggccaagaatttctgatctagttatcacacactttctctccaaggctgtaccaaatgaggcatccaagctaattgagttccaagatgtcgtgcaaagtacaactgaattcgagaacaaacttaggagcatgatgtttcttttgcctgatagaaaggatggcaagctgacccaatttgttgatgatgttgaagttcattttgctgtacggaagagaagtgaaatcttggtgaaagcaaggaacattcttgtacaatatgattatgatagtcctctggaatctggtgaccaaggtgattctgttgttgatctactttttcagccagagaagtgttttacatctaaatcagcacttctagtaatgaaattggttcatggagccctcaaggatgcatctttgtcatcagcaagagtagctaaggagttctgctttgctgctagggatgttttgctcctttatagggctattgtgccggttcagctagagaagcaatttgatagcttaagtcaagtggctgctattgttcacaatgacttttaccatttgtcccaagaaattctgggccttgcatttcaggtgtgcatgcccaacttgttgctgcttgttatcattattgatcatgagttttgcttatgcatgttagtgtgttcttgcttaaaaatgcagatatgtcatatgtacaaactatttattctttatcttccatgtattaaattgtgttgtattgttatcctatactctatatagcattgaaattcgtttcattttgggtttggtactagggaatgccttaggatttgcactggaggaagccctgtttgtttcagtcggataatagtgcttttagcttttataatccctagatgaaacaaacagccagcttccgaccgtagattccagaatacaggaattttactggattgtagcacacctgacctgattgtccgttccactccccttcctgtgctaccacctcactttctgcagccaacaccaataaaatttcttatcggccatgttgtctgagctcatgtactgccttcagcggtccagccccacccatcatgctggtgcacttgctgccacctaccaccactgcccacagggggactttgtgaaaacccaagacaaccttaactcaccaagttgtggctggctgttgtgttcaagttctactaatgcgttctgtggcgatgggacaacattattgtgataatttagagtgtttactttctcataaaaactagtatggacatgaaaaaaaatctatgcctctatgtcctggattgatcttgtttagtgtttacttccaacaaaacaaaaagaatcaacctcatgctgctgtaatttttcctctcgggcaaccaaatcaaatagcactttttaagagagatttttcttaagatattttatgtgttttcaaaatgcaatgttttctgctaacctttctggatgcttttttccagtaccgtgcagattttcctagtgatctacagaaacaggttgtttttgtggatttagccccaatcttctcccagatggcggatgctatattgagaagacaaatacaactcactgttgatactataagtgaggctatagatggtgctgaaggttttcagaacacacaccaacctcagcattatgaatccgcaaaatttagtattgagcaggtctgttccactgttaaagagtatgagctttttg

SEQ ID NO: 23370 - DNA, 1191 bp, Zea Mays
caaaacttgaacgaaggagaaaaggcagagaaaaaaaaagaagagaagctaagagcttgggagttcagctccaagccgttcgacgagagagacgaccgaacccggccggaaggggaggagcgggaggaccgcctgcgccgtcggtgagctgcaagttaggctttcaaagaatgtggaggagtgtgtggactttgcgccagagggaggtaaggtggtggtgagtgctactccaaaaggccactccgatggaagtcatggtgttgagcttcctgttgctctgcaggcattggagattattgatgccctagactatgggatggcaaaaattgcagattcgatgatgaagcatattctggttccagcaatcagtaacatacatgtgtcagtgcttgtggaatgtggtccagaacacactgtatcagtcttgagtgtagtccattccgaggaaaacaaagacaatagagatggttcaaatctgtactcaagaatagttgatgtcatcaagtttgtgtgcaaattcatctgcatggaaaatagcaagtgggttcaattttttgcgaagttaacctggccaagaatttctgatctagttatcacacactttctctccaaggctgtaccaaatgaggcatccaagctaattgagttccaagatgtcgtgcaaagtacaactgaattcgagaacaaacttaggagcatgatgtttcttttgcctgatagaaaggatggcaagctgacccaatttgttgatgatgttgaagttcattttgctgtacggaagagaagtgaaatcttggtgaaagcaaggaacattcttgtacaatatgattatgatagtcctctggaatctggtgaccaaggtgattctgttgttgatctactttttcagccagagaagtgttttacatctaaatcagcacttctagtaatgaaattggttcatggagccctcaagtaccgtgcagattttcctagtgatctacagaaacaggttgtttttgtggatttagccccaatcttctcccagatggcggatgctatattgagaagacaaatacaactcactgttgatactataagctatagatggtgctgaaggttttcagaacacacaccaacctcagcattatgaatccgcaaaatttagtattgagcaggtctgttccactgttaaagagtatgagctttttg

SEQ ID NO: 23371 - DNA, 1853 bp, Zea Mays
ctcgttggccagaagctctcctctgttcttcacttgtgcggttgtgcccagcatgagcctcctcgttggcttcctatgaggccagattgagccaacgcagttgctcaagtcagcaaactgaacccgtccggattcgtgcgccgccgagcacccctcgacgccagcggcgatggcagccgacgacgtgcgcgagctcctcctctccaccacagccgacgcctctgacccgtccacgcccctctcagcgcccgacctccgcctcctcatcgaccgcctacgcttttgctccgaccgcctgaacgcctcggccctctccttcgctgcctctaaccgcggggtcctcgctaatgctctcctccgcgcagcctccgccgccgattcctccgcctccctcgagtcttccctcgactccgcgcttgccccgctcgcctcctggcccgacctctccgacctcagggcccttgccgaccgcctcctcgctgcccgccgcgagctcgctgagcgccaggagcacctagccgctgcctccatgattgcctcgctttcctcccgcctccgcgaggcccgtgccgcagcgagcccccttgacgcggccgctgccatcgctgaactcaagaccctcctgatcgatctcgagcgatctggatctggtcaagacgacccggtcgtatttaggctcctcaggagcgactgggagcaacttgtcgatgagctgcaagttaggctttcaaagaatgtggaggagtgtgtggactttgcgccagagggaggtaaggtggtggtgagtgctactccaaaaggccactccgatggaagtcatggtgttgagcttcctgttgctctgcaggcattggagattattgatgccctagactatgggatggcaaaaattgcagattcgatgatgaagcatattctggttccagcaatcagtaacatacatgtgtcagtgcttgtggaatgtggtccagaacacactgtatcagtcttgagtgtagtccattccgaggaaaacaaagacaatagagatggttcaaatctgtactcaagaatagttgatgtcatcaagtttgtgtgcaaattcatctgcatggaaaatagcaagtgggttcaattttttgcgaagttaacctggccaagaatttctgatctagttatcacacactttctctccaaggctgtaccaaatgaggcatccaagctaattgagttccaagatgtcgtgcaaagtacaactgaattcgagaacaaacttaggagcatgatgtttcttttgcctgatagaaaggatggcaagctgacccaatttgttgatgatgttgaagttcattttgctgtacggaagagaagtgaaatcttggtgaaagcaaggaacattcttgtacaatatgattatgatagtcctctggaatctggtgaccaaggtgattctgttgttgatctactttttcagccagagaagtgttttacatctaaatcagcacttctagtaatgaaattggttcatggagccctcaaggatgcatctttgtcatcagcaagagtagctaaggagttctgctttgctgctagggatgttttgctcctttatagggctattgtgccggttcagtaccgtgcagattttcctagtgatctacagaaacaggttgtttttgtggatttagccccaatcttctcccagatggcggatgctatattgagaagacaaatacaactcactgttgatactataagtgaggctatagatggtgctgaaggttttcagaacacacaccaacctcagcattatgaatccgcaaaatttagtattgagcaggtctgttccactgttaaagagtatgagctttttg

SEQ ID NO: 23372 - DNA, 510 bp, Zea Mays
ggcgtcttctcctctgctgccgtgccttcgccggcggctgtccagtaccgcttgacagcgaagagcaccttctcaggacctcgacgtcgtcgcggaggatcacggttccctctgggcgcaggatccgatccatctccagcaggatgtcctccattctgcacctgcaccgtgttcaggtaccattttgtcagtcccactcccacacacgccacaacttgcaccgttcggcatggtattacatctaggcaatacaaagaaagatgagcagcagattttgagtcacctgtccttgtagagagtgaagatgccattggcatgtatgaggtcgtatgttcttggataagttgagaatgcctcacacctgaagaagagaagcagagcaagaagcgcatgaaccaagaagttaactattcaggacaaggatttccagcatgattcagggcacggagacggcaggagaaggaaatgtgctctgaacctaccagtcgtggtatatgccgatgagccccc

SEQ ID NO: 23373 - DNA, 2029 bp, Zea Mays
aacagcaaacccatgaataatagatatttaaccaaaaaaggacataatagcgtacatatgccgacaacatactaaagatacaaaagcaagaggatgcttgtttcctttgcagcacttttaaaatgccaaaagaggtgttcagttcaggtagggtttctaagattgcatcatcaaaataaaaatcagaggatgcttgttcccttttgctttttccccttttattcatccatactaaaccacaaaaagaaaagttaacaatttaaagatgcatggcttcagtatccaagtatccttcaatagactaacatttcagatgtgtttatagctaaactgtagataattcatcaacacagagaagaacatgatcaaatctagttcttgatgaagcaggccaaagatttttttaaaaaaaagaccatccgaagattgtgggaagcacatatgccgacatggaaaagcttaagttgacattatctcagctaagttttaacttgatacattatttagcggggaaaggaacagcaggacagtcaataaaacatttttcctggacaagtgcctttctttatgacaacttttatgtatgtccagattggatggatgcagggttttcaactctgtctcgttcgccctctcacatataagttgttaactcatacggaagtagccatcaactaattaataagtaggaagaagtaggacactgctacagactaaacgttgcagcatttagccatgaatttgcttcacggtggattaaaagaaaatctccaaatgctttcactggcaggtcaaatagaagtaaaactggggtctggggcagcacattagtagcagagttgttttccaaaggatgaaactaaatagaagacttttaagaaatagttcctttatttaaatcatgaattatgttggatagaaaaatagagagcaaatgtttgtatgcatgccaaattgcaagggaaaaataatcaacgtaaattatagcagaacaccccaaatgtgaaagcaagcaagaaggactgcaaaagaaaactgtacaagttagtctacaatgtgatagctcaacgcgtaaaatgcaacttcaagctatatctaattgtgatactttaccaataatacttgagaaccctttttgatacgtgtgatcgtcaagcaaacggcaaaccctacaaccaaagcagagaagaatcgctaaattagcatttagttgctaatgacataatttagattagctaaccacacatatcacaagacctggagtcctggagagtggagatccaagatcgctaagaaaggatctaataaaaatgaggaaaacctgaaagagacaagaaacataggtaactccctaatggcatgaatccaccacacattggaaaacacaaatcacatagattgggatttatctaggacaaaggatggacatccagtacaattcctcagcttgtggaatcttaggattaaagtaccaatgtcttgatccatggacacaattgttggagactggcgagtgaaacccctaaccctaacccgtcttgcagcggattagcaggataccgaatcatgcaagatccagaatgtgccacgccaaaattgaacatgggatagaaaatctctgctgttacctgcacctgttggcctctttgccctgcctcatacacttgatgttgtggtccgtgatattggcttggatccttagtctccaccccatgacaagtgaccactaaccaatcagataagaggagtgtaacttataaacaatctgagaaaaggccaggctttctatttaacgaaagttgaagtacaaaacaaattcagttttagatgagagcaactattgtcaactaatcgtgtaacagtacaccagatcaacatatgatactcactaaaatgcactacatatctaaataaaggcacactaagtttctatgtaataaataaactcatagcaataggcatactccgttgatgcaaaaaaaaataaggcttgactattgttctaccaaaaaaaggcaagatatctacc

SEQ ID NO: 23374 - DNA, 318 bp, Zea Mays
taaaatgcactacatatctaaataaaggcacactaagtttctatgtaataaataaactcatagcaataggcatactccgttgatgcaaagaaaaaataacaaaaaaataaggcctgactattgttctaccaaaggaggcaagatatctaccgtcgccaatccgatgatgcaccaggggctggatttgaacccaacggcggggaacgacttcctgattggcccgatgtggacagtgacctctccatcggccgcctcgacgccggtgatgagcacccaggcaaatagcacacggacgcagacgccctcgagccccgtgac

SEQ ID NO: 23375 - DNA, 3671 bp, Zea Mays
acatacggaccccgatggaacggcctgcgtttgtccctgcgggctgcggccctgccttttctcccattcccctcgccgcgtgacacgcgctctccctctctcccgagtcccgacgaccgggcaacagccgccgccgccgctcagcctccgtcgggcccttcgccggcggcgaacaccatcaggtgtacatgcgtacgcccatgcccttggctgcgtccgcccctgcaagtggtttcctgctggtctgtgtggatttggctgccggaagattgattgatgcggccttcaggatcactgtagactcgctgtgagattccaaggctgatcaggtcatgttgggggaccagtgcatcatacaggcgttagactcggttagctcatcaagctctgcggcctctgcccctgattcgaccctctccggagagcttccttctgtgagcaggaactgtgtgattgggagcctgcaggtggcgcgggcgcagaaggggggacatgtggagggtctggtgaattgttgtcatagcaagaagaagaagaagaataggactggcagtggtttgtgggattctgcaaccaaatcctgggcttctggcatggggggtgatgatgagaacagtgaggccaacatgagtgagctcatcggcaggatcggccgggagttggccatctcgtgcctgctccgtcttccccggtcatactattacgatgtggcatgtgttgaccggtctttctactcccttgtgaggtctgggaacctatacaggctgaggcgggcggtggggattgccgagcagatgatctattgctcgtgcaacgttctcgagtgggaaggtttcgacccgtgccgccagcggtggttcggcatcccttccatgcctcccatagagtgcttcatgctcgctgacaaggaatccctggccgtgggcaccagtatcctcgtcttcgggaagagggtggaatcccatgttgtgctgaggtatagccttctaactaactcctggaccacaggagagatgatgaacacgccgaggtgcttgtttggctcggcaagcttcggtgagaaggctattgtggctggtggtatcggccagagtggtccgttgagctctgccgagctttatgattctgagatgcagacatggactaccctaccgagcatgagcagggcgcggcagatgtgctctggtttcttcatggacggcaagttctacgtcattggtgggaaagctgagaggcacaacgaggtccttagctgtgctgaggagtttgatttggagaatggctcctggcacttgatcccggacatggcgcagggccttaatgggggaagcggtgctccgcctcttgttgctgttgtgaataatgagctttatgctgctgactatgcaaccaaggaggttaggaagtatgacaaggaaaataatgcatggatcactcttggactgttacctgggaggtatacatcagttcatggctggggcattgcttttcgtagttgtggagatatgctcattgtaattggcgcgatgagtgctggtggtagcggggtgattgaaatttgttcctgggtacccaataatgaacagccagattggaagatcattggcacccgccgttctggaagctttgtgtacaattgtgccgtgatgagttgttgacataccagggctactacattatcaactgtacatcttgaccaaaaggaaggataaagaaggcaaattctgctgagtctgttttgcttcttaatgggtaacttctgcccactggcattttaggctaagctgaaggtccgatagaacttctcgtgtagcttcttacttgtttatgtctagtctcttcattttaattccatttggaaggcctgcaattgaattccagaacgtgggacatgcagtgcagtattttagattagtaatttggtgcaacctcaaacattttgatcttccctgcctccctgggtaacttgatcaaattttctttttaagctccagagaatagccttacattggcaaatcatttgcccatagattgtaagaaataaaagaggaaagaaatgtctttgtggacaattgttgcattttccctttgtcttttcttggttaattgtgactggaggcaatgtgtttttttgcaagacctgtagagtatgaacactcatcagttgtgccttgttatcctacctatggtatctgataatgttaatgttgtctcaatttggcttcttgagtgcggaaatgtgcttttggtcatatgtgaatgaacattttagttttggaacaagtgaatgtcttgggacattagtttccatttagacttgcaataattctgattaattgatcatttcctttgagttatgactttgtagctttgtggttttctaaataattcacagcaacgtcagtatatactactgtgatgttatgtctcgaacgtggtgtattgtagtcagtctatattgtatggctacgatgttgaaattattttatgttggcttgaactagatgctttaagtggtgcacagaaatcacatttatttactgtaatttgtgtggaagtttgtgcctgactgcctgtttgttctgttgacaatggtctaatatccttctgtccattaaaaaagggtgttgattgctttgcatcaccgatgaatgaagcatatcagtacctaaactgtaggagtgtcttaaaaaaagcatatcggtattaaataaacggtataaatgagttcccattctctgtttcgtataacagagagcttaaaatcagtgatctgtaacttctacacctgatctgcctttgtagagcattgcttcttctatgataatgatcttagcgaagtgttttgtgacaaaaagagaggggggacatgatcattctgttgaggatctgtattgatagtgtgccatggtttgaggtcctaggagttcaggtgtgtccccaacaccacaagatcctggttatgtctaggcgctaagtcatgttcctaatgtcacagcacaccacaacaactcaaaaccgtgacttttgtttcccttttttttgacctgttcatgtgtaccgtggaaattttgtggtaatatgaggagggattctttttttctgaataaaatttctagggagtaattagtcttccttatctacatgactattttggcagttatccttgtatttctagtcctcactaagagaattgatgatatcaatgattttttttggcattttacacttgtgcatcgctctggttatacaaggttgctctgctctttttttatagtgcatttcatgcttattgaagagtctctttaagacttaaaagcatatgttcttcctgctccaacaggtaagctatctagtaggacacaagttggatgataacccattgtcttcatgagcttataggtgtagtgattagtcatgtatatgtttagcatataataggtgattgtgtaatttagtttgtgtaatggtccattcaaacataacaaaattggtaggaggatgagcagaagattgacacctgtgtgttctaggcctgctccctgatgaaggacacatattaaacatgcatatgtgagcccttcagcggatatcatatgtttgtatggctttctgtcagctgaattgaagttaatagccattgcatttaagtctgactatttggatccaaa

SEQ ID NO: 23376 - DNA, 1738 bp, Zea Mays
ggcaggaccagtaaaggagttgcgcgcgaaaaagttgacgcgggagtggatgcatgggatttgcatgccaaggagactgtcggggaattgggcgcctacaggtcctgcaagtcacagggcaggcacataagcatctcttcctctccttttggcttccctcctcttgggtttgcactgcccctgctcttgacttggatgtgcactgcctctactcgacttggatatgctctgcagttcgcatctcctctgcagctctgtttccctcctcttctgctgtttctttccctgtctttcctctgcttgtgctttgttatattgatgctgaccggaagtgctcgagttctttgtttttacagctgatagcacaatggtatattatactccactcggaattccaatatgttggtgcagtggttagacgggggttcccaggtcaaaatctggttggtagtattgcaaattctgctttctgttaggacgttggaatgtctacatctatttggaagttgtgctgctaggagggttttgcattttcccattgtaccacctgcaaggctccatattatttgagggttcattcccacactgacaggaaatggcgaacactgaagtttcgtttctttgttactagagatatactattcatctttgctctagtccagactgtcatctctgcattggcatacttggtacattttcttgatgggtaccagcaatattggttgaggacagcctggggttttgataaccaagttagtttttattacatatgtggtgcattattattttttgctctattgggactatcaggttgcttcataacctgttatgaccgaagagtacgaaatgatttggctcagccttgtcgagaattatgtctttgttgctgtcaaccagggatgtgtgcagattgccatctacctggcacgttatgcatgtggactgactgcaccacctgcttcgaaggttgtgctaccacagctggcgagtgtggtggttgcttgggaggtgctggggaagctgggctacctctgcttctcatcatgggggttattgtgcttgggcttttcacggtcatcggcatattctacagtgtcctggtcgcgacaatggttggccagcggatctggcagcggcattatcacattcttgcaaaacgaatgctaaccaaggagtatgtcgtagaggatgtcgatggcgagcgcacagactggtgtccgccgccgctccctgcagagcacatcagccagctgaggtctctggggcttctataatagctagggtactcggcgtggcattaccctacccagctgtacaggaggcgatacaaaagcaggaagtcaggcatactgcgttgaaatgtggcaatattgatatcttctttttttgtacattgtaatggcaacagtttcttcctgacaaccaaaaagttttataccaagtgaaatcacgtactttacgaagtctgcgtggcttctcacctctccaagtgactttgtcatgtttaaattcgcgtatcagcctatcggcctatcctccctcattcagaataacaattgacaacggggattcatcgaattctatactccaaaaatattgacgttcaaatattaaaattttaaaatagctgtttttcaatataccttttcttttcttttctttttttctaatatatttctatgttttgtctaccatatatctttactgtgctaaagtcaacaaatattatgggctcgag

SEQ ID NO: 23377 - DNA, 2063 bp, Zea Mays
gaccagtaaaggagttgcgcgcgaaaaagttgacgcgggagtggatgcatgggatttgcatgccaaggagactgtcggggaattgggcgcctacaggtcctgcaagtcacagggcaggcacataagcatctcttcctctccttttggcttccctcctcttgggtttgcactgcccctgctcttgacttggatgtgcactgcctctactcgacttggatatgctctgcagttcgcatctcctctgcagctctgtttccctcctcttctgctgtttctttccctgtctttcctctgcttgtgctttgttatattgatgctgaccggaagtgctcgagttctttgtttttacagctgatagcacaatggtatattatactccactcggaattccaatatgttggtgcagtggttagacgggggttcccaggtcaaaatctggttggtagtattgcaaattctgctttctgttaggacgttggaatgtctacatctatttggaagttgtgctgctaggtaactgcagatgcagacttggatgggattttaggttgaacttggatgattcaggttatgccaagaaacatgttaaccaactgaggaatacagtttactgtttgggttacaaaagctacacctttttcctgtcaagtcaactcatgaaatgtgaaatcttttgcgcaatacaaattaaatagtgtctttgccagatgtaataagtacggaagaattcggtattttgtgttcattttgctgcctgccctatctggagtttgcttctaaaattgactgttgatttctttgcaagaccagtaaactaatcatgttttgatgcttaacaaacaggagggttttgcattttcccattgtaccacctgcaaggctccatattatttgagggttcattcccacactgacaggaaatggcgaacactgaagtttcgtttctttgttactagagatatactattcatctttgctctagtccagactgtcatctctgcattggcatacttggtacattttcttgatgggtaccagcaatattggttgaggacagcctggggttttgataaccaagttagtttttattacatatgtggtgcattattattttttgctctattgggactatcaggttgcttcataacctgttatgaccgaagagtacgaaatgatttggctcagccttgtcgagaattatgtctttgttgctgtcaaccagggatgtgtgcagattgccatctacctggcacgttatgcatgtggactgactgcaccacctgcttcgaaggttgtgctaccacagctggcgagtgtggtggttgcttgggaggtgctggggaagctgggctacctctgcttctcatcatgggggttattgtgcttgggcttttcacggtcatcggcatattctacagtgtcctggtcgcgacaatggttggccagcggatctggcagcggcattatcacattcttgcaaaacgaatgctaaccaaggagtatgtcgtagaggatgtcgatggcgagcgcacagactggtgtccgccgccgctccctgcagagcacatcagccagctgaggtctctggggcttctataatagctagggtactcggcgtggcattaccctacccagctgtacaggaggcgatacaaaagcaggaagtcaggcatactgcgttgaaatgtggcaatattgatatcttctttttttgtacattgtaatggcaacagtttcttcctgacaaccaaaaagttttataccaagtgaaatcacgtactttacgaagtctgcgtggcttctcacctctccaagtgactttgtcatgtttaaattcgcgtatcagcctatcggcctatcctccctcattcagaataacaattgacaacggggattcatcgaattctatactccaaaaatattgacgttcaaatattaaaattttaaaatagctgtttttcaatataccttttcttttcttttctttttttctaatatatttctatgttttgtctaccatatatctttactgtgctaaagtcaacaaatattatgggctcgag

SEQ ID NO: 23378 - DNA, 2112 bp, Zea Mays
gaccagtaaaggagttgcgcgcgaaaaagttgacgcgggagtggatgcatgggatttgcatgccaaggagactgtcggggaattgggcgcctacaggtcctgcaaggagggttttgcattttcccattgtaccacctgcaaggctccatattatttgagggttcattcccacactgacaggaaatggcgaacactgaagtttcgtttctttgttactagagatatactattcatctttgctctagtccagactgtcatctctgcattggcatacttggtacattttcttgatgggtaccagcaatattggttgaggacagcctggggttttgataaccaagttagtttttattacatatgtggtgcattattattttttgctctattgggactatcaggttgcttcataacctgttatgaccgaagagtacgaaatgatttggctcagccttgtcgagaattatgtctttgttgctgtcaaccagggtatgcattagttagctcattcttcaactcatcaaagtatggccttatactaaagctatgtcttaaccctgaaaaacattggtcgacacagttgttgtggcataggaaaaatttacacgaagtaacgtgaagagattatatattttttctctaattatatgaatggatatagatagtttgttgcactcggattgataaagcatgttcagcaaggttacattaggcctaggcgctctctaggcgctgacccatactttgatgactaacatgtgttcctaggcattttggaccttattctaccttttcttaatataatgaagcgtagctctactgtgttttcgagaaaaaaaaggttggacagagacccaccttggcaccttgcccactccaaccttatccattcacctcttctcagttccagccacactcgcatttgctcgcttgtgtctcctgtggcctctgccttctcccagacacgcttgttgcccaccccctctgccttgtccttgttatgctcgtcactgacgcccgtgccttctcctggctgcacccatcacccgccgccattctcctcctggacgccgcccgccactaacctccttttggtagcgcttgtggcctgtggcctgccctccttctgggccgtggccgtctgtactcgcttcctcggccgccagtccgccacctgccgtccctcaggcagcacggctctggatctgggggcatgctgcctatccactgctgctcccttgtggaacactgatgtttacttgtacacaactacaagatgtgtgcagattgccatctacctggcacgttatgcatgtggactgactgcaccacctgcttcgaaggttgtgctaccacagctggcgagtgtggtggttgcttgggaggtgctggggaagctgggctacctctgcttctcatcatgggggttattgtgcttgggcttttcacggtcatcggcatattctacagtgtcctggtcgcgacaatggttggccagcggatctggcagcggcattatcacattcttgcaaaacgaatgctaaccaaggagtatgtcgtagaggatgtcgatggcgagcgcacagactggtgtccgccgccgctccctgcagagcacatcagccagctgaggtctctggggcttctataatagctagggtactcggcgtggcattaccctacccagctgtacaggaggcgatacaaaagcaggaagtcaggcatactgcgttgaaatgtggcaatattgatatcttctttttttgtacattgtaatggcaacagtttcttcctgacaaccaaaaagttttataccaagtgaaatcacgtactttacgaagtctgcgtggcttctcacctctccaagtgactttgtcatgtttaaattcgcgtatcagcctatcggcctatcctccctcattcagaataacaattgacaacggggattcatcgaattctatactccaaaaatattgacgttcaaatattaaaattttaaaatagctgtttttcaatataccttttcttttcttttctttttttctaatatatttctatgttttgtctaccatatatctttactgtgctaaagtcaacaaatattatgggctcgag

SEQ ID NO: 23379 - DNA, 1052 bp, Zea Mays
gaccagtaaaggagttgcgcgcgaaaaagttgacgcgggagtggatgcatgggatttgcatgccaaggagactgtcggggaattgggcgcctacaggtcctgcaaggagggttttgcattttcccattgtaccacctgcaaggctccatattatttgagggttcattcccacactgacaggaaatggcgaacactgaagtttcgtttctttgttactagagatatactattcatctttgctctagtccagactgtcatctctgcattggcatacttggtacattttcttgatgggtaccagcaatattggttgaggacagcctggggttttgataaccaagttagtttttattacatatgtggtgcattattattttttgctctattgggactatcaggttgcttcataacctgttatgaccgaagagtacgaaatgatttggctcagccttgtcgagaattatgtctttgttgctgtcaaccagggagtatgtcgtagaggatgtcgatggcgagcgcacagactggtgtccgccgccgctccctgcagagcacatcagccagctgaggtctctggggcttctataatagctagggtactcggcgtggcattaccctacccagctgtacaggaggcgatacaaaagcaggaagtcaggcatactgcgttgaaatgtggcaatattgatatcttctttttttgtacattgtaatggcaacagtttcttcctgacaaccaaaaagttttataccaagtgaaatcacgtactttacgaagtctgcgtggcttctcacctctccaagtgactttgtcatgtttaaattcgcgtatcagcctatcggcctatcctccctcattcagaataacaattgacaacggggattcatcgaattctatactccaaaaatattgacgttcaaatattaaaattttaaaatagctgtttttcaatataccttttcttttcttttctttttttctaatatatttctatgttttgtctaccatatatctttactgtgctaaagtcaacaaatattatgggctcgag

SEQ ID NO: 23380 - DNA, 1396 bp, Zea Mays
ctgtggcctctgccttctcccagacacgcttgttgcccaccccctctgccttgtccttgttatgctcgtcactgacgcccgtgccttctcctggctgcacccatcacccgccgccattctcctcctggacgccgcccgccactaacctccttttggtagcgcttgtggcctgtggcctgccctccttctgggccgtggccgtctgtactcgcttcctcggccgccagtccgccacctgccgtccctcaggcagcacggctctggatctgggggcatgctgcctatccactgctgctcccttgtggaacactgatgtttacttgtacacaactacaagatgtgtgcagattgccatctacctggcacgttatgcatgtggactgactgcaccacctgcttcgaaggttgtgctaccacagctggcgagtgtggtggttgcttgggaggtgctggggaagctgggctacctctgcttctcatcatgggggttattgtgcttgggcttttcacggtcatcggcatattctacagtgtcctggtcgcgacaatggttggccagcggatctggcagcggcattatcacattcttgcaaaacgaatgctaaccaaggaaatggtggctaaagacaaggctcaagcagcacctgcaagccatgatgaagttgatcttgatgagttgatggatgaccctgaacttgagaagttgcacgcggagagaattgctgcccttaagaaagaggttgagaagcgtgaagtgctaaaaaggcaaggtcacggtgaatacagggaggtaattgaaggggacttccttggggaggttactggcagtgaaagagtcatatgtcatttctatcaccgtgaattttaccgttgcaagatcatggataagcatttgaaggcccttgctcctgtctatgtgggaacaaaattcatcaagcttgatgctgaaaatgctccattctttgtagccaaactggcaatcaaaaccttgccatgtgtaatattgttcaagaagggtattgctgttgaccggttagttgggtttcaagatctcggaagtaaagacgatttttcaacaagagcgttggaaaacattctcaagatgaaagggataatcgatgagaagaagaaagatgacgatgatgatgatgaagaaagcgagtctaagaataggaggattagatcttcaactgctcaagattctgactcggactgaacatgagatggggattgaggattcaccctttttgcactttatattttgtctgttctgtactgcaattgatttgtgcgactcatgtatctataccagataaccagaacaaaagcatgtacaagagattcttaacttatctaacttatgaacacattctctcggaaaaaagttaaaccaaac

SEQ ID NO: 23381 - DNA, 963 bp, Zea Mays
agctcacttcgcttcgcttttccttcacgaaaacagagcaaatccggcgagccggtgcggcggcggagggagacgcctgctcgagaaggagcattagcaggaggcagcggagatggatccggacgcagtgaagtcgacgctctctaaccttgccttcggcaacgtcatcgccgccgccgcccgcgacctccagaaggaaatggtggctaaagacaaggctcaagcagcacctgcaagccatgatgaagttgatcttgatgagttgatggatgaccctgaacttgagaagttgcacgcggagagaattgctgcccttaagaaagaggttgagaagcgtgaagtgctaaaaaggcaaggtcacggtgaatacagggaggtaattgaaggggacttccttggggaggttactggcagtgaaagagtcatatgtcatttctatcaccgtgaattttaccgttgcaagatcatggataagcatttgaaggcccttgctcctgtctatgtgggaacaaaattcatcaagcttgatgctgaaccaaactggcaatcaaaaccttgccatgtgtaatattgttcaagaagggtattgctgttgaccggttagttgggtttcaagatctcggaagtaaagacgatttttcaacaagagcgttggaaaacattctcaagatgaaagggataatcgatgagaagaagaaagatgacgatgatgatgatgaagaaagcgagtctaagaataggaggattagatcttcaactgctcaagattctgactcggactgaacatgagatggggattgaggattcaccctttttgcactttatattttgtctgttctgtactgcaattgatttgtgcgactcatgtatctataccagataaccagaacaaaagcatgtacaagagattcttaacttatctaacttatgaacacattctctcggaaaaaagttaaaccaaac

SEQ ID NO: 23382 - DNA, 855 bp, Zea Mays
acttgttctcttctttagtttgttctccactgaaatcatccctagaaaagaaggcacttcctctttcattatcaggaagatgaaacccatagatatttagtcccattcggagaacataagcatcaacttggcgctctagaagtcgtcttgggagtagaactgactaaatgaaagccaaccactgcgttaatattgtgttcagagaaaggggggcagaaaattgggaagttgctatttcgtgtcaaggtcaaaccaatggaaactggaagtatgcaacatcatatgtaccaaaaaagttgcaatttatgttgcgaaggcaatagaaggtaaaggatcaaacataccatcaaactcaaatggcatacctttgttaatgggatcttgacaatttggctaatgaaattgttaattaatagatctaacagcgtacttaaactcaataagatagcatgaactgaaaacagctactccttccatcccaaaaagaatacaattcttgcttggtggggagtcaaatgatttcaaattttacaaaatctacacaaagaagtattgatttatgatgccaaataaatattattcaattaattatggaatatttttcacagtaaacctatttgaagacatatgttaatgttattttatgtaaacttggtccaaacctagaattgcattccttttcggaccagggagtactaataagtaacttagttcagaacttcagataaacaataataaaggtaaaactgtaccatattgattctgctttgaaacacatacatctacttctaatccgcatatttctgcgcacattatcactatcaaagatatgggaccagaatgctatagtagagc

SEQ ID NO: 23383 - DNA, 2179 bp, Zea Mays
cccacctcatcccggcctgggaaaaaaccttgtctcgacggcgtggaaagaaaccgcgtctacagcacagaggcggcggtgcctagggcacagagaaggcggcggcgacatctatactggctgaccggcgccattccatcggtgtccgcttctcgcaggtcatgtgtgacctgcttggtgtggttgctcgacactctcctcaattggtgatattttcttttggagcccaagttcttcgtctaaggcatgactggacatggcattttggcgacatcagaatagcacatgctgctagtgttgtttgatattagagacactttttgatttgcttgcatgttttattttcagtttgaggggcacgagtggtcggacttgtttcagtttcagaaaactagggacacttcttttagtttcagaattgagagaagtgtattttagtttcaggattcataatgatagggacacttcactcagcatatgttcggttgtgattaaaaccatggttgtggacgttctccatagcatctttctactttattttagtttcatgattcaaaatgctagtgacacttctttctatttttattttatagaaagcaacattgtacatggcaggtctatgtaagcccactaggcaacgttttacagtgttgccaggtctatgtacagccggtctctagtgggcttacagtgttgcttccttgttgaattatgttgcatatatggcggggattaaccgaacaaacattttgagacaggtatttaaaccataaagatattaaatcccaaagggattaagtgaaaaggagggatccactcaatccctccctggattagatccacttggggaattaatccattgcaaccgaacaagcccttaaggggaaccaaaatttcagaagataggtatgagagttataaactattcttggaagaaaaggtgaggctacctgcacttgtttggatctcacagcaggaaacgagttgatgttgctaatccttcactaaaataggaaaactaggcagttttctagttaaattccatcttagggataggccctttgtagttagtacttacgaatgagatggacatgcaccctttctcttgatgcacacaagatttaatggtacaatatgaatacaatatgataacttccatgacatttcaaaatatatagttccactttagtaaaatagttttggatgcatttgctacaatttactgcatattcaaattgaggctaaccttgtggcgtcgataaccttgaggctagtcttttgtatgcatttgctacaatttagtgcattttctacacaaaggacgaggaggggtgggtgctgattcacttagtggcaagcttcgactactctcaaatcatcgacatcctgcttgagcgaagcatatcttatggtgagcgtgctgaacacgaaggacgaggagtggtgggcgctgattcactcagtggcaagcttcgactactctcaaatcatcgacatcctgcttgagcgaagcatatcttatggtgagcgtgctgaacacgaaggacgcgtaggggtgggcgctgattcactcagtggcaagcttcgactactctcaaatcatcgacatcctgcttgagcgaagcatatcttatggtgagcgtgctgaacacgaaggacgcgtaggggtgggcgctgattcaaccagtggcaagcttcgactactctcaaatcatcgacatcctgcttgagcgaagcatatcttatggtgagcgtgctgagcacgaaggacgtggaggggtgggcgccgattcactccatggcgtgctccgacaactctcaaatcatcgacatccaccttgagcgatgtatgagaccagcacgatacatctgtattcggttcaagcggctttgatgcagctccagctgaccatcctcttgtcagtgggaatggttacgagcatacctcatgcactatttgctgagttaattggataagaggtttgcttatgcttgtgaggaagacaacaagagttcaattagtcgaacatgaaaatagtctaaatgcttgcgcttaagcggggaaaaacaataattcttcctattgtgatggcaaaaggtgtcctcgaaaagaacagaaccaaaaaatgttcctattgtcacggctcaacctcatagaaaatcttgagttggcgttttt

SEQ ID NO: 23384 - DNA, 2195 bp, Zea Mays
cccacctcatcccggcctgggaaaaaaccttgtctcgacggcgtggaaagaaaccgcgtctacagcacagaggcggcggtgcctagggcacagagaaggcggcggcgacatctatactggctgaccggcgccattccatcggtgtccgcttctcgcaggtcatgtgtgacctgcttggtgtggttgctcgacactctcctcaattggtgatattttcttttggagcccaagttcttcgtctaaggcatgactggacatggcattttggcgacatcagaatagcacatgctgctagtgttgtttgatattagagacactttttgatttgcttgcatgttttattttcagtttgaggggcacgagtggtcggacttgtttcagtttcagaaaactagggacacttcttttagtttcagaattgagagaagtgtattttagtttcaggattcataatgatagggacacttcactcagcatatgttcggttgtgattaaaaccatggttgtggacgttctccatagcatctttctactttattttagtttcatgattcaaaatgctagtgacacttctttctatttttattttatagaaagcaacattgtacatggcaggtctatgtaagcccactaggcaacgttttacagtgttgccaggtctatgtacagccggtctctagtgggcttacagtgttgcttccttgttgaattatgttgcatatatggcggggattaaccgaacaaacattttgagacaggtatttaaaccataaagatattaaatcccaaagggattaagtgaaaaggagggatccactcaatccctccctggattagatccacttggggaattaatccattgcaaccgaacaagcccttaaggggaaccaaaatttcagaagataggtatgagagttataaactattcttggaagaaaaggtgaggctacctgcacttgtttggatctcacagcaggaaacgagttgatgttgctaatccttcactaaaataggaaaactaggcagttttctagttaaattccatcttagggataggccctttgtagttagtacttacgaatgagatggacatgcaccctttctcttgatgcacacaagatttaatggtacaatatgaatacaatatgataacttccatgacatttcaaaatatatagttccactttagtaaaatagttttggatgcatttgctacaatttactgcatattcaaattgaggctaaccttgtggcgtcgataaccttgaggctagtcttttgtatgcatttgctacaatttagtgcattttctacacaaaggacgaggaggggtgggtgctgattcacttagtggcaagcttcgactactctcaaatcatcgacatcctgcttgagcgaagtatgagactgacgcggcatatcttatggtgagcgtgctgaacacgaaggacgaggagtggtgggcgctgattcactcagtggcaagcttcgactactctcaaatcatcgacatcctgcttgagcgaagcatatcttatggtgagcgtgctgaacacgaaggacgcgtaggggtgggcgctgattcactcagtggcaagcttcgactactctcaaatcatcgacatcctgcttgagcgaagcatatcttatggtgagcgtgctgaacacgaaggacgcgtaggggtgggcgctgattcaaccagtggcaagcttcgactactctcaaatcatcgacatcctgcttgagcgaagcatatcttatggtgagcgtgctgagcacgaaggacgtggaggggtgggcgccgattcactccatggcgtgctccgacaactctcaaatcatcgacatccaccttgagcgatgtatgagaccagcacgatacatctgtattcggttcaagcggctttgatgcagctccagctgaccatcctcttgtcagtgggaatggttacgagcatacctcatgcactatttgctgagttaattggataagaggtttgcttatgcttgtgaggaagacaacaagagttcaattagtcgaacatgaaaatagtctaaatgcttgcgcttaagcggggaaaaacaataattcttcctattgtgatggcaaaaggtgtcctcgaaaagaacagaaccaaaaaatgttcctattgtcacggctcaacctcatagaaaatcttgagttggcgttttt

SEQ ID NO: 23385 - DNA, 1984 bp, Zea Mays
aaaaaaccttgtctcgacggcgtggaaagaaaccgcgtctacagcacagaggcggcggtgcctagggcacagagaaggcggcggcgacatctatactggctgaccggcgccattccatcggtgtccgcttctcgcaggtcatgtgtgacctgcttggtgtggttgctcgacactctcctcaattggtgatattttcttttggagcccaagttcttcgtctaaggcatgactggacatggcattttggcgacatcagaatagcacatgctgctagtgttgtttgatattagagacactttttgatttgcttgcatgttttattttcagtttgaggggcacgagtggtcggacttgtttcagtttcagaaaactagggacacttcttttagtttcagaattgagagaagtgtattttagtttcaggattcataatgatagggacacttcactcagcatatgttcggttgtgattaaaaccatggttgtggacgttctccatagcatctttctactttattttagtttcatgattcaaaatgctagtgacacttctttctatttttattttatagaaagcaacattgtacatggcaggtctatgtaagcccactaggcaacgttttacagtgttgccaggtctatgtacagccggtctctagtgggcttacagtgttgcttccttgttgaattatgttgcatatatggcggggattaaccgaacaaacattttgagacaggtatttaaaccataaagatattaaatcccaaagggattaagtgaaaaggagggatccactcaatccctccctggattagatccacttggggaattaatccattgcaaccgaacaagcccttaaggggaaccaaaatttcagaagataggtatgagagttataaactattcttggaagaaaaggtgaggctacctgcacttgtttggatctcacagcaggaaacgagttgatgttgctaatccttcactaaaataggaaaactaggcagttttctagttaaattccatcttagggataggccctttgtagttagtacttacgaatgagatggacatgcaccctttctcttgatgcacacaagatttaatggtacaatatgaatacaatatgataacttccatgacatttcaaaatatatagttccactttagtaaaatagttttggatgcatttgctacaatttactgcatattcaaattgaggctaaccttgtggcgtcgataaccttgaggctagtcttttgtatgcatttgctacaatttagtgcattttctacacaaaggacgaggaggggtgggtgctgattcacttagtggcaagcttcgactactctcaaatcatcgacatcctgcttgagcgaagcatatcttatggtgagcgtgctgaacacgaaggacgaggagtggtgggcgctgattcactcagtggcaagcttcgactactctcaaatcatcgacatcctgcttgagcgaagtatgagactgacgcggcatatcttatggtgagcgtgctgaacacgaaggacgcgtaggggtgggcgctgattcactcagtggcaagcttcgactactctcaaatcatcgacatcctgcttgagcgaagcatatcttatggtgagcgtgctgaacacgaaggacgcgtaggggtgggcgctgattcaaccagtggcaagcttcgactactctcaaatcatcgacatcctgcttgagcgaagtatgagaatgacgcggcatatcttatggtgagcgtgctgagcacgaaggacgtggaggggtgggcgccgattcactccatggcgtgctccgacaactctcaaatcatcgacatccaccttgagcgatctgtattcggttcaagcggctttgatgcagctccagctgaccatcctcttgtcagtgggaatgagactggtttggtcttctgtacttcatatatgttggaattgcagcgattatagtaacgacaag

SEQ ID NO: 23386 - DNA, 2167 bp, Zea Mays
cttgtctcgacggcgtggaaagaaaccgcgtctacagcacagaggcggcggtgcctagggcacagagaaggcggcggcgacatctatactggctgaccggcgccattccatcggtgtccgcttctcgcaggtcatgtgtgacctgcttggtgtggttgctcgacactctcctcaattggtgatattttcttttggagcccaagttcttcgtctaaggcatgactggacatggcattttggcgacatcagaatagcacatgctgctagtgttgtttgatattagagacactttttgatttgcttgcatgttttattttcagtttgaggggcacgagtggtcggacttgtttcagtttcagaaaactagggacacttcttttagtttcagaattgagagaagtgtattttagtttcaggattcataatgatagggacacttcactcagcatatgttcggttgtgattaaaaccatggttgtggacgttctccatagcatctttctactttattttagtttcatgattcaaaatgctagtgacacttctttctatttttattttatagaaagcaacattgtacatggcaggtctatgtaagcccactaggcaacgttttacagtgttgccaggtctatgtacagccggtctctagtgggcttacagtgttgcttccttgttgaattatgttgcatatatggcggggattaaccgaacaaacattttgagacaggtatttaaaccataaagatattaaatcccaaagggattaagtgaaaaggagggatccactcaatccctccctggattagatccacttggggaattaatccattgcaaccgaacaagcccttaaggggaaccaaaatttcagaagataggtatgagagttataaactattcttggaagaaaaggtgaggctacctgcacttgtttggatctcacagcaggaaacgagttgatgttgctaatccttcactaaaataggaaaactaggcagttttctagttaaattccatcttagggataggccctttgtagttagtacttacgaatgagatggacatgcaccctttctcttgatgcacacaagatttaatggtacaatatgaatacaatatgataacttccatgacatttcaaaatatatagttccactttagtaaaatagttttggatgcatttgctacaatttactgcatattcaaattgaggctaaccttgtggcgtcgataaccttgaggctagtcttttgtatgcatttgctacaatttagtgcattttctacacaaaggacgaggaggggtgggtgctgattcacttagtggcaagcttcgactactctcaaatcatcgacatcctgcttgagcgaagcatatcttatggtgagcgtgctgaacacgaaggacgaggagtggtgggcgctgattcactcagtggcaagcttcgactactctcaaatcatcgacatcctgcttgagcgaagtatgagactgacgcggcatatcttatggtgagcgtgctgaacacgaaggacgcgtaggggtgggcgctgattcactcagtggcaagcttcgactactctcaaatcatcgacatcctgcttgagcgaagcatatcttatggtgagcgtgctgaacacgaaggacgcgtaggggtgggcgctgattcaaccagtggcaagcttcgactactctcaaatcatcgacatcctgcttgagcgaagcatatcttatggtgagcgtgctgagcacgaaggacgtggaggggtgggcgccgattcactccatggcgtgctccgacaactctcaaatcatcgacatccaccttgagcgatgtatgagaccagcacgatacatctgtattcggttcaagcggctttgatgcagctccagctgaccatcctcttgtcagtgggaatggttacgagcatacctcatgcactatttgctgagttaattggataagaggtttgcttatgcttgtgaggaagacaacaagagttcaattagtcgaacatgaaaatagtctaaatgcttgcgcttaagcggggaaaaacaataattcttcctattgtgatggcaaaaggtgtcctcgaaaagaacagaaccaaaaaatgttcctattgtcacggctcaacctcatagaaaatcttgagttggcgttttt

SEQ ID NO: 23387 - DNA, 2896 bp, Zea Mays
aaagaaaccgcgtctacagcacagaggcggcggtgcctagggcacagagaaggcggcggcgacatctatactggctgaccggcgccattccatcggtgtccgcttctcgcaggtcatgtgtgacctgcttggtgtggttgctcgacactctcctcaattggtgatattttcttttggagcccaagttcttcgtctaaggcatgactggacatggcattttggcgacatcagaatagcacatgctgctagtgttgtttgatattagagacactttttgatttgcttgcatgttttattttcagtttgaggggcacgagtggtcggacttgtttcagtttcagaaaactagggacacttcttttagtttcagaattgagagaagtgtattttagtttcaggattcataatgatagggacacttcactcagcatatgttcggttgtgattaaaaccatggttgtggacgttctccatagcatctttctactttattttagtttcatgattcaaaatgctagtgacacttctttctatttttattttatagaaagcaacattgtacatggcaggtctatgtaagcccactaggcaacgttttacagtgttgccaggtctatgtacagccggtctctagtgggcttacagtgttgcttccttgttgaattatgttgcatatatggcggggattaaccgaacaaacattttgagacaggtatttaaaccataaagatattaaatcccaaagggattaagtgaaaaggagggatccactcaatccctccctggattagatccacttggggaattaatccattgcaaccgaacaagcccttaaggggaaccaaaatttcagaagataggtatgagagttataaactattcttggaagaaaaggtgaggctacctgcacttgtttggatctcacagcaggaaacgagttgatgttgctaatccttcactaaaataggaaaactaggcagttttctagttaaattccatcttagggataggccctttgtagttagtacttacgaatgagatggacatgcaccctttctcttgatgcacacaagatttaatggtacaatatgaatacaatatgataacttccatgacatttcaaaatatatagttccactttagtaaaatagttttggatgcatttgctacaatttactgcatattcaaattgaggctaaccttgtggcgtcgataaccttgaggctagtcttttgtatgcatttgctacaatttagtgcattttctacacaaaggacgaggaggggtgggtgctgattcacttagtggcaagcttcgactactctcaaatcatcgacatcctgcttgagcgaagcatatcttatggtgagcgtgctgaacacgaaggacgaggagtggtgggcgctgattcactcagtggcaagcttcgactactctcaaatcatcgacatcctgcttgagcgaagtatgagactgacgcggcatatcttatggtgagcgtgctgaacacgaaggacgcgtaggggtgggcgctgattcactcagtggcaagcttcgactactctcaaatcatcgacatcctgcttgagcgaagcatatcttatggtgagcgtgctgaacacgaaggacgcgtaggggtgggcgctgattcaaccagtggcaagcttcgactactctcaaatcatcgacatcctgcttgagcgaagcatatcttatggtgagcgtgctgagcacgaaggacgtggaggggtgggcgccgattcactccatggcgtgctccgacaactctcaaatcatcgacatccaccttgagcgatgtatgagaccagcacgatacatctgtattcggttcaagcggctttgatgcagctccagctgaccatcctcttgtcagtgggaatggttacgagcatacctcatgcactatttgctgagttaattggataagaggtttgcttatgcttgtatccttgatgtatgttcatatacattcgatatgtcacaaactaaactttagtgaggaaaaccaaacaccctctaaaaatgttgcaccacaagagatggttcctgcactcaatacattggaaccaatcaaatgtactaccagctgcggcaaagaagccatttgccttgctgtcgcgctagttccccctgtaaggtacaaggggatgttctccttttggagccaaaacaaactggcttcatgataatctgctatacagaaatctcacatgcaagacttggttgctaattaaattacactgtattagtgattgtttggaatcgttctatttgttagagcatctccaacaaaagtcctaaacatggtcctattttgaaatgtaggtctccaacactaaaaaaccgctccaacgaaagtcctatttcacaaaaatccatcaaacaattttaggacccggtgtcaggtcctaaatataggaccccatatgatagagccatatcctcgttttatacactatttctaacattttattttataaataacatgatctatttttttaataacatgatataggactcaactattggaactacaaatgttttttatgaccctaaatattttaaattaggtcctattttaatttttaatactcaaatgtataactccttgttggagatgctcttaccatgtttgttttgcctgtatctgaaattttagagatcgtgttttcaaattttgatcagcaaagtgtttgtatatttgagtttctgttattattttctcactaaatcgtgtaattttcttatcaatttcattatgtgtttggcattattaattccatttgagatcatttacacacctacactgtagagactggtttggtcttctgtacttcatatatgttggaattgcagcgattatagtaacgacaag

SEQ ID NO: 23388 - DNA, 2858 bp, Zea Mays
aaagaaaccgcgtctacagcacagaggcggcggtgcctagggcacagagaaggcggcggcgacatctatactggctgaccggcgccattccatcggtgtccgcttctcgcaggtcatgtgtgacctgcttggtgtggttgctcgacactctcctcaattggtgatattttcttttggagcccaagttcttcgtctaaggcatgactggacatggcattttggcgacatcagaatagcacatgctgctagtgttgtttgatattagagacactttttgatttgcttgcatgttttattttcagtttgaggggcacgagtggtcggacttgtttcagtttcagaaaactagggacacttcttttagtttcagaattgagagaagtgtattttagtttcaggattcataatgatagggacacttcactcagcatatgttcggttgtgattaaaaccatggttgtggacgttctccatagcatctttctactttattttagtttcatgattcaaaatgctagtgacacttctttctatttttattttatagaaagcaacattgtacatggcaggtctatgtaagcccactaggcaacgttttacagtgttgccaggtctatgtacagccggtctctagtgggcttacagtgttgcttccttgttgaattatgttgcatatatggcggggattaaccgaacaaacattttgagacaggtatttaaaccataaagatattaaatcccaaagggattaagtgaaaaggagggatccactcaatccctccctggattagatccacttggggaattaatccattgcaaccgaacaagcccttaaggggaaccaaaatttcagaagataggtatgagagttataaactattcttggaagaaaaggtgaggctacctgcacttgtttggatctcacagcaggaaacgagttgatgttgctaatccttcactaaaataggaaaactaggcagttttctagttaaattccatcttagggataggccctttgtagttagtacttacgaatgagatggacatgcaccctttctcttgatgcacacaagatttaatggtacaatatgaatacaatatgataacttccatgacatttcaaaatatatagttccactttagtaaaatagttttggatgcatttgctacaatttactgcatattcaaattgaggctaaccttgtggcgtcgataaccttgaggctagtcttttgtatgcatttgctacaatttagtgcattttctacacaaaggacgaggaggggtgggtgctgattcacttagtggcaagcttcgactactctcaaatcatcgacatcctgcttgagcgaagcatatcttatggtgagcgtgctgaacacgaaggacgaggagtggtgggcgctgattcactcagtggcaagcttcgactactctcaaatcatcgacatcctgcttgagcgaagcatatcttatggtgagcgtgctgaacacgaaggacgcgtaggggtgggcgctgattcactcagtggcaagcttcgactactctcaaatcatcgacatcctgcttgagcgaagcatatcttatggtgagcgtgctgaacacgaaggacgcgtaggggtgggcgctgattcaaccagtggcaagcttcgactactctcaaatcatcgacatcctgcttgagcgaagcatatcttatggtgagcgtgctgagcacgaaggacgtggaggggtgggcgccgattcactccatggcgtgctccgacaactctcaaatcatcgacatccaccttgagcgatctgtattcggttcaagcggctttgatgcagctccagctgaccatcctcttgtcagtgggaatggttacgagcatacctcatgcactatttgctgagttaattggataagaggtttgcttatgcttgtatccttgatgtatgttcatatacattcgatatgtcacaaactaaactttagtgaggaaaaccaaacaccctctaaaaatgttgcaccacaagagatggttcctgcactcaatacattggaaccaatcaaatgtactaccagctgcggcaaagaagccatttgccttgctgtcgcgctagttccccctgtaaggtacaaggggatgttctccttttggagccaaaacaaactggcttcatgataatctgctatacagaaatctcacatgcaagacttggttgctaattaaattacactgtattagtgattgtttggaatcgttctatttgttagagcatctccaacaaaagtcctaaacatggtcctattttgaaatgtaggtctccaacactaaaaaaccgctccaacgaaagtcctatttcacaaaaatccatcaaacaattttaggacccggtgtcaggtcctaaatataggaccccatatgatagagccatatcctcgttttatacactatttctaacattttattttataaataacatgatctatttttttaataacatgatataggactcaactattggaactacaaatgttttttatgaccctaaatattttaaattaggtcctattttaatttttaatactcaaatgtataactccttgttggagatgctcttaccatgtttgttttgcctgtatctgaaattttagagatcgtgttttcaaattttgatcagcaaagtgtttgtatatttgagtttctgttattattttctcactaaatcgtgtaattttcttatcaatttcattatgtgtttggcattattaattccatttgagatcatttacacacctacactgtagagactggtttggtcttctgtacttcatatatgttggaattgcagcgattatagtaacgacaag

SEQ ID NO: 23389 - DNA, 2874 bp, Zea Mays
aaagaaaccgcgtctacagcacagaggcggcggtgcctagggcacagagaaggcggcggcgacatctatactggctgaccggcgccattccatcggtgtccgcttctcgcaggtcatgtgtgacctgcttggtgtggttgctcgacactctcctcaattggtgatattttcttttggagcccaagttcttcgtctaaggcatgactggacatggcattttggcgacatcagaatagcacatgctgctagtgttgtttgatattagagacactttttgatttgcttgcatgttttattttcagtttgaggggcacgagtggtcggacttgtttcagtttcagaaaactagggacacttcttttagtttcagaattgagagaagtgtattttagtttcaggattcataatgatagggacacttcactcagcatatgttcggttgtgattaaaaccatggttgtggacgttctccatagcatctttctactttattttagtttcatgattcaaaatgctagtgacacttctttctatttttattttatagaaagcaacattgtacatggcaggtctatgtaagcccactaggcaacgttttacagtgttgccaggtctatgtacagccggtctctagtgggcttacagtgttgcttccttgttgaattatgttgcatatatggcggggattaaccgaacaaacattttgagacaggtatttaaaccataaagatattaaatcccaaagggattaagtgaaaaggagggatccactcaatccctccctggattagatccacttggggaattaatccattgcaaccgaacaagcccttaaggggaaccaaaatttcagaagataggtatgagagttataaactattcttggaagaaaaggtgaggctacctgcacttgtttggatctcacagcaggaaacgagttgatgttgctaatccttcactaaaataggaaaactaggcagttttctagttaaattccatcttagggataggccctttgtagttagtacttacgaatgagatggacatgcaccctttctcttgatgcacacaagatttaatggtacaatatgaatacaatatgataacttccatgacatttcaaaatatatagttccactttagtaaaatagttttggatgcatttgctacaatttactgcatattcaaattgaggctaaccttgtggcgtcgataaccttgaggctagtcttttgtatgcatttgctacaatttagtgcattttctacacaaaggacgaggaggggtgggtgctgattcacttagtggcaagcttcgactactctcaaatcatcgacatcctgcttgagcgaagcatatcttatggtgagcgtgctgaacacgaaggacgaggagtggtgggcgctgattcactcagtggcaagcttcgactactctcaaatcatcgacatcctgcttgagcgaagtatgagactgacgcggcatatcttatggtgagcgtgctgaacacgaaggacgcgtaggggtgggcgctgattcactcagtggcaagcttcgactactctcaaatcatcgacatcctgcttgagcgaagcatatcttatggtgagcgtgctgaacacgaaggacgcgtaggggtgggcgctgattcaaccagtggcaagcttcgactactctcaaatcatcgacatcctgcttgagcgaagcatatcttatggtgagcgtgctgagcacgaaggacgtggaggggtgggcgccgattcactccatggcgtgctccgacaactctcaaatcatcgacatccaccttgagcgatctgtattcggttcaagcggctttgatgcagctccagctgaccatcctcttgtcagtgggaatggttacgagcatacctcatgcactatttgctgagttaattggataagaggtttgcttatgcttgtatccttgatgtatgttcatatacattcgatatgtcacaaactaaactttagtgaggaaaaccaaacaccctctaaaaatgttgcaccacaagagatggttcctgcactcaatacattggaaccaatcaaatgtactaccagctgcggcaaagaagccatttgccttgctgtcgcgctagttccccctgtaaggtacaaggggatgttctccttttggagccaaaacaaactggcttcatgataatctgctatacagaaatctcacatgcaagacttggttgctaattaaattacactgtattagtgattgtttggaatcgttctatttgttagagcatctccaacaaaagtcctaaacatggtcctattttgaaatgtaggtctccaacactaaaaaaccgctccaacgaaagtcctatttcacaaaaatccatcaaacaattttaggacccggtgtcaggtcctaaatataggaccccatatgatagagccatatcctcgttttatacactatttctaacattttattttataaataacatgatctatttttttaataacatgatataggactcaactattggaactacaaatgttttttatgaccctaaatattttaaattaggtcctattttaatttttaatactcaaatgtataactccttgttggagatgctcttaccatgtttgttttgcctgtatctgaaattttagagatcgtgttttcaaattttgatcagcaaagtgtttgtatatttgagtttctgttattattttctcactaaatcgtgtaattttcttatcaatttcattatgtgtttggcattattaattccatttgagatcatttacacacctacactgtagagactggtttggtcttctgtacttcatatatgttggaattgcagcgattatagtaacgacaag

SEQ ID NO: 23390 - DNA, 2880 bp, Zea Mays
aaagaaaccgcgtctacagcacagaggcggcggtgcctagggcacagagaaggcggcggcgacatctatactggctgaccggcgccattccatcggtgtccgcttctcgcaggtcatgtgtgacctgcttggtgtggttgctcgacactctcctcaattggtgatattttcttttggagcccaagttcttcgtctaaggcatgactggacatggcattttggcgacatcagaatagcacatgctgctagtgttgtttgatattagagacactttttgatttgcttgcatgttttattttcagtttgaggggcacgagtggtcggacttgtttcagtttcagaaaactagggacacttcttttagtttcagaattgagagaagtgtattttagtttcaggattcataatgatagggacacttcactcagcatatgttcggttgtgattaaaaccatggttgtggacgttctccatagcatctttctactttattttagtttcatgattcaaaatgctagtgacacttctttctatttttattttatagaaagcaacattgtacatggcaggtctatgtaagcccactaggcaacgttttacagtgttgccaggtctatgtacagccggtctctagtgggcttacagtgttgcttccttgttgaattatgttgcatatatggcggggattaaccgaacaaacattttgagacaggtatttaaaccataaagatattaaatcccaaagggattaagtgaaaaggagggatccactcaatccctccctggattagatccacttggggaattaatccattgcaaccgaacaagcccttaaggggaaccaaaatttcagaagataggtatgagagttataaactattcttggaagaaaaggtgaggctacctgcacttgtttggatctcacagcaggaaacgagttgatgttgctaatccttcactaaaataggaaaactaggcagttttctagttaaattccatcttagggataggccctttgtagttagtacttacgaatgagatggacatgcaccctttctcttgatgcacacaagatttaatggtacaatatgaatacaatatgataacttccatgacatttcaaaatatatagttccactttagtaaaatagttttggatgcatttgctacaatttactgcatattcaaattgaggctaaccttgtggcgtcgataaccttgaggctagtcttttgtatgcatttgctacaatttagtgcattttctacacaaaggacgaggaggggtgggtgctgattcacttagtggcaagcttcgactactctcaaatcatcgacatcctgcttgagcgaagcatatcttatggtgagcgtgctgaacacgaaggacgaggagtggtgggcgctgattcactcagtggcaagcttcgactactctcaaatcatcgacatcctgcttgagcgaagcatatcttatggtgagcgtgctgaacacgaaggacgcgtaggggtgggcgctgattcactcagtggcaagcttcgactactctcaaatcatcgacatcctgcttgagcgaagcatatcttatggtgagcgtgctgaacacgaaggacgcgtaggggtgggcgctgattcaaccagtggcaagcttcgactactctcaaatcatcgacatcctgcttgagcgaagcatatcttatggtgagcgtgctgagcacgaaggacgtggaggggtgggcgccgattcactccatggcgtgctccgacaactctcaaatcatcgacatccaccttgagcgatgtatgagaccagcacgatacatctgtattcggttcaagcggctttgatgcagctccagctgaccatcctcttgtcagtgggaatggttacgagcatacctcatgcactatttgctgagttaattggataagaggtttgcttatgcttgtatccttgatgtatgttcatatacattcgatatgtcacaaactaaactttagtgaggaaaaccaaacaccctctaaaaatgttgcaccacaagagatggttcctgcactcaatacattggaaccaatcaaatgtactaccagctgcggcaaagaagccatttgccttgctgtcgcgctagttccccctgtaaggtacaaggggatgttctccttttggagccaaaacaaactggcttcatgataatctgctatacagaaatctcacatgcaagacttggttgctaattaaattacactgtattagtgattgtttggaatcgttctatttgttagagcatctccaacaaaagtcctaaacatggtcctattttgaaatgtaggtctccaacactaaaaaaccgctccaacgaaagtcctatttcacaaaaatccatcaaacaattttaggacccggtgtcaggtcctaaatataggaccccatatgatagagccatatcctcgttttatacactatttctaacattttattttataaataacatgatctatttttttaataacatgatataggactcaactattggaactacaaatgttttttatgaccctaaatattttaaattaggtcctattttaatttttaatactcaaatgtataactccttgttggagatgctcttaccatgtttgttttgcctgtatctgaaattttagagatcgtgttttcaaattttgatcagcaaagtgtttgtatatttgagtttctgttattattttctcactaaatcgtgtaattttcttatcaatttcattatgtgtttggcattattaattccatttgagatcatttacacacctacactgtagagactggtttggtcttctgtacttcatatatgttggaattgcagcgattatagtaacgacaag

SEQ ID NO: 23391 - DNA, 2873 bp, Zea Mays
aagaaaccgcgtctacagcacagaggcggcggtgcctagggcacagagaaggcggcggcgacatctatactggctgaccggcgccattccatcggtgtccgcttctcgcaggtcatgtgtgacctgcttggtgtggttgctcgacactctcctcaattggtgatattttcttttggagcccaagttcttcgtctaaggcatgactggacatggcattttggcgacatcagaatagcacatgctgctagtgttgtttgatattagagacactttttgatttgcttgcatgttttattttcagtttgaggggcacgagtggtcggacttgtttcagtttcagaaaactagggacacttcttttagtttcagaattgagagaagtgtattttagtttcaggattcataatgatagggacacttcactcagcatatgttcggttgtgattaaaaccatggttgtggacgttctccatagcatctttctactttattttagtttcatgattcaaaatgctagtgacacttctttctatttttattttatagaaagcaacattgtacatggcaggtctatgtaagcccactaggcaacgttttacagtgttgccaggtctatgtacagccggtctctagtgggcttacagtgttgcttccttgttgaattatgttgcatatatggcggggattaaccgaacaaacattttgagacaggtatttaaaccataaagatattaaatcccaaagggattaagtgaaaaggagggatccactcaatccctccctggattagatccacttggggaattaatccattgcaaccgaacaagcccttaaggggaaccaaaatttcagaagataggtatgagagttataaactattcttggaagaaaaggtgaggctacctgcacttgtttggatctcacagcaggaaacgagttgatgttgctaatccttcactaaaataggaaaactaggcagttttctagttaaattccatcttagggataggccctttgtagttagtacttacgaatgagatggacatgcaccctttctcttgatgcacacaagatttaatggtacaatatgaatacaatatgataacttccatgacatttcaaaatatatagttccactttagtaaaatagttttggatgcatttgctacaatttactgcatattcaaattgaggctaaccttgtggcgtcgataaccttgaggctagtcttttgtatgcatttgctacaatttagtgcattttctacacaaaggacgaggaggggtgggtgctgattcacttagtggcaagcttcgactactctcaaatcatcgacatcctgcttgagcgaagcatatcttatggtgagcgtgctgaacacgaaggacgaggagtggtgggcgctgattcactcagtggcaagcttcgactactctcaaatcatcgacatcctgcttgagcgaagcatatcttatggtgagcgtgctgaacacgaaggacgcgtaggggtgggcgctgattcactcagtggcaagcttcgactactctcaaatcatcgacatcctgcttgagcgaagcatatcttatggtgagcgtgctgaacacgaaggacgcgtaggggtgggcgctgattcaaccagtggcaagcttcgactactctcaaatcatcgacatcctgcttgagcgaagtatgagaatgacgcggcatatcttatggtgagcgtgctgagcacgaaggacgtggaggggtgggcgccgattcactccatggcgtgctccgacaactctcaaatcatcgacatccaccttgagcgatctgtattcggttcaagcggctttgatgcagctccagctgaccatcctcttgtcagtgggaatggttacgagcatacctcatgcactatttgctgagttaattggataagaggtttgcttatgcttgtatccttgatgtatgttcatatacattcgatatgtcacaaactaaactttagtgaggaaaaccaaacaccctctaaaaatgttgcaccacaagagatggttcctgcactcaatacattggaaccaatcaaatgtactaccagctgcggcaaagaagccatttgccttgctgtcgcgctagttccccctgtaaggtacaaggggatgttctccttttggagccaaaacaaactggcttcatgataatctgctatacagaaatctcacatgcaagacttggttgctaattaaattacactgtattagtgattgtttggaatcgttctatttgttagagcatctccaacaaaagtcctaaacatggtcctattttgaaatgtaggtctccaacactaaaaaaccgctccaacgaaagtcctatttcacaaaaatccatcaaacaattttaggacccggtgtcaggtcctaaatataggaccccatatgatagagccatatcctcgttttatacactatttctaacattttattttataaataacatgatctatttttttaataacatgatataggactcaactattggaactacaaatgttttttatgaccctaaatattttaaattaggtcctattttaatttttaatactcaaatgtataactccttgttggagatgctcttaccatgtttgttttgcctgtatctgaaattttagagatcgtgttttcaaattttgatcagcaaagtgtttgtatatttgagtttctgttattattttctcactaaatcgtgtaattttcttatcaatttcattatgtgtttggcattattaattccatttgagatcatttacacacctacactgtagagactggtttggtcttctgtacttcatatatgttggaattgcagcgattatagtaacgacaag

SEQ ID NO: 23392 - DNA, 2158 bp, Zea Mays
aagaaaccgcgtctacagcacagaggcggcggtgcctagggcacagagaaggcggcggcgacatctatactggctgaccggcgccattccatcggtgtccgcttctcgcaggtcatgtgtgacctgcttggtgtggttgctcgacactctcctcaattggtgatattttcttttggagcccaagttcttcgtctaaggcatgactggacatggcattttggcgacatcagaatagcacatgctgctagtgttgtttgatattagagacactttttgatttgcttgcatgttttattttcagtttgaggggcacgagtggtcggacttgtttcagtttcagaaaactagggacacttcttttagtttcagaattgagagaagtgtattttagtttcaggattcataatgatagggacacttcactcagcatatgttcggttgtgattaaaaccatggttgtggacgttctccatagcatctttctactttattttagtttcatgattcaaaatgctagtgacacttctttctatttttattttatagaaagcaacattgtacatggcaggtctatgtaagcccactaggcaacgttttacagtgttgccaggtctatgtacagccggtctctagtgggcttacagtgttgcttccttgttgaattatgttgcatatatggcggggattaaccgaacaaacattttgagacaggtatttaaaccataaagatattaaatcccaaagggattaagtgaaaaggagggatccactcaatccctccctggattagatccacttggggaattaatccattgcaaccgaacaagcccttaaggggaaccaaaatttcagaagataggtatgagagttataaactattcttggaagaaaaggtgaggctacctgcacttgtttggatctcacagcaggaaacgagttgatgttgctaatccttcactaaaataggaaaactaggcagttttctagttaaattccatcttagggataggccctttgtagttagtacttacgaatgagatggacatgcaccctttctcttgatgcacacaagatttaatggtacaatatgaatacaatatgataacttccatgacatttcaaaatatatagttccactttagtaaaatagttttggatgcatttgctacaatttactgcatattcaaattgaggctaaccttgtggcgtcgataaccttgaggctagtcttttgtatgcatttgctacaatttagtgcattttctacacaaaggacgaggaggggtgggtgctgattcacttagtggcaagcttcgactactctcaaatcatcgacatcctgcttgagcgaagtatgagactgacgcggcatatcttatggtgagcgtgctgaacacgaaggacgaggagtggtgggcgctgattcactcagtggcaagcttcgactactctcaaatcatcgacatcctgcttgagcgaagtatgagactgacgcggcatatcttatggtgagcgtgctgaacacgaaggacgcgtaggggtgggcgctgattcactcagtggcaagcttcgactactctcaaatcatcgacatcctgcttgagcgaagcatatcttatggtgagcgtgctgaacacgaaggacgcgtaggggtgggcgctgattcaaccagtggcaagcttcgactactctcaaatcatcgacatcctgcttgagcgaagtatgagaatgacgcggcatatcttatggtgagcgtgctgagcacgaaggacgtggaggggtgggcgccgattcactccatggcgtgctccgacaactctcaaatcatcgacatccaccttgagcgatctgtattcggttcaagcggctttgatgcagctccagctgaccatcctcttgtcagtgggaatggttacgagcatacctcatgcactatttgctgagttaattggataagaggtttgcttatgcttgtgaggaagacaacaagagttcaattagtcgaacatgaaaatagtctaaatgcttgcgcttaagcggggaaaaacaataattcttcctattgtgatggcaaaaggtgtcctcgaaaagaacagaaccaaaaaatgttcctattgtcacggctcaacctcatagaaaatcttgagttggcgttttt

SEQ ID NO: 23393 - DNA, 2904 bp, Zea Mays
cgcgtctacagcacagaggcggcggtgcctagggcacagagaaggcggcggcgacatctatactggctgaccggcgccattccatcggtgtccgcttctcgcaggtcatgtgtgacctgcttggtgtggttgctcgacactctcctcaattggtgatattttcttttggagcccaagttcttcgtctaaggcatgactggacatggcattttggcgacatcagaatagcacatgctgctagtgttgtttgatattagagacactttttgatttgcttgcatgttttattttcagtttgaggggcacgagtggtcggacttgtttcagtttcagaaaactagggacacttcttttagtttcagaattgagagaagtgtattttagtttcaggattcataatgatagggacacttcactcagcatatgttcggttgtgattaaaaccatggttgtggacgttctccatagcatctttctactttattttagtttcatgattcaaaatgctagtgacacttctttctatttttattttatagaaagcaacattgtacatggcaggtctatgtaagcccactaggcaacgttttacagtgttgccaggtctatgtacagccggtctctagtgggcttacagtgttgcttccttgttgaattatgttgcatatatggcggggattaaccgaacaaacattttgagacaggtatttaaaccataaagatattaaatcccaaagggattaagtgaaaaggagggatccactcaatccctccctggattagatccacttggggaattaatccattgcaaccgaacaagcccttaaggggaaccaaaatttcagaagataggtatgagagttataaactattcttggaagaaaaggtgaggctacctgcacttgtttggatctcacagcaggaaacgagttgatgttgctaatccttcactaaaataggaaaactaggcagttttctagttaaattccatcttagggataggccctttgtagttagtacttacgaatgagatggacatgcaccctttctcttgatgcacacaagatttaatggtacaatatgaatacaatatgataacttccatgacatttcaaaatatatagttccactttagtaaaatagttttggatgcatttgctacaatttactgcatattcaaattgaggctaaccttgtggcgtcgataaccttgaggctagtcttttgtatgcatttgctacaatttagtgcattttctacacaaaggacgaggaggggtgggtgctgattcacttagtggcaagcttcgactactctcaaatcatcgacatcctgcttgagcgaagcatatcttatggtgagcgtgctgaacacgaaggacgaggagtggtgggcgctgattcactcagtggcaagcttcgactactctcaaatcatcgacatcctgcttgagcgaagtatgagactgacgcggcatatcttatggtgagcgtgctgaacacgaaggacgcgtaggggtgggcgctgattcactcagtggcaagcttcgactactctcaaatcatcgacatcctgcttgagcgaagcatatcttatggtgagcgtgctgaacacgaaggacgcgtaggggtgggcgctgattcaaccagtggcaagcttcgactactctcaaatcatcgacatcctgcttgagcgaagtatgagaatgacgcggcatatcttatggtgagcgtgctgagcacgaaggacgtggaggggtgggcgccgattcactccatggcgtgctccgacaactctcaaatcatcgacatccaccttgagcgatgtatgagaccagcacgatacatctgtattcggttcaagcggctttgatgcagctccagctgaccatcctcttgtcagtgggaatggttacgagcatacctcatgcactatttgctgagttaattggataagaggtttgcttatgcttgtatccttgatgtatgttcatatacattcgatatgtcacaaactaaactttagtgaggaaaaccaaacaccctctaaaaatgttgcaccacaagagatggttcctgcactcaatacattggaaccaatcaaatgtactaccagctgcggcaaagaagccatttgccttgctgtcgcgctagttccccctgtaaggtacaaggggatgttctccttttggagccaaaacaaactggcttcatgataatctgctatacagaaatctcacatgcaagacttggttgctaattaaattacactgtattagtgattgtttggaatcgttctatttgttagagcatctccaacaaaagtcctaaacatggtcctattttgaaatgtaggtctccaacactaaaaaaccgctccaacgaaagtcctatttcacaaaaatccatcaaacaattttaggacccggtgtcaggtcctaaatataggaccccatatgatagagccatatcctcgttttatacactatttctaacattttattttataaataacatgatctatttttttaataacatgatataggactcaactattggaactacaaatgttttttatgaccctaaatattttaaattaggtcctattttaatttttaatactcaaatgtataactccttgttggagatgctcttaccatgtttgttttgcctgtatctgaaattttagagatcgtgttttcaaattttgatcagcaaagtgtttgtatatttgagtttctgttattattttctcactaaatcgtgtaattttcttatcaatttcattatgtgtttggcattattaattccatttgagatcatttacacacctacactgtagagactggtttggtcttctgtacttcatatatgttggaattgcagcgattatagtaacgacaag

SEQ ID NO: 23394 - DNA, 1922 bp, Zea Mays
gcgtctacagcacagaggcggcggtgcctagggcacagagaaggcggcggcgacatctatactggctgaccggcgccattccatcggtgtccgcttctcgcaggtcatgtgtgacctgcttggtgtggttgctcgacactctcctcaattggtgatattttcttttggagcccaagttcttcgtctaaggcatgactggacatggcattttggcgacatcagaatagcacatgctgctagtgttgtttgatattagagacactttttgatttgcttgcatgttttattttcagtttgaggggcacgagtggtcggacttgtttcagtttcagaaaactagggacacttcttttagtttcagaattgagagaagtgtattttagtttcaggattcataatgatagggacacttcactcagcatatgttcggttgtgattaaaaccatggttgtggacgttctccatagcatctttctactttattttagtttcatgattcaaaatgctagtgacacttctttctatttttattttatagaaagcaacattgtacatggcaggtctatgtaagcccactaggcaacgttttacagtgttgccaggtctatgtacagccggtctctagtgggcttacagtgttgcttccttgttgaattatgttgcatatatggcggggattaaccgaacaaacattttgagacaggtatttaaaccataaagatattaaatcccaaagggattaagtgaaaaggagggatccactcaatccctccctggattagatccacttggggaattaatccattgcaaccgaacaagcccttaaggggaaccaaaatttcagaagataggtatgagagttataaactattcttggaagaaaaggtgaggctacctgcacttgtttggatctcacagcaggaaacgagttgatgttgctaatccttcactaaaataggaaaactaggcagttttctagttaaattccatcttagggataggccctttgtagttagtacttacgaatgagatggacatgcaccctttctcttgatgcacacaagatttaatggtacaatatgaatacaatatgataacttccatgacatttcaaaatatatagttccactttagtaaaatagttttggatgcatttgctacaatttactgcatattcaaattgaggctaaccttgtggcgtcgataaccttgaggctagtcttttgtatgcatttgctacaatttagtgcattttctacacaaaggacgaggaggggtgggtgctgattcacttagtggcaagcttcgactactctcaaatcatcgacatcctgcttgagcgaagcatatcttatggtgagcgtgctgaacacgaaggacgaggagtggtgggcgctgattcactcagtggcaagcttcgactactctcaaatcatcgacatcctgcttgagcgaagcatatcttatggtgagcgtgctgaacacgaaggacgcgtaggggtgggcgctgattcactcagtggcaagcttcgactactctcaaatcatcgacatcctgcttgagcgaagcatatcttatggtgagcgtgctgaacacgaaggacgcgtaggggtgggcgctgattcaaccagtggcaagcttcgactactctcaaatcatcgacatcctgcttgagcgaagtatgagaatgacgcggcatatcttatggtgagcgtgctgagcacgaaggacgtggaggggtgggcgccgattcactccatggcgtgctccgacaactctcaaatcatcgacatccaccttgagcgatgtatgagaccagcacgatacatctgtattcggttcaagcggctttgatgcagctccagctgaccatcctcttgtcagtgggaatgcccaccgttgggcatccgcaagacacgcg

SEQ ID NO: 23395 - DNA, 1035 bp, Zea Mays
cagcacagaggcggcggtgcctagggcacagagaaggcggcggcgacatctatactggctgaccggcgccattccatcggtgtccgcttctcgcaggtcatgtgtgacctgcttggtgtggttgctcgacactctcctcaattggtgatattttcttttggagcccaagttcttcgtctaaggacgaggaggggtgggtgctgattcacttagtggcaagcttcgactactctcaaatcatcgacatcctgcttgagcgaagcatatcttatggtgagcgtgctgaacacgaaggacgaggagtggtgggcgctgattcactcagtggcaagcttcgactactctcaaatcatcgacatcctgcttgagcgaagtatgagactgacgcggcatatcttatggtgagcgtgctgaacacgaaggacgcgtaggggtgggcgctgattcactcagtggcaagcttcgactactctcaaatcatcgacatcctgcttgagcgaagcatatcttatggtgagcgtgctgaacacgaaggacgcgtaggggtgggcgctgattcaaccagtggcaagcttcgactactctcaaatcatcgacatcctgcttgagcgaagcatatcttatggtgagcgtgctgagcacgaaggacgtggaggggtgggcgccgattcactccatggcgtgctccgacaactctcaaatcatcgacatccaccttgagcgatctgtattcggttcaagcggctttgatgcagctccagctgaccatcctcttgtcagtgggaatggttacgagcatacctcatgcactatttgctgagttaattggataagaggtttgcttatgcttgtgaggaagacaacaagagttcaattagtcgaacatgaaaatagtctaaatgcttgcgcttaagcggggaaaaacaataattcttcctattgtgatggcaaaaggtgtcctcgaaaagaacagaaccaaaaaatgttcctattgtcacggctcaacctcatagaaaatcttgagttggcgttttt

SEQ ID NO: 23396 - DNA, 2203 bp, Zea Mays
gaggcggcggtgcctagggcacagagaaggcggcggcgacatctatactggctgaccggcgccattccatcggtgtccgcttctcgcaggtcatgtgtgacctgcttggtgtggttgctcgacactctcctcaattggtgatattttcttttggagcccaagttcttcgtctaaggcatgactggacatggcattttggcgacatcagaatagcacatgctgctagtgttgtttgatattagagacactttttgatttgcttgcatgttttattttcagtttgaggggcacgagtggtcggacttgtttcagtttcagaaaactagggacacttcttttagtttcagaattgagagaagtgtattttagtttcaggattcataatgatagggacacttcactcagcatatgttcggttgtgattaaaaccatggttgtggacgttctccatagcatctttctactttattttagtttcatgattcaaaatgctagtgacacttctttctatttttattttatagaaagcaacattgtacatggcaggtctatgtaagcccactaggcaacgttttacagtgttgccaggtctatgtacagccggtctctagtgggcttacagtgttgcttccttgttgaattatgttgcatatatggcggggattaaccgaacaaacattttgagacaggtatttaaaccataaagatattaaatcccaaagggattaagtgaaaaggagggatccactcaatccctccctggattagatccacttggggaattaatccattgcaaccgaacaagcccttaaggggaaccaaaatttcagaagataggtatgagagttataaactattcttggaagaaaaggtgaggctacctgcacttgtttggatctcacagcaggaaacgagttgatgttgctaatccttcactaaaataggaaaactaggcagttttctagttaaattccatcttagggataggccctttgtagttagtacttacgaatgagatggacatgcaccctttctcttgatgcacacaagatttaatggtacaatatgaatacaatatgataacttccatgacatttcaaaatatatagttccactttagtaaaatagttttggatgcatttgctacaatttactgcatattcaaattgaggctaaccttgtggcgtcgataaccttgaggctagtcttttgtatgcatttgctacaatttagtgcattttctacacaaaggacgaggaggggtgggtgctgattcacttagtggcaagcttcgactactctcaaatcatcgacatcctgcttgagcgaagtatgagactgacgcggtacgtgtgggcaaactgtactatttttactacaaatttctaatattagttggcgcaaaattgataggcatatcttatggtgagcgtgctgaacacgaaggacgaggagtggtgggcgctgattcactcagtggcaagcttcgactactctcaaatcatcgacatcctgcttgagcgaagcatatcttatggtgagcgtgctgaacacgaaggacgcgtaggggtgggcgctgattcactcagtggcaagcttcgactactctcaaatcatcgacatcctgcttgagcgaagtatgagactaacgcggcatatcttatggtgagcgtgctgaacacgaaggacgcgtaggggtgggcgctgattcaaccagtggcaagcttcgactactctcaaatcatcgacatcctgcttgagcgaagtatgagaatgacgcggcatatcttatggtgagcgtgctgagcacgaaggacgtggaggggtgggcgccgattcactccatggcgtgctccgacaactctcaaatcatcgacatccaccttgagcgatctgtattcggttcaagcggctttgatgcagctccagctgaccatcctcttgtcagtgggaatggttacgagcatacctcatgcactatttgctgagttaattggataagaggtttgcttatgcttgtgaggaagacaacaagagttcaattagtcgaacatgaaaatagtctaaatgcttgcgcttaagcggggaaaaacaataattcttcctattgtgatggcaaaaggtgtcctcgaaaagaacagaaccaaaaaatgttcctattgtcacggctcaacctcatagaaaatcttgagttggcgttttt

SEQ ID NO: 23397 - DNA, 1006 bp, Zea Mays
gcggtgcctagggcacagagaaggcggcggcgacatctatactggctgaccggcgccattccatcggtgtccgcttctcgcaggtcatgtgtgacctgcttggtgtggttgctcgacactctcctcaattggtgatattttcttttggagcccaagttcttcgtctaaggacgaggaggggtgggtgctgattcacttagtggcaagcttcgactactctcaaatcatcgacatcctgcttgagcgaagcatatcttatggtgagcgtgctgaacacgaaggacgaggagtggtgggcgctgattcactcagtggcaagcttcgactactctcaaatcatcgacatcctgcttgagcgaagcatatcttatggtgagcgtgctgaacacgaaggacgcgtaggggtgggcgctgattcactcagtggcaagcttcgactactctcaaatcatcgacatcctgcttgagcgaagcatatcttatggtgagcgtgctgaacacgaaggacgcgtaggggtgggcgctgattcaaccagtggcaagcttcgactactctcaaatcatcgacatcctgcttgagcgaagcatatcttatggtgagcgtgctgagcacgaaggacgtggaggggtgggcgccgattcactccatggcgtgctccgacaactctcaaatcatcgacatccaccttgagcgatctgtattcggttcaagcggctttgatgcagctccagctgaccatcctcttgtcagtgggaatggttacgagcatacctcatgcactatttgctgagttaattggataagaggtttgcttatgcttgtgaggaagacaacaagagttcaattagtcgaacatgaaaatagtctaaatgcttgcgcttaagcggggaaaaacaataattcttcctattgtgatggcaaaaggtgtcctcgaaaagaacagaaccaaaaaatgttcctattgtcacggctcaacctcatagaaaatcttgagttggcgttttt

SEQ ID NO: 23398 - DNA, 2338 bp, Zea Mays
gtgcctagggcacagagaaggcggcggcgacatctatactggctgaccggcgccattccatcggtgtccgcttctcgcagattgctacctgtagatctttgcatcgatgtggccggccaatggagtactcccaagtggtaggcaactcgtcgatctacagtatagagtccaacatttgggacttgcttgtttcagcgccccctcttcagttattgatctctttcctgggcccttgttgttgtggaataatgtgcgacattggctgcaaggtcatgtgtgacctgcttggtgtggttgctcgacactctcctcaattggtgatattttcttttggagcccaagttcttcgtctaaggcatgactggacatggcattttggcgacatcagaatagcacatgctgctagtgttgtttgatattagagacactttttgatttgcttgcatgttttattttcagtttgaggggcacgagtggtcggacttgtttcagtttcagaaaactagggacacttcttttagtttcagaattgagagaagtgtattttagtttcaggattcataatgatagggacacttcactcagcatatgttcggttgtgattaaaaccatggttgtggacgttctccatagcatctttctactttattttagtttcatgattcaaaatgctagtgacacttctttctatttttattttatagaaagcaacattgtacatggcaggtctatgtaagcccactaggcaacgttttacagtgttgccaggtctatgtacagccggtctctagtgggcttacagtgttgcttccttgttgaattatgttgcatatatggcggggattaaccgaacaaacattttgagacaggtatttaaaccataaagatattaaatcccaaagggattaagtgaaaaggagggatccactcaatccctccctggattagatccacttggggaattaatccattgcaaccgaacaagcccttaaggggaaccaaaatttcagaagataggtatgagagttataaactattcttggaagaaaaggtgaggctacctgcacttgtttggatctcacagcaggaaacgagttgatgttgctaatccttcactaaaataggaaaactaggcagttttctagttaaattccatcttagggataggccctttgtagttagtacttacgaatgagatggacatgcaccctttctcttgatgcacacaagatttaatggtacaatatgaatacaatatgataacttccatgacatttcaaaatatatagttccactttagtaaaatagttttggatgcatttgctacaatttactgcatattcaaattgaggctaaccttgtggcgtcgataaccttgaggctagtcttttgtatgcatttgctacaatttagtgcattttctacacaaaggacgaggaggggtgggtgctgattcacttagtggcaagcttcgactactctcaaatcatcgacatcctgcttgagcgaagcatatcttatggtgagcgtgctgaacacgaaggacgaggagtggtgggcgctgattcactcagtggcaagcttcgactactctcaaatcatcgacatcctgcttgagcgaagtatgagactgacgcggcatatcttatggtgagcgtgctgaacacgaaggacgcgtaggggtgggcgctgattcactcagtggcaagcttcgactactctcaaatcatcgacatcctgcttgagcgaagtatgagactaacgcggcatatcttatggtgagcgtgctgaacacgaaggacgcgtaggggtgggcgctgattcaaccagtggcaagcttcgactactctcaaatcatcgacatcctgcttgagcgaagtatgagaatgacgcggcatatcttatggtgagcgtgctgagcacgaaggacgtggaggggtgggcgccgattcactccatggcgtgctccgacaactctcaaatcatcgacatccaccttgagcgatgtatgagaccagcacgatacatctgtattcggttcaagcggctttgatgcagctccagctgaccatcctcttgtcagtgggaatggttacgagcatacctcatgcactatttgctgagttaattggataagaggtttgcttatgcttgtgaggaagacaacaagagttcaattagtcgaacatgaaaatagtctaaatgcttgcgcttaagcggggaaaaacaataattcttcctattgtgatggcaaaaggtgtcctcgaaaagaacagaaccaaaaaatgttcctattgtcacggctcaacctcatagaaaatcttgagttggcgttttt

SEQ ID NO: 23399 - DNA, 2109 bp, Zea Mays
gcctagggcacagagaaggcggcggcgacatctatactggctgaccggcgccattccatcggtgtccgcttctcgcaggtcatgtgtgacctgcttggtgtggttgctcgacactctcctcaattggtgatattttcttttggagcccaagttcttcgtctaaggcatgactggacatggcattttggcgacatcagaatagcacatgctgctagtgttgtttgatattagagacactttttgatttgcttgcatgttttattttcagtttgaggggcacgagtggtcggacttgtttcagtttcagaaaactagggacacttcttttagtttcagaattgagagaagtgtattttagtttcaggattcataatgatagggacacttcactcagcatatgttcggttgtgattaaaaccatggttgtggacgttctccatagcatctttctactttattttagtttcatgattcaaaatgctagtgacacttctttctatttttattttatagaaagcaacattgtacatggcaggtctatgtaagcccactaggcaacgttttacagtgttgccaggtctatgtacagccggtctctagtgggcttacagtgttgcttccttgttgaattatgttgcatatatggcggggattaaccgaacaaacattttgagacaggtatttaaaccataaagatattaaatcccaaagggattaagtgaaaaggagggatccactcaatccctccctggattagatccacttggggaattaatccattgcaaccgaacaagcccttaaggggaaccaaaatttcagaagataggtatgagagttataaactattcttggaagaaaaggtgaggctacctgcacttgtttggatctcacagcaggaaacgagttgatgttgctaatccttcactaaaataggaaaactaggcagttttctagttaaattccatcttagggataggccctttgtagttagtacttacgaatgagatggacatgcaccctttctcttgatgcacacaagatttaatggtacaatatgaatacaatatgataacttccatgacatttcaaaatatatagttccactttagtaaaatagttttggatgcatttgctacaatttactgcatattcaaattgaggctaaccttgtggcgtcgataaccttgaggctagtcttttgtatgcatttgctacaatttagtgcattttctacacaaaggacgaggaggggtgggtgctgattcacttagtggcaagcttcgactactctcaaatcatcgacatcctgcttgagcgaagtatgagactgacgcggcatatcttatggtgagcgtgctgaacacgaaggacgaggagtggtgggcgctgattcactcagtggcaagcttcgactactctcaaatcatcgacatcctgcttgagcgaagcatatcttatggtgagcgtgctgaacacgaaggacgcgtaggggtgggcgctgattcactcagtggcaagcttcgactactctcaaatcatcgacatcctgcttgagcgaagtatgagactaacgcggcatatcttatggtgagcgtgctgaacacgaaggacgcgtaggggtgggcgctgattcaaccagtggcaagcttcgactactctcaaatcatcgacatcctgcttgagcgaagcatatcttatggtgagcgtgctgagcacgaaggacgtggaggggtgggcgccgattcactccatggcgtgctccgacaactctcaaatcatcgacatccaccttgagcgatctgtattcggttcaagcggctttgatgcagctccagctgaccatcctcttgtcagtgggaatggttacgagcatacctcatgcactatttgctgagttaattggataagaggtttgcttatgcttgtgaggaagacaacaagagttcaattagtcgaacatgaaaatagtctaaatgcttgcgcttaagcggggaaaaacaataattcttcctattgtgatggcaaaaggtgtcctcgaaaagaacagaaccaaaaaatgttcctattgtcacggctcaacctcatagaaaatcttgagttggcgttttt

SEQ ID NO: 23400 - DNA, 2340 bp, Zea Mays
ccattccatcggtgtccgcttctcgcaggtagtactcacatcctcctcctctcctttccatcgcgtgcatctttccattcgtcgtcgtcgcatgccatttccattccatcgcgtgcatctttccatgcgcctgaggctagcgaagctggtgctgtgtgcttggtgtggttgctccacaccgacggtttcgttgtgctgtgtgctttccgcagcactgttgaggctagcgaagctggtgctggacgccgacctgagcgcgccgtgcgacgccctggtgctgttcgccggtcatgtgtgacctgcttggtgtggttgctcgacactctcctcaattggtgatattttcttttggagcccaagttcttcgtctaaggcatgactggacatggcattttggcgacatcagaatagcacatgctgctagtgttgtttgatattagagacactttttgatttgcttgcatgttttattttcagtttgaggggcacgagtggtcggacttgtttcagtttcagaaaactagggacacttcttttagtttcagaattgagagaagtgtattttagtttcaggattcataatgatagggacacttcactcagcatatgttcggttgtgattaaaaccatggttgtggacgttctccatagcatctttctactttattttagtttcatgattcaaaatgctagtgacacttctttctatttttattttatagaaagcaacattgtacatggcaggtctatgtaagcccactaggcaacgttttacagtgttgccaggtctatgtacagccggtctctagtgggcttacagtgttgcttccttgttgaattatgttgcatatatggcggggattaaccgaacaaacattttgagacaggtatttaaaccataaagatattaaatcccaaagggattaagtgaaaaggagggatccactcaatccctccctggattagatccacttggggaattaatccattgcaaccgaacaagcccttaaggggaaccaaaatttcagaagataggtatgagagttataaactattcttggaagaaaaggtgaggctacctgcacttgtttggatctcacagcaggaaacgagttgatgttgctaatccttcactaaaataggaaaactaggcagttttctagttaaattccatcttagggataggccctttgtagttagtacttacgaatgagatggacatgcaccctttctcttgatgcacacaagatttaatggtacaatatgaatacaatatgataacttccatgacatttcaaaatatatagttccactttagtaaaatagttttggatgcatttgctacaatttactgcatattcaaattgaggctaaccttgtggcgtcgataaccttgaggctagtcttttgtatgcatttgctacaatttagtgcattttctacacaaaggacgaggaggggtgggtgctgattcacttagtggcaagcttcgactactctcaaatcatcgacatcctgcttgagcgaagcatatcttatggtgagcgtgctgaacacgaaggacgaggagtggtgggcgctgattcactcagtggcaagcttcgactactctcaaatcatcgacatcctgcttgagcgaagtatgagactgacgcggcatatcttatggtgagcgtgctgaacacgaaggacgcgtaggggtgggcgctgattcactcagtggcaagcttcgactactctcaaatcatcgacatcctgcttgagcgaagcatatcttatggtgagcgtgctgaacacgaaggacgcgtaggggtgggcgctgattcaaccagtggcaagcttcgactactctcaaatcatcgacatcctgcttgagcgaagtatgagaatgacgcggcatatcttatggtgagcgtgctgagcacgaaggacgtggaggggtgggcgccgattcactccatggcgtgctccgacaactctcaaatcatcgacatccaccttgagcgatgtatgagaccagcacgatacatctgtattcggttcaagcggctttgatgcagctccagctgaccatcctcttgtcagtgggaatggttacgagcatacctcatgcactatttgctgagttaattggataagaggtttgcttatgcttgtgaggaagacaacaagagttcaattagtcgaacatgaaaatagtctaaatgcttgcgcttaagcggggaaaaacaataattcttcctattgtgatggcaaaaggtgtcctcgaaaagaacagaaccaaaaaatgttcctattgtcacggctcaacctcatagaaaatcttgagttggcgttttt

SEQ ID NO: 23401 - DNA, 2046 bp, Zea Mays
ttacaatcttcatagtcatgttgcccagaagctctcaaattttcttggtcatgtgtgacctgcttggtgtggttgctcgacactctcctcaattggtgatattttcttttggagcccaagttcttcgtctaaggcatgactggacatggcattttggcgacatcagaatagcacatgctgctagtgttgtttgatattagagacactttttgatttgcttgcatgttttattttcagtttgaggggcacgagtggtcggacttgtttcagtttcagaaaactagggacacttcttttagtttcagaattgagagaagtgtattttagtttcaggattcataatgatagggacacttcactcagcatatgttcggttgtgattaaaaccatggttgtggacgttctccatagcatctttctactttattttagtttcatgattcaaaatgctagtgacacttctttctatttttattttatagaaagcaacattgtacatggcaggtctatgtaagcccactaggcaacgttttacagtgttgccaggtctatgtacagccggtctctagtgggcttacagtgttgcttccttgttgaattatgttgcatatatggcggggattaaccgaacaaacattttgagacaggtatttaaaccataaagatattaaatcccaaagggattaagtgaaaaggagggatccactcaatccctccctggattagatccacttggggaattaatccattgcaaccgaacaagcccttaaggggaaccaaaatttcagaagataggtatgagagttataaactattcttggaagaaaaggtgaggctacctgcacttgtttggatctcacagcaggaaacgagttgatgttgctaatccttcactaaaataggaaaactaggcagttttctagttaaattccatcttagggataggccctttgtagttagtacttacgaatgagatggacatgcaccctttctcttgatgcacacaagatttaatggtacaatatgaatacaatatgataacttccatgacatttcaaaatatatagttccactttagtaaaatagttttggatgcatttgctacaatttactgcatattcaaattgaggctaaccttgtggcgtcgataaccttgaggctagtcttttgtatgcatttgctacaatttagtgcattttctacacaaaggacgaggaggggtgggtgctgattcacttagtggcaagcttcgactactctcaaatcatcgacatcctgcttgagcgaagcatatcttatggtgagcgtgctgaacacgaaggacgaggagtggtgggcgctgattcactcagtggcaagcttcgactactctcaaatcatcgacatcctgcttgagcgaagcatatcttatggtgagcgtgctgaacacgaaggacgcgtaggggtgggcgctgattcactcagtggcaagcttcgactactctcaaatcatcgacatcctgcttgagcgaagcatatcttatggtgagcgtgctgaacacgaaggacgcgtaggggtgggcgctgattcaaccagtggcaagcttcgactactctcaaatcatcgacatcctgcttgagcgaagcatatcttatggtgagcgtgctgagcacgaaggacgtggaggggtgggcgccgattcactccatggcgtgctccgacaactctcaaatcatcgacatccaccttgagcgatctgtattcggttcaagcggctttgatgcagctccagctgaccatcctcttgtcagtgggaatggttacgagcatacctcatgcactatttgctgagttaattggataagaggtttgcttatgcttgtgaggaagacaacaagagttcaattagtcgaacatgaaaatagtctaaatgcttgcgcttaagcggggaaaaacaataattcttcctattgtgatggcaaaaggtgtcctcgaaaagaacagaaccaaaaaatgttcctattgtcacggctcaacctcatagaaaatcttgagttggcgttttt

SEQ ID NO: 23402 - DNA, 1958 bp, Zea Mays
ctccgtcaaaatcattttcatcttttttacatggacagacttccatgacaaatctcacaggtcacccttccaccacatcaccaccgcattcacatcgaacaacaacaacacaaggcgaggccgagtcgagtagcgcgaccacacacacacaccgcgtcgagtctcacacggcacggcagggcacgcgtcaaggcgatccgttccatgccgccgccgctgccgctgccggaggaggaggaggaggagaagccgctgccgcggcgaaagccagagccgaagccgcctaagcccaagcccaccaagaggcccaggccgattgggccgctgcctcagcgggacggggaccccggcggcggcgtcgccacgtcccctccgctcctcttctgcggcgacggctgctccggcccgtgcgcctacttgccccagtgccagccgccgcctccgccgtcccctggggccaccgtgcgcctccgctcgagccggctcccgaccccgctcgtcgcgctctcggcgtcgctcctcaccgtgtccgcggtcctcctgctcgcgctgctcgtccactgcctggtcgcgcggcggcggcgggcgcaaggcgcgccgctggcccaccacgccgagacgggagggggccaggttctggctggcgcggtggcgcagcaggccggcgagggggaggacgaggaggccgccggcggcggcgtgcaccacgtgtggtacatacgcaccaagggcctcgacgagcgcgccatctcggcgatcgccgcggtcgtgtacgacgccaagaagcgcggcgccggcgccagctccgacggcggcggcagctgcgcggtgtgcctcgcggagttccgccacggcgagacgctgcgcctgctgccgcgctgcgcccacgccttccaccgcgcctgcatcgacacctggctccgcgcccacgtcaactgcccgctctgccgcgcgcccgtgcaggtcgccgccgccgccgctaaccccaaccccgcaccgggaacgtccgggcgccgggaagagggtaaccctgctgctggcgccgtcatcggtggcgttcaaacacaggaccccgcgcgcggcggcggctttcctgaccgggccgtcaggcgggccgcgtcgtccatggcggcgctgccgcggcgggcgtggccggacgtcccgctgcgtgcgccggcgtcgagcagcttccgcgacggcgaggacgacgtgacggggctcggcaagatcaggcggctcctcaagctctcggacgcgctggagatggccggggtcggggtacaccggtccgcctcgttcggcgccgctacctgccagcgcttgccgccaaggccggggccgtcggcgcccggcgtcagcgccgacgagacgtcatagcgaaccgactgaggccgacgacgaggccatcggtggtctggtgaaacttgcagctttgggagctgggagcttggaggagtgaaggttggtgttggtttgccaagtttttgtgtgtgccgggcacgagacatgagaaggtaaaaaatgatatcttttccatgtttcttgtataatcgcttcgtcagcagtaacaagtaaataactcgtgagcctgtgcatgcactgcggagcgtcaggaattgtaagtaagaaagaatccttgacggaagtagttttgtatgcgaaatttacagcacgaatacatgtgtaagatacgtgtaagggcatgttcgttttggagcggaacgaagggaattggaggggctattcaaaattgaataggaaggtatttaatcctctccaatcgacatagcctaagagatcactcatgttcgttatgggtacatgaatgatctgaagttatatgttgctcagatttgtttcactcctatctagtttctctgtatcaaacatggccttttaaggccctgtttactattacttgagcttcaaaatttggtgaggtcgatgaagagcttcag

SEQ ID NO: 23403 - DNA, 921 bp, Zea Mays
tttcgaccagaatccgccaccagcagctcctgctcctccgggctctccccctccgcggctccgcccggaccggctcgcagctggccggcgccaggggctccctcgtggcctcgcccaggactccaggaggccccctggcctccggctgcgctccgtgtcggtgcccggtggctccgtttgctcgccgactgccattgcgtcagacgccagacagcggttggcgacaatgctgcagcaggaaatatttggaccgccgggacggtttgcaaattttaggagaattggacgcaagctacagcggagggtcagatccaattcttccttggattctctctctatctagatcactgaagaaccaatggatacagggatggcaagggcagacagcatcatttctgaatagttcttaatctttttatcttttgggggggtgggggtgggcggcatctctaagctttggcttttgaatatgatgcagcaggtagctgagtactcaaagaatcaacaaagtgacaagcacacacatatatgcttggacacaaaagaagctagcatatgcagaaacagaacacacatgtcactttgctttgatctatggactagtgtgattcatctctctttttgtctttctcacacacacacacacacactgtacctctccctttctcttctatcagtcatttcgttcttcaatctgtgtggctatcttctactagtgccgccaattcaacttaactaaggagcttgctgaaggactcaacacacattgctacatcatgcgtacggaggcacgatgcgtccatgtccgcatacttctgctgttctgcgtccacaagaatcggagctcgcgcgcatgcaggaaatgaacacaatgcacgaacagctaaccgaactaactgaatcgcgtgcgcaaagcttaac

SEQ ID NO: 23404 - DNA, 4402 bp, Zea Mays
tttcgaccagaatccgccaccagcagctcctgctcctccgggctctccccctccgcggctccgcccggaccggctcgcagctggccggcgccaggggctccctcgtggcctcgcccaggactccaggaggccccctggcctccggctgcgctccgtgtcggtgcccggtggctccgtttgctcgccgactgccattgcgtcagacgccagacagcggttggcgacaatgctgcagcaggaaatatttggaccgccgggacggtttgcaaattttaggagaattggacgcaagctacagcggagggtcagatccaattcttccttggattctctctctatctagatcactgaagaaccaatggatacagggatggcaagggcagacagcatcatttctgaatagttcttaatctttttatcttttgggggggtgggggtgggcggcatctctaagctttggcttttgaatatgatgcagcaggtagctgagtactcaaagaatcaacaaagtgacaagcacacacatatatgcttggacacaaaagaagctagcatatgcagaaacagaacacacatgtcactttgctttgatctatggactagtgtgattcatctctctttttgtctttctcacacacacacacacacactgtacctctccctttctcttctatcagtcatttcgttcttcaatctgtgtggctatcttctactagtgccgccaattcaacttaactaaggagcttgctgaaggactcaacacacattgctacatcatgcgtacggaggttatcctggcagacaccattgaagcagctgcagaacgaattctgattgagatcagtagcgatgacacacatactgagagaagcaatgtgttctacttcgatggttgggacgggctgggcgcatctgctgtccttagagctgttgcccagcgccttgccacagcttcagaagccccggcaggcctcaagtttgatcaggtcatcaacatcgactgctccaagtgggtgagcaggagagctatgcagagagtgatcgcagaggagctggagcttcccgctgagtttatggagatgatagagacgcgtgatgaggaggacgactaccgtggtgaagaccagagctcccgtgatgtgattccacaagtcatcaacagggagatctaccaaagattacagaaccgtaggttcctggtgatcttttacaacggaagcagtgaggagattgatctagccaatcttggcttccctctgcaggacttgggcttccatttgtactcaagcaacaaggtcctatggacatttcaggggagtttccggctcatgcccatgacaaaagtcaccagggctctagggaccaccggtgttttcctatcagcaacctcaagccaagtgggtcaagacccacatgtgttctggtcctaccttgtgctgcaagaggctgcacagattgttgccagcaaggataacactggtggcagcatcatcggtgatccagcgcaggttgccgagtgcttcttgtacttactggatctatgtctcatgggtcatcacttcatagtggactatgacctggaaactcatggctgcaactactggatatgtgacggcatcatacatgtacaacatgggcagagagaggttgaccgcgacattggattgtggaaagctgttgaagctctgcagcgtgagatgcgaatggatgtggattactaccaccaccatgaccaccaagatatgcctactcacattgtcaagtgtgccgacttcagtccacgctggacttctccaacgtaccgtgtcgttcagatccttgagagggccacgcctgtcagatgcagtcttgatcattatgacaaacttggtgtcctcaagctatcctactgcacatttagcttctcatcgcctccattcctgtgctgccaaagccttagattcctatggctcgaccactgccaggacatgctggagagcggcccagatggagcggcacagatgtgggaggcagatggcatccagcagtgcttccaaaggctgtgggtgctggatgtgcgctacacatgctgtgatcagatcttgtctggacggatgctagagttcatgactcagctgagggtgctaaatgtgatcggagccgaggattgggacatgcgccagttgcaggggcagcttcctaatatctgcaaacttggagtagcaaagtctacaattgaatgtggtacaactctctggaatggtgacttgttggcagggtcgaaacacttgcggtttcttgacctctctggtaacgaaataatcagtagtggaaagagttgcatatctgccacagaaaaaagctgcagcctggagaccatcgtcattcatcaaggatgtgctggactagagaagatctcattggccgggtgtgctcagctagagaatgtactcttgacaggatcattcaatgagctcgtgagccttgatatctcaggatcagctgtgaagaggctggatctcagtgcgatgataatgctgaaacttaatgagctaattctactagactgcaacatgctacgtgcaatcctatggcctccggaaggaagagagagagaatatcctggcaagctgcgcattcgaacaaaaaaggagactaccataggcagtgctactgctccatcaggattgacaatgatgtttggtagtctagtccccgccgaatatttgtggtggtatatttcagtatacgatgaaaggctgctctggtcacttttgcccttaaaacagtatttcagttaccactttgtacatttcgagatttcctctcctggtcgccgaccagatggcttggcatgtacaagtgatgaaatgatcctagaagtgacaaccccagaaggttataacacgtcaatatatgtagacgtcgccaagggccaactgctacatgtgaagggagatgaaggtgattctcctatatccttcacaagggtatggccctgcccacgtgctcctgatttagtcccatcaaactgctacctgcacatacaagactggccacagggaagaaaaccacaacgaactagtcaaaaaactgctaccattactattccagatactatatgcaacaggactggcagcatacatgtgcacgatagcttgtacatcactcggatgccagacccagcaccttctggtgcaatctgggctaatcttttttggtgccgagtggagcgttgccctaaaatggattgtgtattcacaagttcgtccatggtaggtgctgagaacagggacgacaggatcttttggagactggcaacgctatgggtgtcccagcttcccaaggcacggttcatatggagctcgaggaaacacgagatcagcggttattcgtttctggacctagacttcgtgcatgtggacttctgcccccggttgacacatgttcttcccttgtccatggcattgatcagaggaagtggcctggacagtctaacaaccctagagattgtgtggtgtggagatctgagggcagttttccctttggacactgatgcccagagctaccaagatcatcggcgaaaccaggcaatcaccgtggaatttccttcccttcagcgtattcacttgcacgagtcaccaaagctgcatggcttatgtggccgtggaaggatgtacgcaccaaagcttgagagcatggtgatcaggggctgctggaacctcacacgcataccatccgttggcgatggcggcgaccgcattaccaagaaggtgaagtgcgactgtgagaaggagtggtgggacaggctcgagtgggactggcttgaagaaagacaccatccatccctatatgagccaactcatccaaaatattacaagaaaaccttgctcaggacctccgtgctcagatgagcattgctcaagcctaataatggtgatcgatatgggccatgaccagtgtgatgtgctgctctatatatgggccatgatctgtggtcaccagagtgtttgttcttcgatttcacctgcatgtgtgttttggttttgcttgttgtttttcaaatctgtgacatcgcatccacagaatattgttcacttgtttccatggtgtgtggacttccgatcttggattgtggtctgctgatctgcgtcgcaacgcgaactatctgcaaaatgtatcagctcttctcagtagacacataaataaatatgggtgagccaaaatgcatttggttagtagctggatgtgtttgccccctcataatatttgtaactctgtactctccctgggttttctggtgtggcgtgtatttgtcagcattgtgtaaactgaatgactgctcctactgttgtgcttgctcaagctacaaacatatatataaatggatctggacttttgtgtctgcagtagcagaatttgt

SEQ ID NO: 23405 - DNA, 5165 bp, Zea Mays
tttcgaccagaatccgccaccagcagctcctgctcctccgggctctccccctccgcggctccgcccggaccggctcgcagctggccggcgccaggggctccctcgtggcctcgcccaggactccaggaggccccctggcctccggctgcgctccgtgtcggtgcccggtggctccgtttgctcgccgactgccattgcgtcagacgccagacagcggttggcgacaatgctgcagcaggaaatatttggaccgccgggacggtttgcaaattttaggagtatgtagtaactcagaggagtatttcattgtaaaatggcagcagaattgaaatgttgctgagaatatgcagatccagccgttgcgatttgactgagaatttgagatacagcagtctattagattttcataagcctgtctgactgtgtcaaataaggccaattcttttttatgactaattgacctacaaaaccctgtttatattgaacttagtatcatccccactcatgatgaacaccccacaaacttaacccaggagtgcgcaccacgcctccatgcgcccaagccccaggactgcctccgcggcgtcggcggcgtgcaccgtggctccaccctgtccctgatcagaattccgatgccgtggggtagttcgattattattctgtattctgatctttggtaattgattgttcctaatcttgatctttgaattgaattatactctctcatagtgtattagtactgttaataatgcgtgcctagtctttgaatctaggctatctcatgctgtgttggtattgataaagatgcgtgcctgtgtttgtttttcgattttattcacttcgacataaatagtgaagctattaacttaatggttgtcatcatcgattgtgaggattaagctattattatggtttccgttactgatcgctggattagctttgtgtctcatcctgacgttttcttgctgctggatgtcatttgaggtataagaaatattgagcacgagctgaagagattgagagaggtattcatagagctgggaattggacgcaagctacagcggagggtcagatccaattcttccttggattctctctctatctagatcactgaagaaccaatggatacagggatggcaagggcagacagcatcatttctgaatagttcttaatctttttatcttttgggggggtgggggtgggcggcatctctaagctttggcttttgaatatgatgcagcaggtagctgagtactcaaagaatcaacaaagtgacaagcacacacatatatgcttggacacaaaagaagctagcatatgcagaaacagaacacacatgtcactttgctttgatctatggactagtgtgattcatctctctttttgtctttctcacacacacacacacacactgtacctctccctttctcttctatcagtcatttcgttcttcaatctgtgtggctatcttctactagtgccgccaattcaacttaactaaggagcttgctgaaggactcaacacacattgctacatcatgcgtacggaggttatcctggcagacaccattgaagcagctgcagaacgaattctgattgagatcagtagcgatgacacacatactgagagaagcaatgtgttctacttcgatggttgggacgggctgggcgcatctgctgtccttagagctgttgcccagcgccttgccacagcttcagaagccccggcaggcctcaagtttgatcaggtcatcaacatcgactgctccaagtgggtgagcaggagagctatgcagagagtgatcgcagaggagctggagcttcccgctgagtttatggagatgatagagacgcgtgatgaggaggacgactaccgtggtgaagaccagagctcccgtgatgtgattccacaagtcatcaacagggagatctaccaaagattacagaaccgtaggttcctggtgatcttttacaacggaagcagtgaggagattgatctagccaatcttggcttccctctgcaggacttgggcttccatttgtactcaagcaacaaggtcctatggacatttcaggggagtttccggctcatgcccatgacaaaagtcaccagggctctagggaccaccggtgttttcctatcagcaacctcaagccaagtgggtcaagacccacatgtgttctggtcctaccttgtgctgcaagaggctgcacagattgttgccagcaaggataacactggtggcagcatcatcggtgatccagcgcaggttgccgagtgcttcttgtacttactggatctatgtctcatgggtcatcacttcatagtggactatgacctggaaactcatggctgcaactactggatatgtgacggcatcatacatgtacaacatgggcagagagaggttgaccgcgacattggattgtggaaagctgttgaagctctgcagcgtgagatgcgaatggatgtggattactaccaccaccatgaccaccaagatatgcctactcacattgtcaagtgtgccgacttcagtccacgctggacttctccaacgtaccgtgtcgttcagatccttgagagggccacgcctgtcagatgcagtcttgatcattatgacaaacttggtgtcctcaagctatcctactgcacatttagcttctcatcgcctccattcctgtgctgccaaagccttagattcctatggctcgaccactgccaggacatgctggagagcggcccagatggagcggcacagatgtgggaggcagatggcatccagcagtgcttccaaaggctgtgggtgctggatgtgcgctacacatgctgtgatcagatcttgtctggacggatgctagagttcatgactcagctgagggtgctaaatgtgatcggagccgaggattgggacatgcgccagttgcaggggcagcttcctaatatctgcaaacttggagtagcaaagtctacaattgaatgtggtacaactctctggaatggtgacttgttggcagggtcgaaacacttgcggtttcttgacctctctggtaacgaaataatcagtagtggaaagagttgcatatctgccacagaaaaaagctgcagcctggagaccatcgtcattcatcaaggatgtgctggactagagaagatctcattggccgggtgtgctcagctagagaatgtactcttgacaggatcattcaatgagctcgtgagccttgatatctcaggatcagctgtgaagaggctggatctcagtgcgatgataatgctgaaacttaatgagctaattctactagactgcaacatgctacgtgcaatcctatggcctccggaaggaagagagagagaatatcctggcaagctgcgcattcgaacaaaaaaggagactaccataggcagtgctactgctccatcaggattgacaatgatgtttggtagtctagtccccgccgaatatttgtggtggtatatttcagtatacgatgaaaggctgctctggtcacttttgcccttaaaacagtatttcagttaccactttgtacatttcgagatttcctctcctggtcgccgaccagatggcttggcatgtacaagtgatgaaatgatcctagaagtgacaaccccagaaggttataacacgtcaatatatgtagacgtcgccaagggccaactgctacatgtgaagggagatgaaggtgattctcctatatccttcacaagggtatggccctgcccacgtgctcctgatttagtcccatcaaactgctacctgcacatacaagactggccacagggaagaaaaccacaacgaactagtcaaaaaactgctaccattactattccagatactatatgcaacaggactggcagcatacatgtgcacgatagcttgtacatcactcggatgccagacccagcaccttctggtgcaatctgggctaatcttttttggtgccgagtggagcgttgccctaaaatggattgtgtattcacaagttcgtccatggtaggtgctgagaacagggacgacaggatcttttggagactggcaacgctatgggtgtcccagcttcccaaggcacggttcatatggagctcgaggaaacacgagatcagcggttattcgtttctggacctagacttcgtgcatgtggacttctgcccccggttgacacatgttcttcccttgtccatggcattgatcagaggaagtggcctggacagtctaacaaccctagagattgtgtggtgtggagatctgagggcagttttccctttggacactgatgcccagagctaccaagatcatcggcgaaaccaggcaatcaccgtggaatttccttcccttcagcgtattcacttgcacgagtcaccaaagctgcatggcttatgtggccgtggaaggatgtacgcaccaaagcttgagagcatggtgatcaggggctgctggaacctcacacgcataccatccgttggcgatggcggcgaccgcattaccaagaaggtgaagtgcgactgtgagaaggagtggtgggacaggctcgagtgggactggcttgaagaaagacaccatccatccctatatgagccaactcatccaaaatattacaagaaaaccttgctcaggacctccgtgctcagatgagcattgctcaagcctaataatggtgatcgatatgggccatgaccagtgtgatgtgctgctctatatatgggccatgatctgtggtcaccagagtgtttgttcttcgatttcacctgcatgtgtgttttggttttgcttgttgtttttcaaatctgtgacatcgcatccacagaatattgttcacttgtttccatggtgtgtggacttccgatcttggattgtggtctgctgatctgcgtcgcaacgcgaactatctgcaaaatgtatcagctcttctcagtagacacataaataaatatgggtgagccaaaatgcatttggttagtagctggatgtgtttgccccctcataatatttgtaactctgtactctccctgggttttctggtgtggcgtgtatttgtcagcattgtgtaaactgaatgactgctcctactgttgtgcttgctcaagctacaaacatatatataaatggatctggacttttgtgtctgcagtagcagaatttgt

SEQ ID NO: 23406 - DNA, 2540 bp, Zea Mays
gtctaaaccacccattccccgtctcgtgcacctcctccgaaatccgcctcctctcacgcacgcggcccaaccaacctgccccaaaacctagctagatttagaaaaacaaaaaacctgtccccaacccgaaccgtgagatggctgagtacggcgagcgctaccagggcaacggcgaccaggccacggccgagggtggctatgcgcagaccgagtacgccgccggcgccggtggctcgccgccctccgacagcaatccctccgtgttctccgaccacgccgacggccgctcctcccagccccagcatgagacccaatcacatgacagtggttcctccaaatctcaagaaagggaccgagaacgtgataagggcaaggacagggagcgaggcagagaccgtgtccgcgaaaaggagaggggccgagacagggacaaggatcgtgaaagaggtgacagagacagggatcgtgatcgccaccacagggatcgtcgcgagcgcagcgagataagggaacaccgtgatcgttctgatgatcgtgaccgtcgcaggagtcatgattctgagaggagaagagatcgtgacagagatggccatcgtaggcatcgctcccgttccccttctaagggtcgtgaccgtgaccgcagatctagttctcattcacgctctagatcgaagagcaagcgtgtgagtggttttgaccaagcacctacacaacaggcagttcctattgttgctgctggtgttatccctggaggcaaacttggcccacattgtcatcggcttccactggattgagctgactgctgtagctttaatgtcagctgcctggtgtcaccgctcctattcctggggttggggtgcttccaaacttgtataatttggctgcaggacagttcaacccccatgttattcagccacaagccatgacacaacaggctacccggcatgctcggcctgtctatgtgggcggacttcctccaactgctaatgagcagaccgttgccatattcttcaatggagttatggctgctattggaggaaacacagctggtccaggtgatgctgttcccagtcaaccaccgctatggcctaggggcttcattcagcagcatcctttggattgcaacatgatgagaaacattaatttttctaatgcatcctatggtccaacaacaatgtgggctcccattcagacaggaaatataagttccgaatcaaccatgctaccagccacacaatctgcagtatattggaatcattatatgaactttgtcaggaatcctcttggttcagttcaaggaaatccttttccagattcgttttcaggtacaaatactagtacacctttgcagggttcgaatacaataccttcaatacctgtcaacttggagtccgctgctgaacatagtgttcaggacatcaatagtcctataaagacttctgcccctgttacaaaaccaaagaaaacaaaggaacaaaattatactgctgctgaagaccttctactttgcacaacctggttgcaaattagcagtgatcctattgtccacactggacaaaggaagaagggactttgggcacgaatagaaaaaaggtacaacgaacaaaggggcgagtacccttgtagaatgaatcgagcccttagcagcagatgggacaagattagagcagatgttggtaagttctcaggctgttacgcaagagtgctgcgagagaaacaaagtggtttgacagacgacgataagacttccaaggcggcaactttgtttgcacatgaggagaacaaaccatttcattttatgcattgctggcataagctgaagggggaacctaaatgggagagcatttgtcaaggacctttccgaggattacatggaaaagcaattggatcttctggtggtccttttattggtgtagaagaatcagatagtgggtctgctggtttgactggtaaacggcctctctgtcgtgattcttctaaatcagagagaaagaaggctgcgtcatcaacgacgacggaatacttaagccgtcttcaagaattaactgaaaaactaattcagcgcatcatagaaaagggtgagaagaaatataagtacaatgaacaggacatggagctagagaagaagaggttggacttggaagcaaaaaaattaagcattcgtaaaagggaattgagattaaaagaactaagtatggccgaacaacaactcgagatgctggagcgtactcgtgaagacgaggtcgatccagaagtatggagtatgatgaaggagcgcaaaaaacatttgcagcagttcatatttagtttttgctaaatttactgttgtttaacatgtcgtgcttctgtttccatatccggtttgcgaagaaatttataagtgcattgtcttatttgctttctaaaacattataaagttgttgtatgcttatgtcttgcaagacatgtcagtgttattaaagtttgtaacgttaattctgaaaggaaatgggcattaactattttctataatcgattttggtggttgacttacaacataa

SEQ ID NO: 23407 - DNA, 2512 bp, Zea Mays
cctcctctcacgcacgcggcccaaccaacctgccccaaaacctagctagatttagaaaaacaaaaaacctgtccccaacccgaaccgtgagatggctgagtacggcgagcgctaccagggcaacggcgaccaggccacggccgagggtggctatgcgcagaccgagtacgccgccggcgccggtggctcgccgccctccgacagcaatccctccgtgttctccgaccacgccgacggccgctcctcccagccccagcatgagacccaatcacatgacagtggttcctccaaatctcaagaaagggaccgagaacgtgataagggcaaggacagggagcgaggcagagaccgtgtccgcgaaaaggagaggggccgagacagggacaaggatcgtgaaagaggtgacagagacagggatcgtgatcgccaccacagggatcgtcgcgagcgcagcgagataagggaacaccgtgatcgttctgatgatcgtgaccgtcgcaggagtcatgattctgagaggagaagagatcgtgacagagatggccatcgtaggcatcgctcccgttccccttctaagggtcgtgaccgtgaccgcagatctagttctcattcacgctctagatcgaagagcaagcgtgtgagtggttttgaccaagcacctacacaacaggcagttcctattgttgctgctggtgttatccctggaggcaaacttggcccacattgtcatcggcttccactggattgagctgactgctgtagctttaatgtacgaggacactatctggtcagctgcctggtgtcaccgctcctattcctggggttggggtgcttccaaacttgtataatttggctgcaggacagttcaacccccatgttattcagccacaagccatgacacaacaggctacccggcatgctcggcctgtctatgtgggcggacttcctccaactgctaatgagcagaccgttgccatattcttcaatggagttatggctgctattggaggaaacacagctggtccaggtgatgctgttcccagtcaaccaccgctatggcctaggggcttcattcagcagcatcctttggattgcaacatgatgagaaacattaatttttctaatgcatcctatggtccaacaacaatgtgggctcccattcagacaggaaatataagttccgaatcaaccatgctaccagccacacaatctgcagtatattggaatcattatatgaactttgtcaggaatcctcttggttcagttcaaggaaatccttttccagattcgttttcaggtacaaatactagtacacctttgcagggttcgaatacaataccttcaatacctgtcaacttggagtccgctgctgaacatagtgttcaggacatcaatagtcctataaagacttctgcccctgttacaaaaccaaagaaaacaaaggaacaaaattatactgctgctgaagaccttctactttgcacaacctggttgcaaattagcagtgatcctattgtccacactggacaaaggaagaagggactttgggcacgaatagaaaaaaggtacaacgaacaaaggggcgagtacccttgtagaatgaatcgagcccttagcagcagatgggacaagattagagcagatgttggtaagttctcaggctgttacgcaagagtgctgcgagagaaacaaagtggtttgacagacgacgataagacttccaaggcggcaactttgtttgcacatgaggagaacaaaccatttcattttatgcattgctggcataagctgaagggggaacctaaatgggagagcatttgtcaaggacctttccgaggattacatggaaaagcaattggatcttctggtggtccttttattggtgtagaagaatcagatagtgggtctgctggtttgactggtaaacggcctctctgtcgtgattcttctaaatcagagagaaagaaggctgcgtcatcaacgacgacggaatacttaagccgtcttcaagaattaactgaaaaactaattcagcgcatcatagaaaagggtgagaagaaatataagtacaatgaacaggacatggagctagagaagaagaggttggacttggaagcaaaaaaattaagcattcgtaaaagggaattgagattaaaagaactaagtatggccgaacaacaactcgagatgctggagcgtactcgtgaagacgaggtcgatccagaagtatggagtatgatgaaggagcgcaaaaaacatttgcagcagttcatatttagtttttgctaaatttactgttgtttaacatgtcgtgcttctgtttccatatccggtttgcgaagaaatttataagtgcattgtcttatttgctttctaaaacattataaagttgttgtatgcttatgtcttgcaagacatgtcagtgttattaaagtttgtaacgttaattctgaaaggaaatgggcattaactattttctataatcgattttggtggttgacttacaacataa

SEQ ID NO: 23408 - DNA, 1886 bp, Zea Mays
gtagtttcatagtttgattttcttgaagcaatacgccacaactgatgtggagttttgaggaaaagggtttcctatgtcagctgcctggtgtcaccgctcctattcctggggttggggtgcttccaaacttgtataatttggctgcaggacagttcaacccccatgttattcagccacaagccatgacacaacaggctacccggcatgctcggcctgtctatgtgggcggacttcctccaactgctaatgagcaggtaattacttggatagtttaatttattttcatttgtttctatttggtcttctatatatatccttaacagttcattatttcatacagaccgttgccatattcttcaatggagttatggctgctattggaggaaacacagctggtccaggtgatgctgttcccagtcaaccaccgctatggcctaggggcttcattcagcagcatcctttggattgcaacatgatgagaaacattaatttttctaatgcatcctatggtccaacaacaatgtgggctcccattcagacaggaaatataagttccgaatcaaccatgctaccagccacacaatctgcagtatattggaatcattatatgaactttgtcaggaatcctcttggttcagttcaaggaaatccttttccagattcgttttcaggtacaaatactagtacacctttgcagggttcgaatacaataccttcaatacctgtcaacttggagtccgctgctgaacatagtgttcaggacatcaatagtcctataaagacttctgcccctgttacaaaaccaaagaaaacaaaggaacaaaattatactgctgctgaagaccttctactttgcacaacctggttgcaaattagcagtgatcctattgtccacactggacaaaggaagaagggactttgggcacgaatagaaaaaaggtacaacgaacaaaggggcgagtacccttgtagaatgaatcgagcccttagcagcagatgggacaagattagagcagatgttggtaagttctcaggctgttacgcaagagtgctgcgagagaaacaaagtggtttgacagacgacgataagacttccaaggcggcaactttgtttgcacatgaggagaacaaaccatttcattttatgcattgctggcataagctgaagggggaacctaaatgggagagcatttgtcaaggacctttccgaggattacatggaaaagcaattggatcttctggtggtccttttattggtgtagaagaatcagatagtgggtctgctggtttgactggtaaacggcctctctgtcgtgattcttctaaatcagagagaaagaaggctgcgtcatcaacgacgacggaatacttaagccgtcttcaagaattaactgaaaaactaattcagcgcatcatagaaaagggtgagaagaaatataagtacaatgaacaggacatggagctagagaagaagaggttggacttggaagcaaaaaaattaagcattcgtaaaagggaattgagattaaaagaactaagtatggccgaacaacaactcgagatgctggagcgtactcgtgaagacgaggtcgatccagaagtatggagtatgatgaaggagcgcaaaaaacatttgcagcagttcatatttagtttttgctaaatttactgttgtttaacatgtcgtgcttctgtttccatatccggtttgcgaagaaatttataagtgcattgtcttatttgctttctaaaacattataaagttgttgtatgcttatgtcttgcaagacatgtcagtgttattaaagtttgtaacgttaattctgaaaggaaatgggcattaactattttctataatcgattttggtggttgacttacaacataa

SEQ ID NO: 23409 - DNA, 2721 bp, Zea Mays
ctcactcccacgcggccacaccgcctactctgttctcctccccaccactgccgcagcaccgagaaccatggccgccacgtcgcccttctcctcgtacccccctcgcctacactccaaaaccttgaagcctcgtcattctcgcccgctccaccacaaggccgcgcccgccgcctccgccccgcgtccgctactcctctccttccccgcgcctgcacgccactgcggtgctgggctccgcgcttcagcggcgcagaaaaactctgctgattacaagttcgatgaagacgacgacgacgacgaggaggaggagtacgaatacgacggcgaagaggaggagtgggaggaggaggatgatgaggatgcgatgaacgtggaggcgatggaggaggaagcccgtggcgccgctgccgacctcgccaaacgcctcgctcgggagctccacatcgatgatgatgtcagggagaaacgaagaaacatcagggataagacatctgtgtctaaacacattccagataatcttcttccaaaggtggcaattattggtaggccgaatgttggtaaatctgcactcttcaatcgtcttgtcggaggcaatagggctatagttgttgatgaacctggtgtgacaagggaccgcttatatggacgatcttattggggtgatcatgagtttatggttattgatactggtggggtaattactttgtcaaagtctcaagcaggtgtaatggaagaacttgccgtcaccactactgttggtatggatgggattcctctcgccactagagaagctgctattgcaaggatgccatcaatgattgaaaaacaagcagttgcagctgttgatgaagcatccgtcatactattcgttgtggatggtcaggcaggtttaggaaattatctttcttttctgctcatggaagtgctggtttaatatttgaattcacaacaaccttaaatatatgtacttctaatgctttccttgaacatttttgaccagaaattgttgttctataatttctcatttaagttccttttttactagtataatggtgtcaacatatttcaggctggtcttgtggcagctgatatagagatttctgattggttacgacgcaactactctgacaagtgtattctacttgctgtcaataagtgtgaatctccacggaaagggcaaatgcaagcattagacttttggtcactcgggttttctcctctgccaatttctgctatcactggcacaggaactggagatctccttgacctggtgtgttcagagttgagaaaatttgaggtattggatgccgttgaagaagagaaaaataaggttcctgctattgccattgtgggaagaccaaatgtgggtaaaagtagcattctaaatgctttggttggagaagatagaactattgtcagcccagttagtgggacaacacgtgatgccattgatactgagtttactacagcagatggggagaagtacaaactcattgatactgctgggatccggcgcaggacagcagttatttctgctggcagcacaaccgaatcactttcggtaaagcgtgcatttcgagcaattcggcgctctgatgtggttgcccttgttattgaagcaatggcctgtgtcacagagcagagaggattgaaaaagaaggaaaggcttgtgtcattgttgtgaacaaatgggatacaatcccaaacaagaaccacgagagtacaacacattatgaacaagatgtaagagaaaagcttcgcatacttgattgggcacctattgtctactgttctgcgacaaatggcaccagtgttgaaaagataatttctgctgctgctttggttgagaaggaaaggtctagaagactcagcacctccattcttaatcaagttattagagaagctatagcattcaaatcaccaccaagaacaagaggtggcaaaagaggtcgtgtctattatacaacacaggctgccgtcggtccaccaacattcgttctatttgtaaatgatgcgaagctcttccctgacacgtaccgccgttacatggaaaagaaactccggtcagacgccggttttccaggcacccctattcggttactgtggcgtagcagaaggcggccagacaaacgaggtaaatctgctgacagtagagcgcagagcccaggaacccctagtgaagtggctctagccgcctaactaaaccgcggcctccagaaatgctcgccacagatcagctcgaccactgggaatggaattctatcgaggcggcggcagttgcttgctccaagaacctggatcggctgaggagctagctgttcatggagtagcgctctcatgttcgggccttggagattttgttgcgtctatatactactagtacggatcagacggagaaagcacattgggccaatgaatgaatagtcacacttcaccgacagagctccaagcacgctttttccacagcgctcttggaacatgtaagattgtaccgaaagaatggcgttagaatgaccatgtaaatgtaatcgtagactgagttctcggatgtgtgggtaaacagcatacttaggtgccgtttggttgttttgtttacgaaatgtaacttaattggtaacggtaatatgttaggagtattttattttgaacgagaaaaaggcgtgcggactgccaattacatattcaagaagatatacagcgccaaaactgtgggaaaaaacc

SEQ ID NO: 23410 - DNA, 2555 bp, Zea Mays
ctcactcccacgcggccacaccgcctactctgttctcctccccaccactgccgcagcaccgagaaccatggccgccacgtcgcccttctcctcgtacccccctcgcctacactccaaaaccttgaagcctcgtcattctcgcccgctccaccacaaggccgcgcccgccgcctccgccccgcgtccgctactcctctccttccccgcgcctgcacgccactgcggtgctgggctccgcgcttcagcggcgcagaaaaactctgctgattacaagttcgatgaagacgacgacgacgacgaggaggaggagtacgaatacgacggcgaagaggaggagtgggaggaggaggatgatgaggatgcgatgaacgtggaggcgatggaggaggaagcccgtggcgccgctgccgacctcgccaaacgcctcgctcgggagctccacatcgatgatgatgtcagggagaaacgaagaaacatcagggataagacatctgtgtctaaacacattccagataatcttcttccaaaggtggcaattattggtaggccgaatgttggtaaatctgcactcttcaatcgtcttgtcggaggcaatagggctatagttgttgatgaacctggtgtgacaagggaccgcttatatggacgatcttattggggtgatcatgagtttatggttattgatactggtggggtaattactttgtcaaagtctcaagcaggtgtaatggaagaacttgccgtcaccactactgttggtatggatgggattcctctcgccactagagaagctgctattgcaaggatgccatcaatgattgaaaaacaagcagttgcagctgttgatgaagcatccgtcatactattcgttgtggatggtcaggcaggctggtcttgtggcagctgatatagagatttctgattggttacgacgcaactactctgacaagtgtattctacttgctgtcaataagtgtgaatctccacggaaagggcaaatgcaagcattagacttttggtcactcgggttttctcctctgccaatttctgctatcactggcacaggaactggagatctccttgacctggtgtgttcagagttgagaaaatttgaggtattggatgccgttgaagaagagaaaaataaggttcctgctattgccattgtgggaagaccaaatgtgggtaaaagtagcattctaaatgctttggttggagaagatagaactattgtcagcccagttagtgggacaacacgtgatgccattgatactgagtttactacagcagatggggagaagtacaaactcattgatactgctgggatccggcgcaggacagcagttatttctgctggcagcacaaccgaatcactttcggtaaagcgtgcatttcgagcaattcggcgctctgatgtggttgcccttgttattgaagcaatggcctgtgtcacagagcaggattataaaattgcagagaggattgaaaaagaaggaaaggcttgtgtcattgttgtgaacaaatgggatacaatcccaaacaagaaccacgagagtacaacacattatgaacaagatgtaagagaaaagcttcgcatacttgattgggcacctattgtctactgttctgcgacaaatggcaccagtgttgaaaagataatttctgctgctgctttggttgagaaggaaaggtctagaagactcagcacctccattcttaatcaagttattagagaagctatagcattcaaatcaccaccaagaacaagaggtggcaaaagaggtcgtgtctattatacaacacaggctgccgtcggtccaccaacattcgttctatttgtaaatgatgcgaagctcttccctgacacgtaccgccgttacatggaaaagaaactccggtcagacgccggttttccaggcacccctattcggttactgtggcgtagcagaaggcggccagacaaacgaggtaaatctgctgacagtagagcgcagagcccaggaacccctagtgaagtggctctagccgcctaactaaaccgcggcctccagaaatgctcgccacagatcagctcgaccactgggaatggaattctatcgaggcggcggcagttgcttgctccaagaacctggatcggctgaggagctagctgttcatggagtagcgctctcatgttcgggccttggagattttgttgcgtctatatactactagtacggatcagacggagaaagcacattgggccaatgaatgaatagtcacacttcaccgacagagctccaagcacgctttttccacagcgctcttggaacatgtaagattgtaccgaaagaatggcgttagaatgaccatgtaaatgtaatcgtagactgagttctcggatgtgtgggtaaacagcatacttaggtgccgtttggttgttttgtttacgaaatgtaacttaattggtaacggtaatatgttaggagtattttattttgaacgagaaaaaggcgtgcggactgccaattacatattcaagaagatatacagcgccaaaactgtgggaaaaaacc

SEQ ID NO: 23411 - DNA, 2474 bp, Zea Mays
ctcactcccacgcggccacaccgcctactctgttctcctccccaccactgccgcagcaccgagaaccatggccgccacgtcgcccttctcctcgtacccccctcgcctacactccaaaaccttgaagcctcgtcattctcgcccgctccaccacaaggccgcgcccgccgcctccgccccgcgtccgctactcctctccttccccgcgcctgcacgccactgcggtgctgggctccgcgcttcagcggcgcagaaaaactctgctgattacaagttcgatgaagacgacgacgacgacgaggaggaggagtacgaatacgacggcgaagaggaggagtgggaggaggaggatgatgaggatgcgatgaacgtggaggcgatggaggaggaagcccgtggcgccgctgccgacctcgccaaacgcctcgctcgggagctccacatcgatgatgatgtcagggagaaacgaagaaacatcagggataagacatctgtgtctaaacacattccagataatcttcttccaaaggtggcaattattggtaggccgaatgttggtaaatctgcactcttcaatcgtcttgtcggaggcaatagggctatagttgttgatgaacctggtgtgacaagggaccgcttatatggacgatcttattggggtgatcatgagtttatggttattgatactggtggggtaattactttgtcaaagtctcaagcaggtgtaatggaagaacttgccgtcaccactactgttggtatggatgggattcctctcgccactagagaagctgctattgcaaggatgccatcaatgattgaaaaacaagcagttgcagctgttgatgaagcatccgtcatactattcgttgtggatggtcaggctggtcttgtggcagctgatatagagatttctgattggttacgacgcaactactctgacaagtgtattctacttgctgtcaataagtgtgaatctccacggaaagggcaaatgcaagcattagacttttggtcactcgggttttctcctctgccaatttctgctatcactggcacaggaactggagatctccttgacctggtgtgttcagagttgagaaaatttgaggtattggatgccgttgaagaagagaaaaataaggttcctgctattgccattgtgggaagaccaaatgtgggtaaaagtagcattctaaatgctttggttggagaagatagaactattgtcagcccagttagtgggacaacacgtgatgccattgatactgagtttactacagcagatggggagaagtacaaactcattgatactgctgggatccggcgcaggacagcagttatttctgctggcagcacaaccgaatcactttcggtaaagcgtgcatttcgagcaattcggcgctctgatgtggttgcccttgttattgaagcaatggcctgtgtcacagagcaggattataaaattgcagagaggattgaaaaagaaggaaaggcttgtgtcattgttgtgaacaaatgggatacaatcccaaacaagaaccacgagagtacaacacattatgaacaagatgataatttctgctgctgctttggttgagaaggaaaggtctagaagactcagcacctccattcttaatcaagttattagagaagctatagcattcaaatcaccaccaagaacaagaggtggcaaaagaggtcgtgtctattatacaacacaggctgccgtcggtccaccaacattcgttctatttgtaaatgatgcgaagctcttccctgacacgtaccgccgttacatggaaaagaaactccggtcagacgccggttttccaggcacccctattcggttactgtggcgtagcagaaggcggccagacaaacgaggtaaatctgctgacagtagagcgcagagcccaggaacccctagtgaagtggctctagccgcctaactaaaccgcggcctccagaaatgctcgccacagatcagctcgaccactgggaatggaattctatcgaggcggcggcagttgcttgctccaagaacctggatcggctgaggagctagctgttcatggagtagcgctctcatgttcgggccttggagattttgttgcgtctatatactactagtacggatcagacggagaaagcacattgggccaatgaatgaatagtcacacttcaccgacagagctccaagcacgctttttccacagcgctcttggaacatgtaagattgtaccgaaagaatggcgttagaatgaccatgtaaatgtaatcgtagactgagttctcggatgtgtgggtaaacagcatacttaggtgccgtttggttgttttgtttacgaaatgtaacttaattggtaacggtaatatgttaggagtattttattttgaacgagaaaaaggcgtgcggactgccaattacatattcaagaagatatacagcgccaaaactgtgggaaaaaacc

SEQ ID NO: 23412 - DNA, 2478 bp, Zea Mays
ctcactcccacgcggccacaccgcctactctgttctcctccccaccactgccgcagcaccgagaaccatggccgccacgtcgcccttctcctcgtacccccctcgcctacactccaaaaccttgaagcctcgtcattctcgcccgctccaccacaaggccgcgcccgccgcctccgccccgcgtccgctactcctctccttccccgcgcctgcacgccactgcggtgctgggctccgcgcttcagcggcgcagaaaaactctgctgattacaagttcgatgaagacgacgacgacgacgaggaggaggagtacgaatacgacggcgaagaggaggagtgggaggaggaggatgatgaggatgcgatgaacgtggaggcgatggaggaggaagcccgtggcgccgctgccgacctcgccaaacgcctcgctcgggagctccacatcgatgatgatgtcagggagaaacgaagaaacatcagggataagacatctgtgtctaaacacattccagataatcttcttccaaaggtggcaattattggtaggccgaatgttggtaaatctgcactcttcaatcgtcttgtcggaggcaatagggctatagttgttgatgaacctggtgtgacaagggaccgcttatatggacgatcttattggggtgatcatgagtttatggttattgatactggtggggtaattactttgtcaaagtctcaagcaggtgtaatggaagaacttgccgtcaccactactgttggtatggatgggattcctctcgccactagagaagctgctattgcaaggatgccatcaatgattgaaaaacaagcagttgcagctgttgatgaagcatccgtcatactattcgttgtggatggtcaggcaggctggtcttgtggcagctgatatagagatttctgattggttacgacgcaactactctgacaagtgtattctacttgctgtcaataagtgtgaatctccacggaaagggcaaatgcaagcattagacttttggtcactcgggttttctcctctgccaatttctgctatcactggcacaggaactggagatctccttgacctggtgtgttcagagttgagaaaatttgaggtattggatgccgttgaagaagagaaaaataaggttcctgctattgccattgtgggaagaccaaatgtgggtaaaagtagcattctaaatgctttggttggagaagatagaactattgtcagcccagttagtgggacaacacgtgatgccattgatactgagtttactacagcagatggggagaagtacaaactcattgatactgctgggatccggcgcaggacagcagttatttctgctggcagcacaaccgaatcactttcggtaaagcgtgcatttcgagcaattcggcgctctgatgtggttgcccttgttattgaagcaatggcctgtgtcacagagcaggattataaaattgcagagaggattgaaaaagaaggaaaggcttgtgtcattgttgtgaacaaatgggatacaatcccaaacaagaaccacgagagtacaacacattatgaacaagatgataatttctgctgctgctttggttgagaaggaaaggtctagaagactcagcacctccattcttaatcaagttattagagaagctatagcattcaaatcaccaccaagaacaagaggtggcaaaagaggtcgtgtctattatacaacacaggctgccgtcggtccaccaacattcgttctatttgtaaatgatgcgaagctcttccctgacacgtaccgccgttacatggaaaagaaactccggtcagacgccggttttccaggcacccctattcggttactgtggcgtagcagaaggcggccagacaaacgaggtaaatctgctgacagtagagcgcagagcccaggaacccctagtgaagtggctctagccgcctaactaaaccgcggcctccagaaatgctcgccacagatcagctcgaccactgggaatggaattctatcgaggcggcggcagttgcttgctccaagaacctggatcggctgaggagctagctgttcatggagtagcgctctcatgttcgggccttggagattttgttgcgtctatatactactagtacggatcagacggagaaagcacattgggccaatgaatgaatagtcacacttcaccgacagagctccaagcacgctttttccacagcgctcttggaacatgtaagattgtaccgaaagaatggcgttagaatgaccatgtaaatgtaatcgtagactgagttctcggatgtgtgggtaaacagcatacttaggtgccgtttggttgttttgtttacgaaatgtaacttaattggtaacggtaatatgttaggagtattttattttgaacgagaaaaaggcgtgcggactgccaattacatattcaagaagatatacagcgccaaaactgtgggaaaaaacc

SEQ ID NO: 23413 - DNA, 2348 bp, Zea Mays
acgcggccacaccgcctactctgttctcctccccaccactgccgcagcaccgagaaccatggccgccacgtcgcccttctcctcgtacccccctcgcctacactccaaaaccttgaagcctcgtcattctcgcccgctccaccacaaggccgcgcccgccgcctccgccccgcgtccgctactcctctccttccccgcgcctgcacgccactgcggtgctgggctccgcgcttcagcggcgcagaaaaactctgctgattacaagttcgatgaagacgacgacgacgacgaggaggaggagtacgaatacgacggcgaagaggaggagtgggaggaggaggatgatgaggatgcgatgaacgtggaggcgatggaggaggaagcccgtggcgccgctgccgacctcgccaaacgcctcgctcgggagctccacatcgatgatgatgtcagggagaaacgaagaaacatcagggataagacatctgtgtctaaacacattccagataatcttcttccaaaggtggcaattattggtaggccgaatgttggtaaatctgcactcttcaatcgtcttgtcggaggcaatagggctatagttgttgatgaacctggtgtgacaagggaccgcttatatggacgatcttattggggtgatcatgagtttatggttattgatactggtggggtaattactttgtcaaagtctcaagcaggtgtaatggaagaacttgccgtcaccactactgttggtatggatgggattcctctcgccactagagaagctgctattgcaaggatgccatcaatgattgaaaaacaagcagttgcagctgttgatgaagcatccgtcatactattcgttgtggatggtcaggctggtcttgtggcagctgatatagagatttctgattggttacgacgcaactactctgacaagtgtattctacttgctgtcaataagtgtgaatctccacggaaagggcaaatgcaagcattagacttttggtcactcgggttttctcctctgccaatttctgctatcactggcacaggaactggagatctccttgacctggtgtgttcagagttgagaaaatttgaggtattggatgccgttgaagaagagaaaaataaggttcctgctattgccattgtgggaagaccaaataagtacaaactcattgatactgctgggatccggcgcaggacagcagttatttctgctggcagcacaaccgaatcactttcggtaaagcgtgcatttcgagcaattcggcgctctgatgtggttgcccttgttattgaagcaatggcctgtgtcacagagcaggattataaaattgcagagaggattgaaaaagaaggaaaggcttgtgtcattgttgtgaacaaatgggatacaatcccaaacaagaaccacgagagtacaacacattatgaacaagatgataatttctgctgctgctttggttgagaaggaaaggtctagaagactcagcacctccattcttaatcaagttattagagaagctatagcattcaaatcaccaccaagaacaagaggtggcaaaagaggtcgtgtctattatacaacacaggctgccgtcggtccaccaacattcgttctatttgtaaatgatgcgaagctcttccctgacacgtaccgccgttacatggaaaagaaactccggtcagacgccggttttccaggcacccctattcggttactgtggcgtagcagaaggcggccagacaaacgaggtaaatctgctgacagtagagcgcagagcccaggaacccctagtgaagtggctctagccgcctaactaaaccgcggcctccagaaatgctcgccacagatcagctcgaccactgggaatggaattctatcgaggcggcggcagttgcttgctccaagaacctggatcggctgaggagctagctgttcatggagtagcgctctcatgttcgggccttggagattttgttgcgtctatatactactagtacggatcagacggagaaagcacattgggccaatgaatgaatagtcacacttcaccgacagagctccaagcacgctttttccacagcgctcttggaacatgtaagattgtaccgaaagaatggcgttagaatgaccatgtaaatgtaatcgtagactgagttctcggatgtgtgggtaaacagcatacttaggtgccgtttggttgttttgtttacgaaatgtaacttaattggtaacggtaatatgttaggagtattttattttgaacgagaaaaaggcgtgcggactgccaattacatattcaagaagatatacagcgccaaaactgtgggaaaaaacc

SEQ ID NO: 23414 - DNA, 2529 bp, Zea Mays
acgcggccacaccgcctactctgttctcctccccaccactgccgcagcaccgagaaccatggccgccacgtcgcccttctcctcgtacccccctcgcctacactccaaaaccttgaagcctcgtcattctcgcccgctccaccacaaggccgcgcccgccgcctccgccccgcgtccgctactcctctccttccccgcgcctgcacgccactgcggtgctgggctccgcgcttcagcggcgcagaaaaactctgctgattacaagttcgatgaagacgacgacgacgacgaggaggaggagtacgaatacgacggcgaagaggaggagtgggaggaggaggatgatgaggatgcgatgaacgtggaggcgatggaggaggaagcccgtggcgccgctgccgacctcgccaaacgcctcgctcgggagctccacatcgggagaaacgaagaaacatcagggataagacatctgtgtctaaacacattccagataatcttcttccaaaggtggcaattattggtaggccgaatgttggtaaatctgcactcttcaatcgtcttgtcggaggcaatagggctatagttgttgatgaacctggtgtgacaagggaccgcttatatggacgatcttattggggtgatcatgagtttatggttattgatactggtggggtaattactttgtcaaagtctcaagcaggtgtaatggaagaacttgccgtcaccactactgttggtatggatgggattcctctcgccactagagaagctgctattgcaaggatgccatcaatgattgaaaaacaagcagttgcagctgttgatgaagcatccgtcatactattcgttgtggatggtcaggctggtcttgtggcagctgatatagagatttctgattggttacgacgcaactactctgacaagtgtattctacttgctgtcaataagtgtgaatctccacggaaagggcaaatgcaagcattagacttttggtcactcgggttttctcctctgccaatttctgctatcactggcacaggaactggagatctccttgacctggtgtgttcagagttgagaaaatttgaggtattggatgccgttgaagaagagaaaaataaggttcctgctattgccattgtgggaagaccaaatgtgggtaaaagtagcattctaaatgctttggttggagaagatagaactattgtcagcccagttagtgggacaacacgtgatgccattgatactgagtttactacagcagatggggagaagtacaaactcattgatactgctgggatccggcgcaggacagcagttatttctgctggcagcacaaccgaatcactttcggtaaagcgtgcatttcgagcaattcggcgctctgatgtggttgcccttgttattgaagcaatggcctgtgtcacagagcaggattataaaattgcagagaggattgaaaaagaaggaaaggcttgtgtcattgttgtgaacaaatgggatacaatcccaaacaagaaccacgagagtacaacacattatgaacaagatgtaagagaaaagcttcgcatacttgattgggcacctattgtctactgttctgcgacaaatggcaccagtgttgaaaagataatttctgctgctgctttggttgagaaggaaaggtctagaagactcagcacctccattcttaatcaagttattagagaagctatagcattcaaatcaccaccaagaacaagaggtggcaaaagaggtcgtgtctattatacaacacaggctgccgtcggtccaccaacattcgttctatttgtaaatgatgcgaagctcttccctgacacgtaccgccgttacatggaaaagaaactccggtcagacgccggttttccaggcacccctattcggttactgtggcgtagcagaaggcggccagacaaacgaggtaaatctgctgacagtagagcgcagagcccaggaacccctagtgaagtggctctagccgcctaactaaaccgcggcctccagaaatgctcgccacagatcagctcgaccactgggaatggaattctatcgaggcggcggcagttgcttgctccaagaacctggatcggctgaggagctagctgttcatggagtagcgctctcatgttcgggccttggagattttgttgcgtctatatactactagtacggatcagacggagaaagcacattgggccaatgaatgaatagtcacacttcaccgacagagctccaagcacgctttttccacagcgctcttggaacatgtaagattgtaccgaaagaatggcgttagaatgaccatgtaaatgtaatcgtagactgagttctcggatgtgtgggtaaacagcatacttaggtgccgtttggttgttttgtttacgaaatgtaacttaattggtaacggtaatatgttaggagtattttattttgaacgagaaaaaggcgtgcggactgccaattacatattcaagaagatatacagcgccaaaactgtgggaaaaaacc

SEQ ID NO: 23415 - DNA, 2674 bp, Zea Mays
acgcggccacaccgcctactctgttctcctccccaccactgccgcagcaccgagaaccatggccgccacgtcgcccttctcctcgtacccccctcgcctacactccaaaaccttgaagcctcgtcattctcgcccgctccaccacaaggccgcgcccgccgcctccgccccgcgtccgctactcctctccttccccgcgcctgcacgccactgcggtgctgggctccgcgcttcagcggcgcagaaaaactctgctgattacaagttcgatgaagacgacgacgacgacgaggaggaggagtacgaatacgacggcgaagaggaggagtgggaggaggaggatgatgaggatgcgatgaacgtggaggcgatggaggaggaagcccgtggcgccgctgccgacctcgccaaacgcctcgctcgggagctccacatcgatgatgatgtcagggagaaacgaagaaacatcagggataagacatctgtgtctaaacacattccagataatcttcttccaaaggtggcaattattggtaggccgaatgttggtaaatctgcactcttcaatcgtcttgtcggagtatgtcaatcatcactcagggctgtgcctgcaatgttcatcaccatacaattttcagaccagaatgcagaaatgaaccgagttatgatttcttgcagggcaatagggctatagttgttgatgaacctggtgtgacaagggaccgcttatatggacgatcttattggggtgatcatgagtttatggttattgatactggtggggtaattactttgtcaaagtctcaagcaggtgtaatggaagaacttgccgtcaccactactgttggtatggatgggattcctctcgccactagagaagctgctattgcaaggatgccatcaatgattgaaaaacaagcagttgcagctgttgatgaagcatccgtcatactattcgttgtggatggtcaggctggtcttgtggcagctgatatagagatttctgattggttacgacgcaactactctgacaagtgtattctacttgctgtcaataagtgtgaatctccacggaaagggcaaatgcaagcattagacttttggtcactcgggttttctcctctgccaatttctgctatcactggcacaggaactggagatctccttgacctggtgtgttcagagttgagaaaatttgaggtattggatgccgttgaagaagagaaaaataaggttcctgctattgccattgtgggaagaccaaatgtgggtaaaagtagcattctaaatgctttggttggagaagatagaactattgtcagcccagttagtgggacaacacgtgatgccattgatactgagtttactacagcagatggggaggaatagaacaataatttgctcaaacatgctgcagaagtacaaactcattgatactgctgggatccggcgcaggacagcagttatttctgctggcagcacaaccgaatcactttcggtaaagcgtgcatttcgagcaattcggcgctctgatgtggttgcccttgttattgaagcaatggcctgtgtcacagagcaggattataaaattgcagagaggattgaaaaagaaggaaaggcttgtgtcattgttgtgaacaaatgggatacaatcccaaacaagaaccacgagagtacaacacattatgaacaagatgtaagagaaaagcttcgcatacttgattgggcacctattgtctactgttctgcgacaaatggcaccagtgttgaaaagataatttctgctgctgctttggttgagaaggaaaggtctagaagactcagcacctccattcttaatcaagttattagagaagctatagcattcaaatcaccaccaagaacaagaggtggcaaaagaggtcgtgtctattatacaacacaggctgccgtcggtccaccaacattcgttctatttgtaaatgatgcgaagctcttccctgacacgtaccgccgttacatggaaaagaaactccggtcagacgccggttttccaggcacccctattcggttactgtggcgtagcagaaggcggccagacaaacgaggtaaatctgctgacagtagagcgcagagcccaggaacccctagtgaagtggctctagccgcctaactaaaccgcggcctccagaaatgctcgccacagatcagctcgaccactgggaatggaattctatcgaggcggcggcagttgcttgctccaagaacctggatcggctgaggagctagctgttcatggagtagcgctctcatgttcgggccttggagattttgttgcgtctatatactactagtacggatcagacggagaaagcacattgggccaatgaatgaatagtcacacttcaccgacagagctccaagcacgctttttccacagcgctcttggaacatgtaagattgtaccgaaagaatggcgttagaatgaccatgtaaatgtaatcgtagactgagttctcggatgtgtgggtaaacagcatacttaggtgccgtttggttgttttgtttacgaaatgtaacttaattggtaacggtaatatgttaggagtattttattttgaacgagaaaaaggcgtgcggactgccaattacatattcaagaagatatacagcgccaaaactgtgggaaaaaacc

SEQ ID NO: 23416 - DNA, 2452 bp, Zea Mays
acgcggccacaccgcctactctgttctcctccccaccactgccgcagcaccgagaaccatggccgccacgtcgcccttctcctcgtacccccctcgcctacactccaaaaccttgaagcctcgtcattctcgcccgctccaccacaaggccgcgcccgccgcctccgccccgcgtccgctactcctctccttccccgcgcctgcacgccactgcggtgctgggctccgcgcttcagcggcgcagaaaaactctgctgattacaagttcgatgaagacgacgacgacgacgaggaggaggagtacgaatacgacggcgaagaggaggagtgggaggaggaggatgatgaggatgcgatgaacgtggaggcgatggaggaggaagcccgtggcgccgctgccgacctcgccaaacgcctcgctcgggagctccacatcgggagaaacgaagaaacatcagggataagacatctgtgtctaaacacattccagataatcttcttccaaaggtggcaattattggtaggccgaatgttggtaaatctgcactcttcaatcgtcttgtcggaggcaatagggctatagttgttgatgaacctggtgtgacaagggaccgcttatatggacgatcttattggggtgatcatgagtttatggttattgatactggtggggtaattactttgtcaaagtctcaagcaggtgtaatggaagaacttgccgtcaccactactgttggtatggatgggattcctctcgccactagagaagctgctattgcaaggatgccatcaatgattgaaaaacaagcagttgcagctgttgatgaagcatccgtcatactattcgttgtggatggtcaggctggtcttgtggcagctgatatagagatttctgattggttacgacgcaactactctgacaagtgtattctacttgctgtcaataagtgtgaatctccacggaaagggcaaatgcaagcattagacttttggtcactcgggttttctcctctgccaatttctgctatcactggcacaggaactggagatctccttgacctggtgtgttcagagttgagaaaatttgaggtattggatgccgttgaagaagagaaaaataaggttcctgctattgccattgtgggaagaccaaatgtgggtaaaagtagcattctaaatgctttggttggagaagatagaactattgtcagcccagttagtgggacaacacgtgatgccattgatactgagtttactacagcagatggggagaagtacaaactcattgatactgctgggatccggcgcaggacagcagttatttctgctggcagcacaaccgaatcactttcggtaaagcgtgcatttcgagcaattcggcgctctgatgtggttgcccttgttattgaagcaatggcctgtgtcacagagcaggattataaaattgcagagaggattgaaaaagaaggaaaggcttgtgtcattgttgtgaacaaatgggatacaatcccaaacaagaaccacgagagtacaacacattatgaacaagatgataatttctgctgctgctttggttgagaaggaaaggtctagaagactcagcacctccattcttaatcaagttattagagaagctatagcattcaaatcaccaccaagaacaagaggtggcaaaagaggtcgtgtctattatacaacacaggctgccgtcggtccaccaacattcgttctatttgtaaatgatgcgaagctcttccctgacacgtaccgccgttacatggaaaagaaactccggtcagacgccggttttccaggcacccctattcggttactgtggcgtagcagaaggcggccagacaaacgaggtaaatctgctgacagtagagcgcagagcccaggaacccctagtgaagtggctctagccgcctaactaaaccgcggcctccagaaatgctcgccacagatcagctcgaccactgggaatggaattctatcgaggcggcggcagttgcttgctccaagaacctggatcggctgaggagctagctgttcatggagtagcgctctcatgttcgggccttggagattttgttgcgtctatatactactagtacggatcagacggagaaagcacattgggccaatgaatgaatagtcacacttcaccgacagagctccaagcacgctttttccacagcgctcttggaacatgtaagattgtaccgaaagaatggcgttagaatgaccatgtaaatgtaatcgtagactgagttctcggatgtgtgggtaaacagcatacttaggtgccgtttggttgttttgtttacgaaatgtaacttaattggtaacggtaatatgttaggagtattttattttgaacgagaaaaaggcgtgcggactgccaattacatattcaagaagatatacagcgccaaaactgtgggaaaaaacc

SEQ ID NO: 23417 - DNA, 2669 bp, Zea Mays
acgcggccacaccgcctactctgttctcctccccaccactgccgcagcaccgagaaccatggccgccacgtcgcccttctcctcgtacccccctcgcctacactccaaaaccttgaagcctcgtcattctcgcccgctccaccacaaggccgcgcccgccgcctccgccccgcgtccgctactcctctccttccccgcgcctgcacgccactgcggtgctgggctccgcgcttcagcggcgcagaaaaactctgctgattacaagttcgatgaagacgacgacgacgacgaggaggaggagtacgaatacgacggcgaagaggaggagtgggaggaggaggatgatgaggatgcgatgaacgtggaggcgatggaggaggaagcccgtggcgccgctgccgacctcgccaaacgcctcgctcgggagctccacatcgattccagataatcttcttccaaaggtggcaattattggtaggccgaatgttggtaaatctgcactcttcaatcgtcttgtcggaggcaatagggctatagttgttgatgaacctggtgtgacaagggaccgcttatatggacgatcttattggggtgatcatgagtttatggttattgatactggtggggtaattactttgtcaaagtctcaagcaggtgtaatggaagaacttgccgtcaccactactgttggtatggatgggattcctctcgccactagagaagctgctattgcaaggatgccatcaatgattgaaaaacaagcagttgcagctgttgatgaagcatccgtcatactattcgttgtggatggtcaggcaggtttaggaaattatctttcttttctgctcatggaagtgctggtttaatatttgaattcacaacaaccttaaatatatgtacttctaatgctttccttgaacatttttgaccagaaattgttgttctataatttctcatttaagttccttttttactagtataatggtgtcaacatatttcaggctggtcttgtggcagctgatatagagatttctgattggttacgacgcaactactctgacaagtgtattctacttgctgtcaataagtgtgaatctccacggaaagggcaaatgcaagcattagacttttggtcactcgggttttctcctctgccaatttctgctatcactggcacaggaactggagatctccttgacctggtgtgttcagagttgagaaaatttgaggtattggatgccgttgaagaagagaaaaataaggttcctgctattgccattgtgggaagaccaaatgtgggtaaaagtagcattctaaatgctttggttggagaagatagaactattgtcagcccagttagtgggacaacacgtgatgccattgatactgagtttactacagcagatggggagaagtacaaactcattgatactgctgggatccggcgcaggacagcagttatttctgctggcagcacaaccgaatcactttcggtaaagcgtgcatttcgagcaattcggcgctctgatgtggttgcccttgttattgaagcaatggcctgtgtcacagagcaggattataaaattgcagagaggattgaaaaagaaggaaaggcttgtgtcattgttgtgaacaaatgggatacaatcccaaacaagaaccacgagagtacaacacattatgaacaagatgtaagagaaaagcttcgcatacttgattgggcacctattgtctactgttctgcgacaaatggcaccagtgttgaaaagataatttctgctgctgctttggttgagaaggaaaggtctagaagactcagcacctccattcttaatcaagttattagagaagctatagcattcaaatcaccaccaagaacaagaggtggcaaaagaggtcgtgtctattatacaacacaggctgccgtcggtccaccaacattcgttctatttgtaaatgatgcgaagctcttccctgacacgtaccgccgttacatggaaaagaaactccggtcagacgccggttttccaggcacccctattcggttactgtggcgtagcagaaggcggccagacaaacgaggtaaatctgctgacagtagagcgcagagcccaggaacccctagtgaagtggctctagccgcctaactaaaccgcggcctccagaaatgctcgccacagatcagctcgaccactgggaatggaattctatcgaggcggcggcagttgcttgctccaagaacctggatcggctgaggagctagctgttcatggagtagcgctctcatgttcgggccttggagattttgttgcgtctatatactactagtacggatcagacggagaaagcacattgggccaatgaatgaatagtcacacttcaccgacagagctccaagcacgctttttccacagcgctcttggaacatgtaagattgtaccgaaagaatggcgttagaatgaccatgtaaatgtaatcgtagactgagttctcggatgtgtgggtaaacagcatacttaggtgccgtttggttgttttgtttacgaaatgtaacttaattggtaacggtaatatgttaggagtattttattttgaacgagaaaaaggcgtgcggactgccaattacatattcaagaagatatacagcgccaaaactgtgggaaaaaacc

SEQ ID NO: 23418 - DNA, 2535 bp, Zea Mays
acgcggccacaccgcctactctgttctcctccccaccactgccgcagcaccgagaaccatggccgccacgtcgcccttctcctcgtacccccctcgcctacactccaaaaccttgaagcctcgtcattctcgcccgctccaccacaaggccgcgcccgccgcctccgccccgcgtccgctactcctctccttccccgcgcctgcacgccactgcggtgctgggctccgcgcttcagcggcgcagaaaaactctgctgattacaagttcgatgaagacgacgacgacgacgaggaggaggagtacgaatacgacggcgaagaggaggagtgggaggaggaggatgatgaggatgcgatgaacgtggaggcgatggaggaggaagcccgtggcgccgctgccgacctcgccaaacgcctcgctcgggagctccacatcgatgatgatgtcagggagaaacgaagaaacatcagggataagacatctgtgtctaaacacataatcttcttccaaaggtggcaattattggtaggccgaatgttggtaaatctgcactcttcaatcgtcttgtcggaggcaatagggctatagttgttgatgaacctggtgtgacaagggaccgcttatatggacgatcttattggggtgatcatgagtttatggttattgatactggtggggtaattactttgtcaaagtctcaagcaggtgtaatggaagaacttgccgtcaccactactgttggtatggatgggattcctctcgccactagagaagctgctattgcaaggatgccatcaatgattgaaaaacaagcagttgcagctgttgatgaagcatccgtcatactattcgttgtggatggtcaggctggtcttgtggcagctgatatagagatttctgattggttacgacgcaactactctgacaagtgtattctacttgctgtcaataagtgtgaatctccacggaaagggcaaatgcaagcattagacttttggtcactcgggttttctcctctgccaatttctgctatcactggcacaggaactggagatctccttgacctggtgtgttcagagttgagaaaatttgaggtattggatgccgttgaagaagagaaaaataaggttcctgctattgccattgtgggaagaccaaatgtgggtaaaagtagcattctaaatgctttggttggagaagatagaactattgtcagcccagttagtgggacaacacgtgatgccattgatactgagtttactacagcagatggggagaagtacaaactcattgatactgctgggatccggcgcaggacagcagttatttctgctggcagcacaaccgaatcactttcggtaaagcgtgcatttcgagcaattcggcgctctgatgtggttgcccttgttattgaagcaatggcctgtgtcacagagcaggattataaaattgcagagaggattgaaaaagaaggaaaggcttgtgtcattgttgtgaacaaatgggatacaatcccaaacaagaaccacgagagtacaacacattatgaacaagatgtaagagaaaagcttcgcatacttgattgggcacctattgtctactgttctgcgacaaatggcaccagtgttgaaaagataatttctgctgctgctttggttgagaaggaaaggtctagaagactcagcacctccattcttaatcaagttattagagaagctatagcattcaaatcaccaccaagaacaagaggtggcaaaagaggtcgtgtctattatacaacacaggctgccgtcggtccaccaacattcgttctatttgtaaatgatgcgaagctcttccctgacacgtaccgccgttacatggaaaagaaactccggtcagacgccggttttccaggcacccctattcggttactgtggcgtagcagaaggcggccagacaaacgaggtaaatctgctgacagtagagcgcagagcccaggaacccctagtgaagtggctctagccgcctaactaaaccgcggcctccagaaatgctcgccacagatcagctcgaccactgggaatggaattctatcgaggcggcggcagttgcttgctccaagaacctggatcggctgaggagctagctgttcatggagtagcgctctcatgttcgggccttggagattttgttgcgtctatatactactagtacggatcagacggagaaagcacattgggccaatgaatgaatagtcacacttcaccgacagagctccaagcacgctttttccacagcgctcttggaacatgtaagattgtaccgaaagaatggcgttagaatgaccatgtaaatgtaatcgtagactgagttctcggatgtgtgggtaaacagcatacttaggtgccgtttggttgttttgtttacgaaatgtaacttaattggtaacggtaatatgttaggagtattttattttgaacgagaaaaaggcgtgcggactgccaattacatattcaagaagatatacagcgccaaaactgtgggaaaaaacc

SEQ ID NO: 23419 - DNA, 704 bp, Zea Mays
tgccaaccattaggcatgattcgattctagaagatcctgatggtgacacctcacaaccacaacacatctcggactactaccatgtcagtctcaagaatgtgatgataacatgaccattcaaattggtgaagtacttcagatgcaaattgaggttcagagatagttaaatgaacaacttgagaaatggtcatttgttaaatctgagcagaaaagatcggaaatccaagggcttatggaattggtattgcaaagatcttcatgtgattcggatccttataaggaaagataatttatatacatgagggagccacctattgattcttttgatgtctctacatgtggccttgatttgctggatgacatcttgttgggttataaagctgaatatccaatgaatattggcattacagtagacgcattgaaaatatatgctaaaatattatgaatgttctttaccgcagttgctgcggaggaagccggcagcgcggctatggtcgttgagaagaaggtcgtcgcgtttgtgtagcttgtcgctgttgttgcgcacaaggcgggctgcgccgtggatgctgtctgtttgtattacttttggttggttgcattaaattttgtattgtgtgtttgttaatgcagttacttttgtattcagtgaactgtttggtaatgcggttccttttgtatttagtgaattatgtggtaatgcg

SEQ ID NO: 23420 - DNA, 2305 bp, Zea Mays
ttattacataaaaacacctctcggccacctccaccgcaccccgccccgactcctacccagatgccggccacggccagcggcggcgcgcggccggaggaggtgtcgcccgcaccatcggcgtcggcgtctgcgtcgagctgcatggggacgagggcggaggagctgacggcgaggctggcggccgcggggccctccccgggcgccggtgccggcggagaggaggtggagcacgagcgcgtccgcgcgctgcgcgagatcaagaaccagatcatcggaaaccggaccaagaagctgctctacctccgcctgggcgccgtgcccgcagtcgtggcggcgttggcggatcccggagcctcgccggcggcgctcgtgcaggcggcggccgcggcggggagcttcgcgtgcggcgtcgaagactgcgcgcgcgccgtgctggccgccggcgctgtggggtacctcactcggctcctcgctcaccccgacgagaaggacaaacagattaagaccaagttgattatggttttacttgagctaatcgaagaacctggtcacatcggagatgaagctcccttggcattaaccaccatgattaaagatagcttcgaactgcagaaacaagctcttgcaacgaacgcagttgagaagctcagcaaccatctgctagcgaaaccattggagacaaggcaagcagtggccatattgcttgcgttatctgaactttgctcaaaacttgaagagtcaagatctcaaatgatgtcagatgaggtatcaaccttactccttgatgcattgaaacatgattgggctgatatccgcgttgcagcatgttcgtgtctgaagaatatctccaggtcaccaaaggtacttagtggaggtcgattatcctgcgatacagttattggtcctctagtccagcttttaaacgactcgtgtacttcggtccaggttgctgcccttggtgccatttgcaatattgccattaatttgacacccaggaaatcagttcttcttaactctggggtcgtctcacatcttgttcatttgtcaaagtccatggatccaattttgaggctaaaatctgtatgggctctcaggaatattatgtttcttcttagtcctaaggataaagacttcattgttaaggagttgaccttatctactctttcaagcctcatatgcgattctgaacattttgttcaagaacaaaccctggcacttgtgcgcaatcttgttgatggatatgtggactctgctaattttgtcattggtgaagatggaataattatgaatgctattgcaagacaactgaacaatgcgtctgccccgggagtattcgttcagggtatgtatgtgcttgcaaacattgcggctggaaacgaattgaacaaggaagctgtgatgaatgttcttctgcctcacagagcagatcgcatcaaaccattgtttgcggtgaactttctgcaaagcaaggataaacaattgcgagttgccacgctgtggtgccttctgaacttgatttacccaaaatgtgaagcctcatctggtagggctgtcagactgcaaaatgctggagtgatccaacaagtgaaaaacatgataaacgaccactgcttggattgcaagcttagagcacgtatggtgcttcaacactgcgtgaacaatgcggatgattgtttcatgtgagcaaccagtatttcatcttggcaaccaaagtttatggaaccatattcagatcaggaaagaggaaaccagtgtgcttcagatctaatatattccctgaacagtggaacatgagcacctgcaggaagctttggctggtctctacaggtcttcaagagcacattttcgcaccatgataacctgacaaccggtatctgttgtgcatgttgtccattaccttgttgcgaccgtgctgtctggagaacttgagctgcctgctcgcccactgaaaggctctgggcgctagatccagaaatcccatttttcacagtgcctgccgaacctggtgcatatttttgcgatgttgactacttgagtatataattgagggactgctgttgctgttgtcggtgttgtacaaaaaattatatttctgatccaataaggcccgtttttcatgcactatgggttatacgttgtccatgaattcccatgtttcgctgaaaataaagaagacgcacgtttctatgcatgttctgagttggagatcaaagtttacgcctattatttcgtactgtttgcggttaactgttcttgggtccattgtgacgtcaagccaactacataaaaatttgtcgcttaaacg

SEQ ID NO: 23421 - DNA, 2298 bp, Zea Mays
tgagctaaacttttggagaatatgttggtttaactaaggttgtggatgcaagtgcacgtgctcttagaatgatatatcaatcaagattagctccaaagtttgatgttaatagggggaaaaacatgaattttgttctttctcttttggacagtgagaatgagaatgtcacagagctggctgctgctattatatctcactcttgtaagagtagtgcagaacaattggcactatgcagtgctggagttccacaaaaacttgttagcctttttggaggttctgtgaatctacgggatgcttgtttaggttctgtcactgtagtcgttcagaataaccaagatgttgcttccagatttgtaacaacggttcatggaaaatgttttcgttcagtagttgggttaatacatgatcggaatccaagcacaagactacttgcttgccgatgcttgattgcacttgggcatgcttctcctggccattttcaggacaaacagattaagaccaagttgattatggttttacttgagctaatcgaagaacctggtcacatcggagatgaagctcccttggcattaaccaccatgattaaagatagcttcgaactgcagaaacaagctcttgcaacgaacgcagttgagaagctcagcaaccatctgctagcgaaaccattggagacaaggcaagcagtggccatattgcttgcgttatctgaactttgctcaaaacttgaagagtcaagatctcaaatgatgtcagatgaggtatcaaccttactccttgatgcattgaaacatgattgggctgatatccgcgttgcagcatgttcgtgtctgaagaatatctccaggtcaccaaaggtacttagtggaggtcgattatcctgcgatacagttattggtcctctagtccagcttttaaacgactcgtgtacttcggtccaggttgctgcccttggtgccatttgcaatattgccattaatttgacacccaggaaatcagttcttcttaactctggggtcgtctcacatcttgttcatttgtcaaagtccatggatccaattttgaggctaaaatctgtatgggctctcaggaatattatgtttcttcttagtcctaaggataaagacttcattgttaaggagttgaccttatctactctttcaagcctcatatgcgattctgaacattttgttcaagaacaaaccctggcacttgtgcgcaatcttgttgatggatatgtggactctgctaattttgtcattggtgaagatggaataattatgaatgctattgcaagacaactgaacaatgcgtctgccccgggagtattcgttcagggtatgtatgtgcttgcaaacattgcggctggaaacgaattgaacaaggaagctgtgatgaatgttcttctgcctcacagagcagatcgcatcaaaccattgtttgcggtgaactttctgcaaagcaaggataaacaattgcgagttgccacgctgtggtgccttctgaacttgatttacccaaaatgtgaagcctcatctggtagggctgtcagactgcaaaatgctggagtgatccaacaagtgaaaaacatgataaacgaccactgcttggattgcaagcttagagcacgtatggtgcttcaacactgcgtgaacaatgcggatgattgtttcatgtgagcaaccagtatttcatcttggcaaccaaagtttatggaaccatattcagatcaggaaagaggaaaccagtgtgcttcagatctaatatattccctgaacagtggaacatgagcacctgcaggaagctttggctggtctctacaggtcttcaagagcacattttcgcaccatgataacctgacaaccggtatctgttgtgcatgttgtccattaccttgttgcgaccgtgctgtctggagaacttgagctgcctgctcgcccactgaaaggctctgggcgctagatccagaaatcccatttttcacagtgcctgccgaacctggtgcatatttttgcgatgttgactacttgagtatataattgagggactgctgttgctgttgtcggtgttgtacaaaaaattatatttctgatccaataaggcccgtttttcatgcactatgggttatacgttgtccatgaattcccatgtttcgctgaaaataaagaagacgcacgtttctatgcatgttctgagttggagatcaaagtttacgcctattatttcgtactgtttgcggttaactgttcttgggtccattgtgacgtcaagccaactacataaaaatttgtcgcttaaacg

SEQ ID NO: 23422 - DNA, 2557 bp, Zea Mays
tggtggaagggtaggaggataaaatatcactttgggatcacaaataagctacacaatgctaaagtgatattttaccctcctaaccttccaccataatacaacttatataatctaggaggaaaacaaaacacccttattcttgagcttgttgtatttggaaagctaggaatgcctgcatatttgatgaagcctctcctagtgttcctgatgttgttcaaagcataaaggatagcataaaggatgaggctgaaatctggtgcagggctggtgccaagggacttgctgccatctggccgggttgtggatgcaagtgcacgtgctcttagaatgatatatcaatcaagattagctccaaagtttgatgttaatagggggaaaaacatgaattttgttctttctcttttggacagtgagaatgagaatgtcacagagctggctgctgctattatatctcactcttgtaagagtagtgcagaacaattggcactatgcagtgctggagttccacaaaaacttgttagcctttttggaggttctgtgaatctacgggatgcttgtttaggttctgtcactgtagtcgttcagaataaccaagatgttgcttccagatttgtaacaacggttcatggaaaatgttttcgttcagtagttgggttaatacatgatcggaatccaagcacaagactacttgcttgccgatgcttgattgcacttgggcatgcttctcctggccattttcaggacaaacagattaagaccaagttgattatggttttacttgagctaatcgaagaacctggtcacatcggagatgaagctcccttggcattaaccaccatgattaaagatagcttcgaactgcagaaacaagctcttgcaacgaacgcagttgagaagctcagcaaccatctgctagcgaaaccattggagacaaggcaagcagtggccatattgcttgcgttatctgaactttgctcaaaacttgaagagtcaagatctcaaatgatgtcagatgaggtatcaaccttactccttgatgcattgaaacatgattgggctgatatccgcgttgcagcatgttcgtgtctgaagaatatctccaggtcaccaaaggtacttagtggaggtcgattatcctgcgatacagttattggtcctctagtccagcttttaaacgactcgtgtacttcggtccaggttgctgcccttggtgccatttgcaatattgccattaatttgacacccaggaaatcagttcttcttaactctggggtcgtctcacatcttgttcatttgtcaaagtccatggatccaattttgaggctaaaatctgtatgggctctcaggaatattatgtttcttcttagtcctaaggataaagacttcattgttaaggagttgaccttatctactctttcaagcctcatatgcgattctgaacattttgttcaagaacaaaccctggcacttgtgcgcaatcttgttgatggatatgtggactctgctaattttgtcattggtgaagatggaataattatgaatgctattgcaagacaactgaacaatgcgtctgccccgggagtattcgttcagggtatgtatgtgcttgcaaacattgcggctggaaacgaattgaacaaggaagctgtgatgaatgttcttctgcctcacagagcagatcgcatcaaaccattgtttgcggtgaactttctgcaaagcaaggataaacaattgcgagttgccacgctgtggtgccttctgaacttgatttacccaaaatgtgaagcctcatctggtagggctgtcagactgcaaaatgctggagtgatccaacaagtgaaaaacatgataaacgaccactgcttggattgcaagcttagagcacgtatggtgcttcaacactgcgtgaacaatgcggatgattgtttcatgtgagcaaccagtatttcatcttggcaaccaaagtttatggaaccatattcagatcaggaaagaggaaaccagtgtgcttcagatctaatatattccctgaacagtggaacatgagcacctgcaggaagctttggctggtctctacaggtcttcaagagcacattttcgcaccatgataacctgacaaccggtatctgttgtgcatgttgtccattaccttgttgcgaccgtgctgtctggagaacttgagctgcctgctcgcccactgaaaggctctgggcgctagatccagaaatcccatttttcacagtgcctgccgaacctggtgcatatttttgcgatgttgactacttgagtatataattgagggactgctgttgctgttgtcggtgttgtacaaaaaattatatttctgatccaataaggcccgtttttcatgcactatgggttatacgttgtccatgaattcccatgtttcgctgaaaataaagaagacgcacgtttctatgcatgttctgagttggagatcaaagtttacgcctattatttcgtactgtttgcggttaactgttcttgggtccattgtgacgtcaagccaactacataaaaatttgtcgcttaaacg

SEQ ID NO: 23423 - DNA, 2365 bp, Zea Mays
cccagtgccagaggctcccacatgagtggggcttggggaagggataaatcgtggcaagcctttcctctgcaaatgtagagaggccgcttcacaacccgcgacctggttgtggatgcaagtgcacgtgctcttagaatgatatatcaatcaagattagctccaaagtttgatgttaatagggggaaaaacatgaattttgttctttctcttttggacagtgagaatgagaatgtcacagagctggctgctgctattatatctcactcttgtaagagtagtgcagaacaattggcactatgcagtgctggagttccacaaaaacttgttagcctttttggaggttctgtgaatctacgggatgcttgtttaggttctgtcactgtagtcgttcagaataaccaagatgttgcttccagatttgtaacaacggttcatggaaaatgttttcgttcagtagttgggttaatacatgatcggaatccaagcacaagactacttgcttgccgatgcttgattgcacttgggcatgcttctcctggccattttcaggacaaacagattaagaccaagttgattatggttttacttgagctaatcgaagaacctggtcacatcggagatgaagctcccttggcattaaccaccatgattaaagatagcttcgaactgcagaaacaagctcttgcaacgaacgcagttgagaagctcagcaaccatctgctagcgaaaccattggagacaaggcaagcagtggccatattgcttgcgttatctgaactttgctcaaaacttgaagagtcaagatctcaaatgatgtcagatgaggtatcaaccttactccttgatgcattgaaacatgattgggctgatatccgcgttgcagcatgttcgtgtctgaagaatatctccaggtcaccaaaggtacttagtggaggtcgattatcctgcgatacagttattggtcctctagtccagcttttaaacgactcgtgtacttcggtccaggttgctgcccttggtgccatttgcaatattgccattaatttgacacccaggaaatcagttcttcttaactctggggtcgtctcacatcttgttcatttgtcaaagtccatggatccaattttgaggctaaaatctgtatgggctctcaggaatattatgtttcttcttagtcctaaggataaagacttcattgttaaggagttgaccttatctactctttcaagcctcatatgcgattctgaacattttgttcaagaacaaaccctggcacttgtgcgcaatcttgttgatggatatgtggactctgctaattttgtcattggtgaagatggaataattatgaatgctattgcaagacaactgaacaatgcgtctgccccgggagtattcgttcagggtatgtatgtgcttgcaaacattgcggctggaaacgaattgaacaaggaagctgtgatgaatgttcttctgcctcacagagcagatcgcatcaaaccattgtttgcggtgaactttctgcaaagcaaggataaacaattgcgagttgccacgctgtggtgccttctgaacttgatttacccaaaatgtgaagcctcatctggtagggctgtcagactgcaaaatgctggagtgatccaacaagtgaaaaacatgataaacgaccactgcttggattgcaagcttagagcacgtatggtgcttcaacactgcgtgaacaatgcggatgattgtttcatgtgagcaaccagtatttcatcttggcaaccaaagtttatggaaccatattcagatcaggaaagaggaaaccagtgtgcttcagatctaatatattccctgaacagtggaacatgagcacctgcaggaagctttggctggtctctacaggtcttcaagagcacattttcgcaccatgataacctgacaaccggtatctgttgtgcatgttgtccattaccttgttgcgaccgtgctgtctggagaacttgagctgcctgctcgcccactgaaaggctctgggcgctagatccagaaatcccatttttcacagtgcctgccgaacctggtgcatatttttgcgatgttgactacttgagtatataattgagggactgctgttgctgttgtcggtgttgtacaaaaaattatatttctgatccaataaggcccgtttttcatgcactatgggttatacgttgtccatgaattcccatgtttcgctgaaaataaagaagacgcacgtttctatgcatgttctgagttggagatcaaagtttacgcctattatttcgtactgtttgcggttaactgttcttgggtccattgtgacgtcaagccaactacataaaaatttgtcgcttaaacg

SEQ ID NO: 23424 - DNA, 2320 bp, Zea Mays
gaaaatgtaactaattatgacagaaaaacttcaaaaatcttcattacgtttcattactaagttgtggatgcaagtgcacgtgctcttagaatgatatatcaatcaagattagctccaaagtttgatgttaatagggggaaaaacatgaattttgttctttctcttttggacagtgagaatgagaatgtcacagagctggctgctgctattatatctcactcttgtaagagtagtgcagaacaattggcactatgcagtgctggagttccacaaaaacttgttagcctttttggaggttctgtgaatctacgggatgcttgtttaggttctgtcactgtagtcgttcagaataaccaagatgttgcttccagatttgtaacaacggttcatggaaaatgttttcgttcagtagttgggttaatacatgatcggaatccaagcacaagactacttgcttgccgatgcttgattgcacttgggcatgcttctcctggccattttcaggacaaacagattaagaccaagttgattatggttttacttgagctaatcgaagaacctggtcacatcggagatgaagctcccttggcattaaccaccatgattaaagatagcttcgaactgcagaaacaagctcttgcaacgaacgcagttgagaagctcagcaaccatctgctagcgaaaccattggagacaaggcaagcagtggccatattgcttgcgttatctgaactttgctcaaaacttgaagagtcaagatctcaaatgatgtcagatgaggtatcaaccttactccttgatgcattgaaacatgattgggctgatatccgcgttgcagcatgttcgtgtctgaagaatatctccaggtcaccaaaggtacttagtggaggtcgattatcctgcgatacagttattggtcctctagtccagcttttaaacgactcgtgtacttcggtccaggttgctgcccttggtgccatttgcaatattgccattaatttgacacccaggaaatcagttcttcttaactctggggtcgtctcacatcttgttcatttgtcaaagtccatggatccaattttgaggctaaaatctgtatgggctctcaggaatattatgtttcttcttagtcctaaggataaagacttcattgttaaggagttgaccttatctactctttcaagcctcatatgcgattctgaacattttgttcaagaacaaaccctggcacttgtgcgcaatcttgttgatggatatgtggactctgctaattttgtcattggtgaagatggaataattatgaatgctattgcaagacaactgaacaatgcgtctgccccgggagtattcgttcagggtatgtatgtgcttgcaaacattgcggctggaaacgaattgaacaaggaagctgtgatgaatgttcttctgcctcacagagcagatcgcatcaaaccattgtttgcggtgaactttctgcaaagcaaggataaacaattgcgagttgccacgctgtggtgccttctgaacttgatttacccaaaatgtgaagcctcatctggtagggctgtcagactgcaaaatgctggagtgatccaacaagtgaaaaacatgataaacgaccactgcttggattgcaagcttagagcacgtatggtgcttcaacactgcgtgaacaatgcggatgattgtttcatgtgagcaaccagtatttcatcttggcaaccaaagtttatggaaccatattcagatcaggaaagaggaaaccagtgtgcttcagatctaatatattccctgaacagtggaacatgagcacctgcaggaagctttggctggtctctacaggtcttcaagagcacattttcgcaccatgataacctgacaaccggtatctgttgtgcatgttgtccattaccttgttgcgaccgtgctgtctggagaacttgagctgcctgctcgcccactgaaaggctctgggcgctagatccagaaatcccatttttcacagtgcctgccgaacctggtgcatatttttgcgatgttgactacttgagtatataattgagggactgctgttgctgttgtcggtgttgtacaaaaaattatatttctgatccaataaggcccgtttttcatgcactatgggttatacgttgtccatgaattcccatgtttcgctgaaaataaagaagacgcacgtttctatgcatgttctgagttggagatcaaagtttacgcctattatttcgtactgtttgcggttaactgttcttgggtccattgtgacgtcaagccaactacataaaaatttgtcgcttaaacg

SEQ ID NO: 23425 - DNA, 1463 bp, Zea Mays
ctgaagaatatctccaggtcaccaaagtggaggtcgattatcctgcgatacagttattggtcctctagtccagcttttaaacgactcgtgtacttcggtccaggttgctgcccttggtgccatttgcaatattgccattaatttgacacccaggaaatcagttcttcttaactctggggtcgtctcacatcttgttcatttgtcaaagtccatggatccaattttgaggctaaaatctgtatgggctctcaggaatattatgtttcttcttagtcctaaggataaagacttcattgttaaggagttgaccttatctactctttcaagcctcatatgcgattctgaacattttgttcaagaacaaaccctggcacttgtgcgcaatcttgttgatggatatgtggactctgctaattttgtcattggtgaagatggaataattatgaatgctattgcaagacaactgaacaatgcgtctgccccgggagtattcgttcagggtatgtatgtgcttgcaaacattgcggctggaaacgaattgaacaaggaagctgtgatgaatgttcttctgcctcacagagcagatcgcatcaaaccattgtttgcggtgaactttctgcaaagcaaggataaacaattgcgagttgccacgctgtggtgccttctgaacttgatttacccaaaatgtgaagcctcatctggtagggctgtcagactgcaaaatgctggagtgatccaacaagtgaaaaacatgataaacgaccactgcttggattgcaagcttagagcacgtatggtgcttcaacactgcgtgaacaatgcggatgattgtttcatgtgagcaaccagtatttcatcttggcaaccaaagtttatggaaccatattcagatcaggaaagaggaaaccagtgtgcttcagatctaatatattccctgaacagtggaacatgagcacctgcaggaagctttggctggtctctacaggtcttcaagagcacattttcgcaccatgataacctgacaaccggtatctgttgtgcatgttgtccattaccttgttgcgaccgtgctgtctggagaacttgagctgcctgctcgcccactgaaaggctctgggcgctagatccagaaatcccatttttcacagtgcctgccgaacctggtgcatatttttgcgatgttgactacttgagtatataattgagggactgctgttgctgttgtcggtgttgtacaaaaaattatatttctgatccaataaggcccgtttttcatgcactatgggttatacgttgtccatgaattcccatgtttcgctgaaaataaagaagacgcacgtttctatgcatgttctgagttggagatcaaagtttacgcctattatttcgtactgtttgcggttaactgttcttgggtccattgtgacgtcaagccaactacataaaaatttgtcgcttaaacg

SEQ ID NO: 23426 - DNA, 2357 bp, Zea Mays
gtcaacgcagccactcacgacgacggtaaggaggtcactggtcaccttccgaacgcgactgactacacgatgtatagaaagaagtacactgcacagcaaaccatgcatactacagatctgcattctgcagtggagagctgctggatcggaacctccccggcgccgccatggccgcagcggtcactgctgctgtcttcgttctcttcgccgccatgagtactacgcgagcgcctgcggcactcgtcgagcaaaccttcgttggagaccatggtcaccgtggtgaacgggcagctgccggggccggtgatagaagccaccgaaggtgactccgtggcagttcacgtcgtgaaccagtcgccccacaacctgacaatacactggcacggggtgaagcagcagcggaactgctgggccgatggcgtgccaatggtcacccagtgccccatcctgccgggccacaacttcacctaccggttcgacgtggccgggcaggaagggacgctgtggtggcacgcgcacgtcttcagcctccgcggcaccgtgcacggagccttcatcatccggccgagacgacgcgccgacgacgactcgtattacccgtttcccaagcctcacgcggaggtccccatcgtcataggggagtggtgggagacggacctggagcagatggacagggacttcgcgcacggccacctcgacgaccagcccagcgcggccaccatcaacggcaagcttggagacctattccgcgcctgcgagggggccggcgtggaggacgggtacgtgctggacgtcgagcctggcaagacgtacctgctacgggtcgtcaacgccgccctcttctccgagtactacctcaggatcgccggccacgtgttcacggtggtcgccggcgacgccaactacgtcaggccgtaccgcaccgacgtcctcgccgtctcgcccggcgagacggtggacgccctggtggtcgcatcagcgcgccccgcctcgtcgtactacatggtcgctaagcccatcctgacgccgccgccggacccccagatcccggcgttcgccaccagagccacggtgcggtacacgacggcgtacagcagcggcgcgccgaggtcgtcacgtcgtcgtcgtccgagatcgtcatcagatgatgacgctcctgtggcgcccgagatgccggacgactacgacatgatgacgtccttctacttccgcggcaacctgaccagcctgcgccggcaaccggttccgtcggcgcaggcggacgagcgtatgttcgtggcgctggcgctcgggtccgtctgccggcggcgaggccagcggtggtgcgagcgaggggacagcgacgagaccatcaccgtggcgaccatgaacaacgtctccttcgagctgccgcccgcggcggcgacgaccccgatgctggacgcgtactaccgcaacagaagcggcaacggcgtggacgacgacgacgacgacgtggcggtggtggtccggctccctgacgtgccaccgagggcgttcaacttcacggaccgcgcgctgcagccgacggggcccgaggaggaggagctggagccgacgagcagggcgacggcggtgcggcggttccggcacggggccgtggtggacttggtgttccagagcacggcgctgtggcagggcgactccaaccccatgcacctgcacgggcacgacatgttcgtgctcgcccaggggctcgggaactacgacgcggcgagggacgtggcgaggtacaacctggtggacccgccggtgaggaacaccgtcctcgtccccagcctcggttgggccgccgtcagattcgtcgccgacaatccagggatgtggttcatgcactgccactatgatttccatttgtccatgggcatggctgcagtgttcattgtggaggatgggacgacggctgacacttctctgcctccaccgccggcggtagtctcatcgtgtagccatggcaatgttctgatgcctggagaaattcttcctcaaagctaaatgaccacagctgttcatgcatacgcgtgtggcgagtctaactctcggcaccagcttgatgattagctaaaccagcaattggacaacaagatttgctatgcatggttttaaagtccccccccccccacttgtggttacagtaagaccttgttcgtttgtgccggattggtgagtcggaacgatttctaatcggattgcttctctaatttatataaactttgattagctggaacgattccggctgcaatccgatagaaacaaacaaggcctaaagcagtaaataagtataaatttgttgctacatatatatctagtaacttttcgagtaaaatactttggttggt

SEQ ID NO: 23427 - DNA, 2673 bp, Zea Mays
gggccggcagtggcctagcttgttccattcatccactcagccggtgcacaccgtggagtggacggcggaggagcgctctctcgatgatccggccagcgccgtgggtgggcgccgggcaccgcgggcggggcggcgaggcgggcgcctgcaccgagagcctcggctccgagagtggcgacgtcggctgcgacgccgccgagatcgaccagttcttcccgccggcgccggctgctggcggcccggacgacgccggcgcagagccctgcattccggacctggcggcggcggcggcggcagggaaaaggcggcgcgggggcttccccccgccgatgccgcgcgcgtcggggccgctgttcctgcgcgcggagcgccgcggcggccgcctcatcctcaccgaggtgcgcgccgacgagcgtgagcgccgcgttgtgttccgcgccgagcgcgacggcggacgcctccgcctgcgcttcgccaacgacggcgacggccccgaggcggcaggtggtggtggcggcgccggcggtggaggcggggagctttgtcaggtggccgccggccggaggggcgtgcaggtcggcgcggtcatgatgggggctatctgaaggagggccgcccgatcgagtgacaacgagacgccggccggcagcagattgctgtcgttgccgatggtcgagagagagagagtcgtgttcgtcagcgagagccattttcgttcgttggttcgtttgatttgttttccattctatttttcatctgcaatggcgatgatcttgcaaagctgcattggagggagagagggagacgatagcgttatggatagggattatttagccgccgtgcgcccgtgcgtgcgcgtgcttaaccattgccttgcctcgtgattaaaattctgccatttttgcacacatccttgcctgctgggtgctggctgctgctacagatggtagctagctagtacagttcctgtaaagttaacaaaagctggcgcggagctagccgcagccaacaaataatgctcggggcacaggcagttgcaccggtggtccgtcgtcgcccgacgacggtcccggtcccggcggcggggtgagaccatgtcgcgaaaaggaaaaaaggaaacagagaatcgggcagaggctcacatcagcgaccttttttctcttggactgcgatgccgtgctcttgcatcagcttgggtctcccaaacagacagaaccgttggtttccgcctttcaggggtggcggcgccatggcggcgacccgtcttcccttttgctggttgcctattatatgcatggcggccgcaacggattcgatagggatggactgcagtgaatcactcaagcaaacgggatgatatgacgacatacaatttaataaaaaaaatatataagagagttttatgaaaaattaaattgttttacgaggatgaaactcttgatagactattttctaaataaataaaatattgatatggcaaccttgaaaacaatgtgataaaatacctattaaggcccgtttggtttgattgactaaagattagtccatccattttagtctcatttagttcctaaattgtcaaacagtggaactaaaacagagactaaactgttttagtctaaccatataaatttcactttttggtccttctttatttcagttgcactaatggagggagagtgctaagtagtattttagtgctcttataattcatttaatatgttttgaatagttttagtccctagaaccaaataggatatggactaaactttagtctcctaactaaactttagtccctcgactaaaggaaccaaacggggcataataatagccttaccttaatcttagtctattccccgccctatgtctttgtgcctcgctcttgctctatgctcttccactcgctccacctcagtctcccactctctttgttgccctcctcaagtccaatgagtcatctccatcgaccacgtctccggttcattcaagacgtccgcgggtgttcccactttccataaaaatatggggcaatatagtgggaacaactctgaggcctggtgcatagttagaagtataccttcccaaagggcttcacaccagtataggtacaagcgacaaagaagtggaggaacgagggggccaaagccactacatcaatgaaaaagcttcatagaggtaggtaaaggctgagaaagctaggatggctttgggcgtgagatacacaggattgagcccatagtattcaagaatgccacgagagaaacgaaaaagtgggaagtggaccccagaaagtaggcatacgtagaagatcacgtactcaccatcatcttcccatgagaatagaatccaggaaatgactagagattacaattgagattgatttggcaccggaaagcttcatcttctcacatgcaagatcaaatcaatagttaaattggggactttgttcatgagaatgacaagggtgagattcttgatcttacacttgtgtgagagagtggaaatggagattcacttcatctttttcttcaactaagcttgatcttgtccttgattttagctccacttccctcttctccataactcacttcttgttcttcgtttttcaaagagaatgaggaagtgatgagagtgagagagtgagaggtgtggggagagacaaagtgatttgaa

SEQ ID NO: 23428 - DNA, 1458 bp, Zea Mays
caaagtttcaatcaaaaatccgagaatcaagtatatttagctcattcctaagtttgctaaaggttttctcatctaatggcttggtaaagatatcagctaattgttctttggtgctaacataagctatctcgatatccccctttgttggtgatacctcaaaaagtgacaccgaatgtctatgtgcttagtgcggctgtgttcaacgggattatccgccatgcgaattgcactctcattgtcacataggagagggactttgctcaatttgtagccatagtccctgagggtttgcctcatctaaagtaattgcgcacaacaatggcctgcgacaatagactcggcttcggcggtagaaagagctatggagttttgtttctttgaagcccaagacaccagggatcttcgcagaaactgacaagtccctgatgtgctcttcctatcaattttacaacccgcccaatcagcatttgaatatcctattaaatcaaaagtggatcccttggggtaccaaagtacaaacttaggagtgtaaactaaatatctcatgattctttttacgaccctaaggtgaacttccttaggatcggcttggaaccttgcacacatgcatacagaaagcataatatctggtcgagatgcacacaaatagagtaaagatcctatcatcgaccgatatacattttgatctacggatttacctctcgtgtcgaggtcgagatgcccatttgttcccatgggtgtcttgatgggcttggcatccttcattccaaacttggtaagtatgtcttgtatgtattttgtttggctgatgaaggtgccatcttggagttgcttgacttgaaatcctaggaaatacttcaactcccccatcatagacatctcgaatttctgtatcatgatcctactaaactcttcacaagtagatttgttagtagacccaaatatgatatcatcaacataaatttggcatacaaacaaatcttttgcaatagttttagtaaagagtgtaggatcggcttttccgactttgaagccattagtgataagaaaatctcgaaggcattcataccatgctctcggggcttgcttgagcccataaagcgcctttgagagtttataaacatggttagggtactcactatcttcaaagctgggaggttgctcaacatagacctcttccttgattggtccattgaggaaggcacttttcacatccatttgataaagcttgaagccatggtaagtagcataggcaagtaatatacgaattgactcaagcctagctacgggtgcataggttttaccgaaatccaaacctacgacttgtgaataacccttggccacaagtcgggctttgttccttgtcaccacaccatgctcatcttgcttgttgcggaatacccatttggtacctacaacattttgattaggacgtggaactaaatgccatacctcatt

SEQ ID NO: 23429 - DNA, 2371 bp, Zea Mays
attgagttcacggggtgatctctttaaatcccttggtggactcttgggtgtggcggtcgttgaccctgtatctcctgctcatcttccttgtcttcatctccccccttgatcattgtcctcctcttgaggtggctcatcctcctgatcttcattgtcttgagcctgttcctcatcttgagttggtggagatgcttgcatggaagatgacggttgatcttgtgcttgtgtgggctcttcggattccttaggacacacatccccaatggacatgttccttagcgcgatgcacggagcctcttcatcatctaattcatcaagatcaacttgctccacttgggagccattagtctcatcaaacacaatgtcacaagaaacttcaactaatccagtggatttgttgaagactctatatatgcccttgtgtttgagtcataaccaagtaaaaagccttctacagccttcagagtaaatttagattttctacctcttttaataagaataaaacatttgctaccaaagactctaaaatatgaaacattgggctttttaccagtgaggagttcatatgatgtcttcttgaggattcggtgaagatataacctgttgatggagtagcaggcggtgttaatcgccttagcccaaaaccggtccggagtcttgtactcatcaagcatggtccttgccatgtctagtagagttctattcttcctctccactacaagagaactcatgcttgatgccctcgtcctcaagaaagccttcgatttgagagttcttgaactccgttccattatcacttctaatctttttgattctcaatccgaactcattttgagcccatctcaagaatccctttaaagtctcttgggtttgtgatttttcctgcaaaaagagtatccaagtgaagcgagaataatcatccacaattactagatagtacttactcccgccgatgcttatataagctatcgggccgaatagatccatgtggagtaactccagtggtctgtctgttgtcattatgtttttgtgtggatggtgggagccaacttgctttcctgcctgacatgcgctacaaaccctgtctttctcaaaatgaacatttgttagtcccaaaatgtgttctccctttagaagcttgtgaagattcttcattccaacatgggctagtcggcgatgccagagccaacccatattagtcttagcaattaagcaagtatcgagtttagctttgttaaaatgaactaagtatagctgaccctctaatacttccttaaatgctattgaatcatcacttcttctaaagacagtaacacctatatccgtaaaaagacagttgtaacccattttgcataattgagaaactgaaagcaagttataatctaaagaatctacaagaaaaatattggaaatagaatggtcaggtgatatagcaattttacaaagtcctttgaccaaaccttgatttccatccccgaatgtgatagctcgttagggatcttcgtttttctcataggaggaagaacattcttttctcccctctcatgtggtttgtgcatccgctatcaattatccaacatgagccccgggatgcataaacctgaaaaatagttttaagccttgttcttaggtacccaatcagtcttaggtcctttcacgttagaaacaagcaccttgggtaaccaaacacaagtcttagagcccttgtgtttgcccccaacatatttggcaactactttgcctgatttgttagttaaaacatatgatgcatcaaaagtcttaaatgaaatattgtgatcatttgatgcagtaggggttttctttttaggcattttaacatgagaagaatgcctagagctagaagcctcattcttatacataaaagcatggtgagcaacaaaatgagatttcttagcatgaattctcctaattttgtgttcagggtaattagcatgatataaaatatattcctcattatcctgaaccatgggagctttgcccttaacaaagttagacaatttcttaggggcattaagtttgacattgcttccctgttggaaaccaatgccatccttgatgccagggggtctcccactatagagcatgcttctagcaaatttaaatttttcattttcaatttcatgttcattgattttagtagttaattgagctatatgaccattttgttgtttaattaaagcaaggtgatcatgaatagcattaacattaacatctctacatctcgtacaaatagtaacatgatcaacagtagatgtagaggatttgcaagattttatttcttctatcttagcatttaagattgcattctcatctctaagccgggaaatagaatcattgcaaacatttaaat

SEQ ID NO: 23430 - DNA, 10024 bp, Zea Mays
cgggaaggcgtccggcagctcggagacggagacggacctgctggtggtgcactggtgcgagatgcagggggaggacatggcgtgggggaaaccgattcgtggtggctgccatcgtgctccggcttcgtgccttggcggcggagaaattgggaatggttgttcggctggtcctagtccgatgtgggcatgtggcggatcaatctccggcttgtttcggctagacctggccacatgatccaaccaaccagactcaatcgattcgaaaaaaacttggctgcatctgatccaaactaatataataaatgatcacgggtcataatttttcaccaacaataatttacggctgggtataggccatggttattacttaaaatctgacccaacatagaaaaactcgacttggcacgtcaaacaagaagacacgaaccaacttgacccgatactagacacgggtcgaatacgggccatgttaaatgacccatgatccaaccttaactcgatccgacggttgaacatgtttagttttgtagtcgcggcattaggacagacattgttgctgctttgtaaaattgtactactaccttttctatcagaacgagacctacacctaaaacttctcagaactaaggggtgtttggtttagtaactaatttttagtccctccattttgttctattttaggtcttgtttggataactgcagctctagaaaatttagtggagttcctggagcaggtcattaggtgctttagaaaatcatggagatcgagttatctctactatacttaaagcaacagtttcaacggtcgtcctgcgtcaactttttacaaaaaagtctctacatttcttctaaataactcagcgtaaaatgtcaaaaagcggtgcgggaggtgggttatgttaaaaagggatgtaggaggtggtgtttgaacccacaccttgatggaagaatggtgtgagacactggacgaagctgtctaaccagtaaaacatcatgcttaggtatttataatattgaatataaattgtacatatgtatatatgattttttgtaataaaaaaataatcgtgtcgggccgaggctacaacccaagcacagcacggcgctcgcgccgagttggcccaggcactattaaatgggtcgtgcctcgggccggctcgccagacacaacccagttggccatctatacctccacacgataatgatggtcctcgcctcagttgtcaccacctcattcgccattctacttaatttctctctcccctcatgcctccacctctgcgccaccccattctcggcagagggcgtaggagcatgcgcctcctacccgtattcgtccgacaccagcctcgacaccgactcgcgcagtggctattgcacgtccacgaggacgtttcacatcatgcgcgcaccatcgttttcgtcgtcgtcggacgtcccgttcatcttcctggacttcgcccggttcttcttccccaacctgctgccctcgcccacggtcgtagccgcgagccgaccgacgctcgccgacgcaggtacggggcgagtcagtcatgcttctggcctttctctgtgcgtgccgtcaaggaggacatagtggcgcctgccacgcttaggttatcttggcgatgaggagtccaggtctgagatattggacaaccaaggcccgtagcgtggcagcagtcagcatatgctacatagttggtggtgttgttgtgtcgcttcggcgggtccagggctggaaagacactcgcattctctcgcccttttcggattgacgcctagtgcgggtgcctctcggtttggagctgctccggctgggcttctttctccgcttgcgtgctctctccctatatatctagcggtgtactacctatgtcgcatccaaatgcccatgtcttcgtcgtgtctttctctagcaacgaacaggtatgtctgcctcttcccttcccctcctgctctacgaaaccttgcaagtggggaggcgagggatgggggtctctgatttgctacctatggtacccgtgcgttcataaaaaatattatatgaagagcggagataatcaataaaaaatcttgagatctttttggtggataatttatgtgggtattgttgtgagccgtcgcaacgcacgggtaaccgactagaagcctttaaatgatagttaggtaagccattttatttattatttagactaaaaatatctttaaaactatttaaattatattataaactacagctccacgctggagctggaacctgaagccatcccaaacatccccttattccataaattgcaaatatggaaactttggcaatttagtgactaaaataaaataaaatagtgggactaaaattagtccctagaaaccaaacaccctgactcatttattcctgcaatgtttgtactcattaagaatagttcaagtggcttcatttccattccgtcatttcacttgcttttctttctttcagttcatatgactaatacgatacaaatagattgattgaccataatgataaattgtttatatgcatagtgaaaattgaaagtcgcctagaggggggggtgaataggcgtaatctgaaatttacaactttaatcacacactacaagccggggttagtgttagaacaaataacaagtccgggagagagagggggaaagcaaatcaaatgaaaatcaagcggatgaacacaatgatttgttttaccgaggtttggttccaaagaacctagtccccattgaggaggtcacaaagaccgagtctattccaaccctttccctctctcaaacggtcacttagaccgagtgagccttcttccttaatctcacgggtcactaagaccccgcaaggaccaccacacacttggtgtctcttgcctcgcttacaaagctcttgagaataagaatgggaaaagaagaaagccaatccaagcgacaagaactcaaatgaacacaaaaatctctgtcacacaagccaccaagtgtttggagtgaatttgggactcgaagaggatttgacattttgtattgtgtcttggagtgaatgctagagctcttgtattgaatgtgatgttcagacaacttggatgcttggagttgtggtggttgggggtatttataaccctcaacgaccaacgtagctgttggggaggctgctggcgatgggcacaccggacagtccggtgcgccaccggacaagcactgtaggctgtccggtgcgctgccacgtcacccaaccgttagggttcggagctcgggcgaccgttggagctttgtcctcttgcggcaccggacagtccggtgccacacgggacagtccggtgcccctctaacttcgctgctctgacttctgtgtgacactgttgctcattgtagctcctgtcagagtcgactgttgcgtgctggatagtcgtttcccggtggcacaccggacagtccggtgacttatagcggagcgcgcccgcgttttcctgagagtagctggttagaccctatacggtcctggtgcaccgtacactgttcggtggcacaccagacagtcctgtgcgccagaccacagcacactcaagtccttttttgctccttttgaattgggtccctaacttgaatatttattggtttgtgttgaaccttatgcacctgtagaacatgtattctagagaaaactagttagtccatatatttgtgttggacattcaaccaccaaaattaattgtaggaaaaggttaaccctatttccctttcaatctccccctttttggtgattgatgccaacacaaaccaaagcaaatagataaagtgcagaaatgaactagtttgcataaggtaagtgcataggttacttggaattaaaccaattgataatcttactagatatgaatgaattgcttttcttttctttaacattttggaccacatttgcaccacctgttttgtttttgcaaattctttcggaaaatcttttcaaagtctttttgcaaatagtcaaaggtatatgaataagattgcaagaagcattttcaagatttgaaatttctcccctatttcaaatgcttttcctttgactaaacaaaactcccctgaatgaaattctcctcttagctttcaagagggttttaaaatagataccaatttaaagatgaacttctaaagataccaattgaaggggttttcatcatagataccaatgtgaaaaataccaatttaaaactttataccaattgaaattttgctttctcaagataagtgaagcatggataccaattgagaaattgccaaatatcaattaaagctttattttgaaaattttgaaatcatggtggtgcggtccttttgctttgggcttaatatttctccccgtttggtattaatcgccaaaaacggagatgttgagagccttttaatattttctccccattggtacaagtaaataagagtaaaggattatacaaatttgcagtgtgcggagtagcgacgaaggattaatgataccgttagagtggaagccttgtcttcgccaaatactccatttccctttcaatctacgacttagtatagaaatatacttgaaaacacattagtcgtagccttggtacataaataataagaaatatgcatttgtactaaatgaaagagacatgatcaaaggtatataaatgagctatgtgtgcaatgtttcattcaaaattccgagaatcaagtatatttagctcattccaaagtttgctaaaggttttctcatctaatggcttggtaaagatatcagctaattgattcttggtgtttacataagctattttgatatccccctttgttggtgatccctcagaaagtgataccgaatgtctatgtgcttagtgcggctgtgttcaacgggattatccgccatgcggattgcactctcattatcacataggagagggactttgctcaattgtagccatagtccctgagggtttgccttatctaaagtaattgcgcacaacaatggcctgtggcaatatactcagcctcggtggtggaaagagctactgagttttgtttctttgaaccccatgacaccagggatctccttagaaactgacaagtccctaatgtgctcttcctatcaatcttacaccctgcccaatcggcaccggaatatcctattaaatcaaaggtggatcccttggggtaccaaagcccaaacttaggagtgtaaactaagtatctcatgattcttttcacggccctaaggtgaacttccttaggatcggcctaaaatcttgcacacatgcatacagaaagcataatatctggtcgagatgcacataaatagagtaaagatcatatcatcgaccagtataccttttgatctacggatttacctctcgtgtcgaggttgagatgcccattggttcccatgggtgtcttgatgggtttgccatccttcatcccaaacttcttaagcatgtcttgaatgtactttgtttggctgatgaaggtgccctcttggagttgcttgatttgaaatccaaggaaatacttcaactcccccatcatagacatctcaaatttttgtatcatgatcctactaaactcttcacaagttgatttgttagtgaaagtcacctagaggggggtggataggcagaaactgaaatttataactttaaacacactaaaagccggggttagcgttagaacaaatatcaagtccaggagagaggggaaaacaaatcaactaagaaataaaacggatggacacggtgattttttttaccgaggtttgattctaaagaacctagtacccgttgaggtggtcacaaagaccgggtctctttcaaccctttccctatctcaaacggtcacttagactgagtgagctttcttccttgatttctcaggtcacttagaccccgcaaggaccaccacacgattggtgtctcttgcttcgcttacaaggctttgagaataagaatgagagaaagaagaaagccaaccaagcaacaagagcaacaaagaaacacaagaacgatcctctcttaagtcctaaagcactagaattgaattggagactttgattggatcggtggctttgatttgtgtcttggagtgttgcactttgctcttgtattgaatgaagtgtggtgaatgcttggatggttggagtggacgtagttgatgggtatttatagccctcaaccaccaaacaaccgttggggaggggctgctgtcgatgggcgcaccggagaggccggtgcgccaccagacactgtcgggtgcgctagccacgtcacccaaccaaccgttagggttcgggcgcagacgaccgttggaggctttgtcttctagtggcaccggacaggtactgttcattgtccggtgcgcctctgacggctgctctgctctgccgcgcactgtttgcgcactgttcatctcgaattcagcttttgcaggcgaccgttccgcgaagtagccgttgctccgctggtgcaccggacagtccggtgaattatagcggagcacgcccagaaaaacccgagggtggcgagtttggagttgtacggtcctggtgcaccagggcacccttggttcctttgctcctttaattttgaactctaactttgttcttttattggtttgtgttcaacctttatgcacctgtagaatatataatctagagcaaactagttagtccaatatttgtgttgggcatttcaaccaccaaaattaatactgggaaaaggttaaccctatttccctttcaatctccccctttttggtgattgatgccaacacaaactaaagcaaatatatataagtgcagaattgaactagtttgcataaggtgagtgcataggttacttagaattaaaccaaattatactttcactagatatgcatggtttgctttcttttatttaacattttggaccacacttgcaccacttgtttcgtttttgaaaattcttttggaaaatgtttttagtcaaaggtatatgaataagattgtaagaagcattttcaagatttcaaatttccccccctgtttcaaatgcttttcctttgactaaacaaaactccccctaatgaaattctcctcttagctttcaagagagttttaatagatatcaattggaaatatattgagatgttagttttgaaaatataccaattgaaggtaaacataccaatttgaaatatatcaattaaaatttttcgaaaggtggtgatgcggtccttttgcttttgggctaatactttctccccctttggcattaatcgccaaaaacggagacttttgtgagccctgtttactttctccccattggtacaagtagatacgagtgaaagattataccaatttggagagttatgtggagtgatggcgaagggtaagtgatatcagtagagtggagttgaagccttgtcttcgccgaagaactccatttccctttcaatctatgacttattgtaagaatatacttgaaaatacattagtcgtagcaaatcaaaggtatatcaatgagctatgtgtgcaaagtttcaatcaaaaatccgagaatcaagtatatttagctcattcctaagtttgctaaaggttttctcatctaatggcttggtaaagatatcagctaattgttctttggtgctaacataagctatctcgatatccccctttgttggtgatacctcaaaaagtgatatcgaatgtctatgtgcttagtgcggctgtgttcaacgggattatccgccatgcgaattgcactctcattgtcacataggagagggactttgctcaatttgtagccatagtccctgagggtttgcctcatccaaagtaattgcgcacaacaatggcctgcgacaatatactcggcttcggcggtagaaagagctatggagttttgtttctttgaagcccaagacaccagggatcttcgcagaaactgacaagtccctgatgtgctcttcctatcaattttacaacccgcccaatcagcatttgaatatcctattaaatcaaaagtggatcccttggggtaccaaagtacaaacttaggagtgtaaactaaatatctcatgattctttttacgaccctaaggtgaacttccttaggatcggcttggaaccttgcacacatgcatacagaaagcataatatctggtcgagatgcacacaaatagagtaaagatcctatcatcgaccgatatacattttgatatacggatttacctctcgtgtcgaggtcgagatgcccatttgttcccatgggtgtcttgatgggcttggcatccttcattccaaacttggtaagtatgtcttgtatgtattttgtttggctgatgaaggtgccatcttggagttgcttgacttgaaatcctaggaaatacttcaactcccccatcatagacatctcgaatttctgtatcatgatcctactaaactcttcacaagtagatttgttagtagacccaaatatgatatcatcaacataaatttggcatacaaacaaatcttttgcaatagttttagtaaagagtgtaggatcggcttttccgactttgaagccattagtgataagaaaatctcgaaggcattcataccatgctctcggggcttgcttgagcccataaagcgcctttgagagtttataaacatggttagggtactcactatcttcaaagctgggaggttgctcaacatagacctcttccttgattggtccattgaggaaggcacttttcacatccatttgataaagcttgaagccatggtaaagtagcataggcaagtaatatacgaatttgactcaagccctagctacggggtgcataggttttaccgaaatccaaacctacgacttgtgaataacccttggccacaagtcgggctttgttccttgtcaccacaccatgctcatcttgcttgttgcggaatacccatttggtacctacaacattttgattaggacgtggaactaaatgccatacctcattcctcgtgaagttgttgagctcctcttgcattgctaacacccaatccaaatcttttaatgcatcctccaccctgtatggctcaatagaggacacaaaagagtattgttcacaaaaatgagcgactcgagatcgagtagttaccccttatgaatgtcaccgagaattgagttcacggggtgatctctttaaatcccttggtggactcttgggtgtggcggtcgttgaccctgtatctcctgctcatcttccttgtcttcatctcccccttgatcattgtcctcctcttgaggtggctcatcctcctgatcttcattgtcttgagcctgttcctcatcttgagttggtggagatgcttgcatggaagatgacggttgatcttgtgcttgtgtgggctcttcgaattccttaggacacacatccccaatggacatgttccttagcgcgatgcacggagcctcttcatcatctaattcatcaagatcaacttgctccacttgggagccattagtctcatcaaacacaatgtcacaagaaacttcaactaatccagtggatttgttgaagactctatatatgcccttgtgtttgagtcataaccaagtaaaaagccttctacagccttcagagtaaatttagattttctacctcttttaataagaataaaacatttgctaccaaagactctaaaatatgaaacattgggctttttaccagtgaggagttcatatgatgtcttcttgaggattcggtgaagatataacctgttgatggagtagcaggcggtgttaatcgccttagcccaaaaccggtccggagtcttgtactcatcaagcatggtccttgccatgtctagtagagttctattcttcctctccactacaccattgtggtgtggagtgtagggagaagagacatcatgcttgatgccctcgtcctcaagaaagccttcgatttgagagttcttgaactccgttccattatcacttctaatctttttgattctcaatccgaactcattttgagcccatctcaag

SEQ ID NO: 23431 - DNA, 17577 bp, Zea Mays
ctccaatccgcctcgactggctcgtcccgtccatggctgctacagaaataaaaaaacagtggacatgataaaaaggaatcattcatatttaatattgtcttatctctaagtaactcatatgtaacagatcgtagttacagtacaggttctagaaaaagaacaaataaatcacatgtgacgagcatgatacaaagattattaaaggttcccgaaaatttgataagcactgttaactcttgaatttctcataatacctgtaaatttgtaggcacgagcaacgtgatcgaactgatacaaactgcagcgagcacgcgaggctactggcaacctgatcgaacctgatacagacgacgaggatacggctactggtgatgtcgacgagcgaggttgcatacaacagtttttttagcctttgtttgaaggaaccggcctgcgtgcgtgtgataagcttcaggcgagcagaacagccatagcgctgaacaaggtctctgtgtggttccaagccatttctgcagtcacagaacagcctttttttttgtggtggtggtgaggtgaggtatgatcatggaaaattgtaatacgctgctgctgctaacgacagctagcattggagtatcgttgaatgcctgctggagatctatataatactagcaagtagcaaccagactatcagtatcacgctgcatgtgccagtcagagaaatataatactactagcaaacgatgtcgatatgacagtgatcggctagtagagaaagaaacaagaaaggggccagaccacaagtgatggggcagagtttgaacatcccagaagcaaacgattcggcaggagattagtcatgggcgccaaacgatcggcatggaatgatgccccagtcacgatcgatcacggcatgaacgcgcatccgatggccgttttgcgactaaacaatagggggcagtggttggacttggaggagaggaacacgtacaaatatgggcaggcactagctagctaggctgcaaagagccaaagactgccggcaccgctgctagcttgctagcatacttcccctacacgcgcgcgcaaccgcaagcagtcgatcgtcgcatggcgccaggaggcagcggcgagcggtggagcctggccggcgcgacagcgctggtcaccggtggcagcaaggggatcgggcaagccgtcgtggaggagctggccaggctcggcgcgcgcgtgcacacgtgcgcccgcagcgcggcggacctggaggagtgccgccggcggtgggccgagaaggggctccgcgtcaccgtctccgtgtgcgacgtcgccgtgcgcgccgaccgggagaggctcgtcctggacacggtcagcgcggccttcgacggcaagctcgatatcctggtcaacaacgctgcgctgctgctgctcaagccggcggcggagtgggcggcggaggactacgcgcggatcatggcgaccaacctggagtcgtgcttgcacatctcccagctcgcgcacccgctgctcctcaacgcctccgtcgccggaggggcgagcatcgtcaacgtctcctccatcgccagcgtccttggcttcccgcaggaagttatgtacagcgtcaccaaaggaggactgaatcagatgacgagaagtctagctgtggagtgggcctgcgataggatccgtgtgaactgcgtcgcgccgggcgtgatcatgacggacatgggtaaagagctaccggcggcgttggtggagcaggagcggtcacgcatcccgctgcggcggaccggcgagccggaggaggtggcgtccctggtgtcgttcctctgcatgccggcggcgtcctacgtcaccgggcaggtcatcttcgtcgacggcggccggaccattagtggcgcctgatcgacgacgacggccagctatatattctctattctactgtatttgaatttgttttcgttcttgatcggccatgtatcaccgtcagacgtcagcggcaataatccggccgccgtcagctagcgccatgcaagctgcccgatcatgcaaggtgcagacactgtcgttgcctgcagttctgttcctttttctactatggtttcttgtattcactgcccactggtgatgtttctgtgataacgacttcgacagaggggatacattttaaaatccttgtgctaatcagtttttgtgcacatcagagtttttttagaacagaaaatgtgtctatgatatggatataacttttgtaaacagagagaagcgaccacaaatctctcctcttgagagagagagagaagagacttcattcgaatttccaataaattagacaagttcggacacacaagtaaacacacgtgttagcgcggatctaggcgccaaacactagaacgaatcacctgacgatgctttctgcggagacgtagacggtccgcgacctggcgcaggagcgtctactcctctgcgtacgtccggacagtccacgcatagggctcagacggtccacgatggcgcaaagagccgtcttcttcttcgcagcagacttaaatctcgcattccgggagagacaccatcgaggatgagagattgtgtcttggcgtcaattggttatccaggctttgagtaatattgagatgatgacatattggaagtaaaagtttcaggattatttcaaacacttcactttatagttcacctttgcagcgatgctactattaaggactagttcacctttgcagcgaccctactaagtatccgttgtcatccctactaaatccccttacagttaaaaccggtaacgaaactattaaagtttagtttgggaacttcattttctcataagattcctattttcctaaggaaaaataaactaatttcccttgaaaaaatggaaaaactcttaggaaaatgatgtttccaatctaactctaacatggcttcttttccttgatttcggtaccaattcttagaaaaccggtactaaaattaagggacagaagcccggttcttcagtagtgtaccattcatgcaatgaaaaaattgttgcaacatatacaatatgtttacgggataagccttatcggcgttaataactgttgcttctaggtgtaccacttctctcaagatttagcttgtgtgtgtttttttttcttcttctcaatctgttgactctgcgctcattgaaccacccggtagacaacaattattggaagaccaaatttgaatatggatttctttctcgtgtgtggctgccatgcatttacactaacatgcacgcacctcatgcgcaaataaataataacaataactggctggccagcctgcctaaagatctagatctgttgactctgcgctcaatgaaccacctgtcggccggtagacaataattgttggatgaccagatttgaatatggatttgtttctcatgtgtacgtgacagccatggattttataataatatgcacgcgcatcatgcgcaaataactaataataactagcacaaaactctatgctactactacatacatatatgaacaacagatcgtagacatccattggcagcaagaaagaaaccaaggtacctagttcaaagagagcttagctaggaatacaatggagggcgctcttgcgagcgcagcaaccggagccctgcagtccgttgtggcgaagctgcaagctctgctccgcgatgagtacaggcgcctcacgggaatgcgcggcaagatggagtggctcactggcgagctggttgccatgaaggccttcctcaccgacatgtccagggacgagactcctcctgatgaacaacgcaagctgtggatgaaggacgtgcgggagctctcctacgacatcgaagacagcctcgacgacttcttcgtgcagcatgccgccaagccagacggcatcatggagaagatggcgagcctgctggagaggaccaagagtcgccaccggataggcaaggagttcgacgccatcaagaggaaagtcatggaggcggacgcaaggcgtaagagttacagtaccgaccgtccggtggccaaagccagatcatcatccatcgatccaagagcgctagctatatttgaggatgcgaggaagcctgttggcatcgacggagcaaaggacgaggtcaccagactgctgctgggacgactggaacaagaaggccaccaggagcagcggcaacgccagattgtctatattgttggatctggagggctggggaaaacgaccctggcataccaggtatatcaacaacttaagaatcgattcgaacatcggtccttcttatccgtgtccaggaatccggacatcaatgtcgttttcaaaacaatcctccatgaagtggtgaccgaagaagataggccgtccgtgttcaagggagactatgtcagcactgtcgctgcctcgctgggacccagcaacttatcacaatgatcagggaataccttaaacaaaaaaacaaaagatattttattgtgctggatgatatatgggacacgaaaacatgggaaatcatcaagactgccttcccactgactcactgtggcagcataatcatcgtcaccactcgcataaacgaggttgctagggaatgctgtagatacagtgataatgggcatatatacaatatgaggcctcttaatatggagcactcagcacagctattctatggaagattattcagccctgaagagaaatgccctgggcacctccaagagatctctggccaaatcctggagaaatgtgccggcttaccattagcgatcatcgctatgtctggcctgctgtcgagcaaggggagaacaaggaaggagtgggatatagtgaaggactcgatgggccgtgcgctcgaaaggaattctgatgtccaacgaatgctagagataatttcactcagttatttggatcttcctcccgagcttagaacttgcctattgtacctcagcatatttccagaagattacacgattgacaaggacggtttgataaagaggagcttgctccagccaggagagatggacgagtttggtgtggtgaaaagctgtcgaattcatgacacagttcttgatttcattgtatccaaggccatcgaggagaactttgtcactttaataggagtacctggtgtaaatcctactgctgttggagacaaagacaaggtccgtcggttgtctatgcagaatgaaggcaagatcccaccggagctggtcttatctagcgtccggtcgcttaatgttttcggtgctagagtggaaatcccgtctctgtcgaggttcagacgcctgcgtgttttagcctttgaaggctgtgggcagctacaggatgaccatctcaaagatgtgggtgatctgttgcacctgaggtacttgaggctcaacgaagcaagtggtgtcacagagctcccagaaaaaacagctgggctaaagcacctgggggcactcgacgtacatgggcacaacacagtaatggaaatcccagcatccatttgtcaggccgggcgattggaatgcctggttactctagctgttgatcgtgaaactataatgcctgatgagattgcagacatgaaagcacttcaggttctggaaggcgttaatgtctacatccagtcggttgacttcattgaggggctcggcgagctaacgaacctgaggaagctggggataagatttatcaacagtgatgctgatgaagaatgggatgagaaatatgaagagatcgtctcctcggtccgtaagcttgccgactcaaaccttgattctcttcgtgttcatactttgaacgagccgccagaactactgaacaagctaaatgaccatggtacagttgaccttggagaacttgtcgtcacgggagatattgtctcggatcttgcagactggtggggtgtacttgtgaaccttcacaagctactcttttatacgtacggactcagtgagaaagatgtggagaccttaggaagcataactggtctggaatacctctgcatccatctcttcgatgcacccgacgaccctcatgagctgaaagctcccctagagagagcaatggatgcccacccaaaccgtcccagattggtatgggtcgatgaggattagacctcaactcaggcaccatttcttccttgcaaacactcattctttcttctgtctgctcaccagatacctttctgttgttggttaattcagtcggtttgtgtttgattcttagccaataataaagtttgaacccagttgggtgcgtccatgtactcgccagactcgtgcttagttcacgatgcggtgttcccattgtttctgttttctattgggtcgtacaagatgtcatgcatgcttctttctcagtcgtgggatggcgcacaggtgatcatgccgttgccattatgtacgtgtgtggtccgtgctcatcagttcgagcttgtgacgctgtgagtggacaactaagagccgagaaacaaaaaagccttgattacaaggagtcgcttagtggagaaacgaagagttttgaatataagaattctctaacacccacgcagcaggagtgtcggtagaccaagcattcattctttgaagacaacatatgataggccttttgtgaaaatgtgagccaactgcgacatcgtgggtacatgaagaacatgaacaacaccgacgacaactcgtcctccataactttgtttcttgcgagctcaagaggaacggtcaaagcctagaacgggagctcgccaatgtccgagagtccctaagacaggagagcaccgaacatgagaacatgcgggttgccgctatcttggcgtgcagcgacctcggaatctcccaacgcgaaggcctgagctctttagccatccaagtttcgaagctgataaaggacgccatcttcctcgatgtgcaccagtcgttttcgatcactccgtcccattatgacaacaatgatctcccggcgttggtgcagggcttcgcgctggggtacaccgaggaagagttggacaaattcgaggagacagaccctccatcgcggcatttggcagatcagactggaaggaggctcttcctaaaataaagtaattgtaaaaggattttatgtatccaactagggatgtactagtcttatgtcaggatttaactagtcatatgcccatgcattgctacggtttatatatatatgacataggataaattttgttttaataaagcacaaaatatatgttttctattgattaggtgtgtgtgaatgtggagtcaacaaccaagattcaaacactcacttatacataatttcaacttattttttacataaactctcctattatagtagtagaaaaaagattataggagtgtgggttgattctaaagaaatataggagttttttcgaaaaatattgacgcgggacaaccgttgaaactggtgctttaatatagtaaagatgtaggtcgttgtttcaactgcttcgcggatgaccaccttgttgcatcctgccgccttgggccaagatgtttccgctacaaggctcttggtcatcgctcctacgcctgctctgggccagtgaatggtgataggaagtttcctgtgcatcgacgactattgaggggagtggtttggagtaggctatcgacagtcgcgccaacgaacgccgaccgtgtggcgacagggcctgtcccgcagcaccagttggctcgggcctcggtctaggagcgacttctgcctccagcaccccatccacgcaagaagagagtcagtgtctggcgtagaatctcccctccaggcattgagaagggtcgggtgaaagggaaatgagcccttgggccatttctaagtattttggtgattaagtgtctaacacaaatggttatgtgttaaactatgtcaaatgatggacaaagtgcaaatcaatacaaaggtatgattttagacttagtacattggttttagtgtactaacatatttgtctaagtgctagaatcagagaaaagacaaatggaaaagacttggctcgagcagccaagactctgctcagtctgggtgcaccggactgtccggtggtgcaccggacagtgtccggtgcgccaggctggctctagtgaaaaggccgctctcgggatttcgtcggcggcgtacggctaaaaatcaccggactgtccggtgagccaacggtcggccgagccaacagtcggtcgcgcaatccgcgcgtgacccgtggccgggccaacggtccgatgggggcaccggactgtccggtgtgcaccggacagtgtccggtgcgccaacggctccaaaacttcaacggtcggctgcgccagaacaggaaagcaatcagcaccggacagtgtccggtggtgcaccggactgtccggtgcaccagtcgacagaaggcaagaattgccttcctggattgctctcaacggctcctagctgccttggggctataaaagggacccctaggcgcatggaggagtacaccaagcattctttgatcatctcttagcaccaagacatctctctagcgcatttgattcgttgtgatagcaatttgagctcctcttgagttgagaactccgtgtgtgatcttagagctcaagttgtgacttgtgtgtgctcgtgctttgaggcttgtgtgtgttgttcttcccactcttacatctgtgcttctttgtgatcatctcattgtaagggcgagaggctccaagttgtggagattcctcgcaaacgggaaagagtaaaggaaaaagaacatcgtggtattcaagttgatcattggatcacttgaaaggagttgagtgcaactctcgtccattgggacgccacaacgtggactaggcaagtgttgtacttggccgaaccacgggataaatctttgtgtctcttgtgcttgttctcactgtgtcaattgtggttcacaagagctctccttagccacttgattttattgtgctaacgcttaatcaagtttgtggctttaagtttcaagtttttacaggatcacctattcacccccccccctctaggtgctctcatcgggtacatttcgagatgatgaaaggggcagtggatgcgcgagcatttgttactccatccagtgatgtcggagctacagctggttctgtctcgcagggccccctcccgccccgcccgcgacgcatacgccatcgaaagcgcaagtcatcccctaggggtggttctgatctgggtcgtggacgatctgatcaacccagaaatgacaagacccctctggttgtacccagccttttgcatcatcagcacccttgtgtgatcggttggaatagtttgatggataaagcagaagaagatttgaagaacgcagtgtctatctttgtggtcagtgatgtgcttgtgccagtcgtcgatatcgcagatgcagtcgctcaaaaacttgaagccaattctgattcgctaatcttgaggcaattggctcatggacatttcctgctcatgcttcccaccctccagtcagttgaccagctgataacgagatggaacactattcgtgcaggcgccttctctctgcactgtaaaagatggtccaggttttttggaccctcaggtgcaagtttgcctatccctgtggaattcgagctaagtggcattccaattcatgtctgggaactatccactgtccgacacattttaaacccttttgcatgggtgcagaaggtacatgaggagactctcgagctcaagaatttggaggtctttcgctgttatggttggtgttatgacctggcctcaatccctcattctagagatctctggattactgattcgctgggaaatggaccaggcgttgaaaggctatctcttgcctatcgtgttcagattaagatcccaacagatatggatggttccacacgacagaggtggcgtttctgttcgcgttcgccaccaggggaccgtgatggtcgaaggggttcagcggaggacggtgtgcttaaggacagacgatctgctcttgaacgtctaggcccaaggtctaaagttcagcctagggaagaaggcgacgccagtcagtgtgatcagacagctggaaactatgagatattggaggagtcctcgaccgtggagatcaccattggtatatctgcagaatttgctgttgtcccgaatttggctgctgaccgggcacgtttggtgctagtttcttccccaccacaggcgtgcacctctcaaccccttgcagcctctcatgccttggacgtgggtccattggcccctgttgatgagctcgagaccgtggagcagctggtgcccaatattgatgatgttcacgctgattcttctgttccagccgtcaacctgtcgctacttattttggaagaaagaggtcttggtgctgctgtggttccagacactgtgcctgcccagggtacttctcaccctgttgacaggcctttgtttgttgagccgcaggatgttacccattttagcggaggtggcctcccttcccaccttcaggaccactctgacagcagattcaaagtaaagcctccctgtttcaaagtttactcaagaagaaaaaaactccaggcagcggcagcccagatgacagatgttgagaggacagaaaggttacaagatttcatgcagaatgttaccaagccagctgcaaggttgttggctgaccccccccccccggattaccaagcgaaagaagaggaagaccctgcccaatgacttcaatccaaggagaagcagaagggtggctaatctgccaccggaactgggcaatgaatctgcagctaaagtctgcaggcagctaggattttgtgatgaccaagaacatatttccttcgaagacgcccaaaagtatgttcacctttttgatgcagcactttccagagagcatattgctgccatggcagacttatttggctgggaactgcctgttgaaggccggtttcaaacctgattggagggggggtgtgctgtaggtcgtgtgtgttttagtgtaccctgttataatgcagccagtttttcttatctggaatgtaaggggcctgaatgacatgtctaggagagacattgttaagtccttggtccttggcatcaaaccagcggttgtctgtttgcaggaaactaagctatgctctatctcagcttttgacatcctgtctattcttggtgctgggtatagtgacttcgtttactccccagcgcaaggaaccagaggaggtgttttagtggcttgtagagatggagtctattctgctattgagagtttggtgcatgatttcacagtttcagtcaagttgcaagaggaaggtggtgctcagtggtggttcacgggtgtttatgggccacaccaagaccctctcaagcattcctttctccaggagcttagggaagtcagggagacatgcgctggcccttgggtaatagctggagattttaatcagatctacagctcagaagacaagaacaatgccaatataaatagggccatgatgggcagattcaggagacttatcaatgacttggagctaaaagaaatcccgttggtaggcaggaaattcacttggtcaaatgagagaaatgtccctacacttgttaaactcgaccatgttttctgtacagccagctgggaggagatccatccggattgtattctccatagcaactcttcggagctctctgaccattgtcccttagctctgcatcttaatgaggatgtcaaggggaagtgaagattccattttgagagtttttggactaagattccagattttttggagacggtggctacctcttgggagcagccagtgatgttttcttgtcccttggaagaatggctctaaagttgagaaggcttgcaaaggctttgcagtcgtggagtcataaaaggatcggaaatgttaaatctcagcttagcttggccagggaaattttgcacggacttgagattgctcaagacaatagactgttgtgtggggacgagatatggctgaaaggaaggcttaagcaccactgcctggggcttgcctctctggaaaggacaattgctagacttagatcgcggatcaaatatctgaaagagggagatgccaacacttccttttttcatctataggcttgctatcggaaaaagcggaactttatctctgaactagtgcatgaggacctgatcgccacctctcaagagcaaaagcagaaggtcttgtttgatttttttctccaatttgttgggtgtagcgaagcagcgtgatttcactctagatttggaggcttgccacaatgctgatgttgatcttggggccttggaccttcccattacagaggaggaggtccgggccactattgctagccttccctcggacaaagccccggggccagacggttatacaggaaggttttataaaacttgttggcacataattaaggttgatctgatggcggcagttatcaccctgcaccaaggtaacgcgcacaaattgtggatgatgaactctgcgtacctaacccttatccctaagaaggttgatgccaagacagctggagattacaggtcaattagtcttattcacagcttcgccaaattggtatccaaagtcttggctaatcgtttagcaccacaccttcaaaatctggtggctacaaatcaaagtgcctttgtcaagggtcgctccattcatgacaactacatgttggttcagcactctatcaaggcccttcacaggaagaagatcgttagtctatttctaaagctagatattacaaaagcttttgactcagtgtcatgggcctttctcctagaagtgttatctcatcttggcttcggacccaggtggtgcggccttgtgttcaatatgttatccacttcttccacacaagtgttattgaacggaactccggaggattatattcgacaccggagggggctgcgccaaggcgaccccttatctcctatgcttttcataatcgtgatggatgtgcttagtagcttattcaagcatgctgaggagagaggattgctgcatgacctggccatcaaaaacgtgaaatctaggctctccatttacgcagatgatgtggttctttttgtcaagcttgcagttgaagatcttatttgtgtcaaaatgatcctggattgctttggagaggcctcgggcttagttgtgaatttgcaaaaaagttgtgctatccctatcagttgtgatgatcagactgttcaggacagttgtaacattttgcagtgcatccggcttcttttccatgcagctatttggggctgcctgtttctgataagaagttggggaggagggacctcttgcagtgggtggacaagatagctaaccggctgcccggttggaaggctccatttctaaaccttgctggcaggacagccttggtccggttcgtgctctctgcaatccccgtatatcttttcatcgccatgaatgttcccaagtgggttatcagtgctattgacaaaattcaccgaggtttcttgtggaagggtagaaaagatgtgaaaggtgggcattgccttgtggcatgggataaagtcaccagaccgctggaccttggtggacttggtatcccaaacctgatatataagagttgggcgctgcaagctaaatggctttggctcatcaagactggcccgaataggccttggagtggattggatctccctgtttagtcacaagtaaggaaactagtggccagtttgatgtacactcatgtgggcaacggcaaaaacacccttttttggagggatagatggttaaatgggtgctctatcgctgagctggcacctgaagtgatctcaaaggtggataaaaaggtggcctctaccaggacagtgcatcaagctttggagggcatgttgtgggttagggacatcaagccaaccctttcccttgtaagtatacagcaatatcttacgctttgggacaccctgggtgagatcgtgctcactctccaggaggatcaccatgtgtggagattcaagtcttcgggccttttcttttctaggtcctgctacaaggttctatttttgggctccatcacctacgaaccttagaaaagactttggaaatcttgggctcctcctaagtgtaagacctttttatggttagccatgcagaataagtgttggacagctaacaggctggaaaaaacagttcagcatctgttgactggttgtgtcttcgccagacagttttggcatagcatcctctccccctttggtatgggccacctaactccaagaccagaggaaactaattttgctgattggtggggaatagtgaccattcaggtgcacagaaacaagagaaagggagtcaacagtgccattattttgggagcatggtgcctttggttgcatataaacagagttatcttcgatggagattcgccaaccattggcaaggtgcatagaagcttcatcgatgagctatccttatggatgttggctggtgccaaacacctcggaagccttggcttgctgccgctccaggcgcagcaggctcgacttaattttttcattggtcgtctttttgtatcttggtcctatggacagatttatttatgcttgttgttggccaccatagggtggttttttgtactggtcctcttggaccttaatttcccttcttaatataaagatgcgcagctctcctgcgtttttcaaaaaaaaattgaagtatttgtgatgagcccgactctctataattggtccgatcccacctacggattaagtttggtcggagagaggacttagttacactggtgagcgaaggtaccatggccgctggggcacaggatccttgtggtcggagagaggacttagttacattggtgagcgaaggtaccatggccgctggggcataggatccttgtggtccgaccggtgtaattcgctctttctacccacttgttttggtatgggtcgggtgcatccatgcttgctgcgggggagggggtcattctcttatcaaccccctagtgagggccgacctcttgctggcaatggggtcagtcgttactcagagtgggtccgttgtcacgggagaacaaattcttcaaggtcgtaactcagagaggcatgaaactagatgtagagaactttgtcaagcaatgtcaggtctgtcaacaagccaaaggtgaaaggaaacatcttgtagggttgttgcaaccttcacctctgcccttgggtgtttggcaagatatcacgatggccttcatcgaaaaacttcaaaaatccgaaggatatgacaccattcttgtggtggtcgaccgtttctctaaatatgctcactttttggcctagaaacatccctttatagcttcacaggtggctcaagtgttgttggatcaggtggtaaagttgcatggcctacctaaatggctaaatctatgaccactgatcaggacaaggtttttactagttccttatggactcagcttttcaagttattgggcaccaaactgaatttgagtacattgtaccacccttagaccaatggtcaaagtggacgtgtcaaacaatgtgtggagatgtatcttcgttgcgcaatgcatgcccaacctcataagtggaaggcatggttgttcctaggtgagttttggtacaacacttcttaccattcttacttgggatgctctcctttcaaggtgttgtatggctatgacccaccctttgttgatgctcctctgattccagctaaggccgaagtgaatgtggctaccatgctcgctgagcgtttagcctttagcactatgttgtgagaacagttaactggtgctcagaacatcatgaaaatgttgactgataggctccagactgagcgacagtttcaagttggcgatccagttttgctaaagttgcagtcgtatgctcaacactcgatgttgaatcgaccctctccgaaattagacttcaaaatctttggaccatacaaggtcgtcgaatgtgtggccgagttgcttatcgtgtagatttaccatctacaacacaagtgcatctagtgttccacgtttctcaaccgccagtcttttccactatacctcggtatgatgatctggcaaggggttgctcctatggagattctggatcggcggttggtgaagaatggcaaccgggtggttcctcaagtgctcatctgttggagtcacgtactcacgttcatcgggaatatgttacttgggaggattattatgcggttcaacaacacttgccacgcgcccttgcttgaggacaaacaagtccttcggcgggggcagatgttacgtctaaaaaaactaatgacactaagaacatgggcaacgaagctgaagacgctaggaacacgggcacccagctgattgtgtcggatggtgaatagggaggttggttgtgttgcagaaggcgtattattgcattacgttttagtctatggttgtgtgggtgttggaccgtggatgttgggaccggcccagtccgggaatatcactatcactacgtctttgaagtgggagtttcgtcgtgcgtcgtccccctccccacacgtgtagcgagcgagtgtcgctagagttcctatgggctcaacgaaatttaaaaaccgcccgttgggatttgaactatggtctctagtagggatggcaatcgggcaagtaagacatgggtatatggttggtgaacccatacccgcgagatgaaacttaactcatacccatatccatatatgttcatgagtatggatctgtactcgtacccaccgggttcctctacccgacgaatattcattacctgctcgcccactataattttagcattcatcacacaaacaacaattttatgataatcaaaaatttcatcgttcgaacaacatagaacaacaatttcagcacccaacaacaatttcaacatcaaattattagatgataatacagacaatataaaacaatattcgtggaatgataatacacaacattatagcaacaatataataaagtagcagggggctcggtgcattggccagtcgcctaggcccagttggcctactcagttacttagtttaggacttagggttggccggttggttgaatgggatttggaaattgagagatggcctacttgtcagatacctatcgagtaacggatatggatatccatatccacgaaaaatacacccatagataccttaatatatccatatatgtaccacggatacaaattttcactatactcgtacctgatggataattatctatggttatttactcaaacccgtatccactgtcatccctagtctctaggaagagagaccatgcctctaaccacggtaactcgaattggtttgggttatagtgttatacaaagaaactatatatgatatataacaaactagtaaataatgtaagcacgaacgaacaacgaataataacataattttaccacactgtatcgcggtatcgcctggtgtcgctcacgtccaagcgccttctcgccggcgtccaagggccatcacaggttggtgcatgtcgccggcgaaaggcctgacgaacgacaaagacctcggtgctcgccctgccgccctgcagcacagcagtgagcagtcagcaccagcgctcgtcggctgccgggtgccgcccgcg

SEQ ID NO: 23432 - DNA, 18849 bp, Zea Mays
atgataaaaaggaatcattcatatttaatattgtcttatctctaagtaactcatatgtaacagatcgtagttacagtacaggttctagaaaaagaacaaataaatcacatgtgacgagcatgatacaaagattattaaaggttcccgaaaatttgataagcactgttaactcttgaatttctcataatacctgtaaatttgtaggcacgagcaacgtgatcgaactgatacaaactgcagcgagcacgcgaggctactggcaacctgatcgaacctgatacagacgacgaggatacggctactggtgatgtcgacgagcgaggttgcatacaacagtttttttagcctttgtttgaaggaaccggcctgcgtgcgtgtgataagcttcaggcgagcagaacagccatagcgctgaacaaggtctctgtgtggttccaagccatttctgcagtcacagaacagcctttttttttgtggtggtggtgaggtgaggtatgatcatggaaaattgtaatacgctgctgctgctaacgacagctagcattggagtatcgttgaatgcctgctggagatctatataatactagcaagtagcaaccagactatcagtatcacgctgcatgtgccagtcagagaaatataatactactagcaaacgatgtcgatatgacagtgatcggctagtagagaaagaaacaagaaaggggccagaccacaagtgatggggcagagtttgaacatcccagaagcaaacgattcggcaggagattagtcatgggcgccaaacgatcggcatggaatgatgccccagtcacgatcgatcacggcatgaacgcgcatccgatggccgttttgcgactaaacaatagggggcagtggttggacttggaggagaggaacacgtacaaatatgggcaggcactagctagctaggctgcaaagagccaaagactgccggcaccgctgctagcttgctagcatacttcccctacacgcgcgcgcaaccgcaagcagtcgatcgtcgcatggcgccaggaggcagcggcgagcggtggagcctggccggcgcgacagcgctggtcaccggtggcagcaaggggatcgggcaagccgtcgtggaggagctggccaggctcggcgcgcgcgtgcacacgtgcgcccgcagcgcggcggacctggaggagtgccgccggcggtgggccgagaaggggctccgcgtcaccgtctccgtgtgcgacgtcgccgtgcgcgccgaccgggagaggctcgtcctggacacggtcagcgcggccttcgacggcaagctcgatatcctggtcaacaacgctgcgctgctgctgctcaagccggcggcggagtgggcggcggaggactacgcgcggatcatggcgaccaacctggagtcgtgcttgcacatctcccagctcgcgcacccgctgctcctcaacgcctccgtcgccggaggggcgagcatcgtcaacgtctcctccatcgccagcgtccttggcttcccgcaggaagttatgtacagcgtcaccaaaggaggactgaatcagatgacgagaagtctagctgtggagtgggcctgcgataggatccgtgtgaactgcgtcgcgccgggcgtgatcatgacggacatgggtaaagagctaccggcggcgttggtggagcaggagcggtcacgcatcccgctgcggcggaccggcgagccggaggaggtggcgtccctggtgtcgttcctctgcatgccggcggcgtcctacgtcaccgggcaggtcatcttcgtcgacggcggccggaccattagtggcgcctgatcgacgacgacggccagctatatattctctattctactgtatttgaatttgttttcgttcttgatcggccatgtatcaccgtcagacgtcagcggcaataatccggccgccgtcagctagcgccatgcaagctgcccgatcatgcaaggtgcagacactgtcgttgcctgcagttctgttcctttttctactatggtttcttgtattcactgcccactggtgatgtttctgtgataacgacttcgacagaggggatacattttaaaatccttgtgctaatcagtttttgtgcacatcagagtttttttagaacagaaaatgtgtctatgatatggatataacttttgtaaacagagagaagcgaccacaaatctctcctcttgagagagagagagaagagacttcattcgaatttccaataaattagacaagttcggacacacaagtaaacacacgtgttagcgcggatctaggcgccaaacactagaacgaatcacctgacgatgctttctgcggagacgtagacggtccgcgacctggcgcaggagcgtctactcctctgcgtacgtccggacagtccacgcatagggctcagacggtccacgatggcgcaaagagccgtcttcttcttcgcagcagacttaaatctcgcattccgggagagacaccatcgaggatgagagattgtgtcttggcgtcaattggttatccaggctttgagtaatattgagatgatgacatattggaagtaaaagtttcaggattatttcaaacacttcactttatagttcacctttgcagcgatgctactattaaggactagttcacctttgcagcgaccctactaagtatccgttgtcatccctactaaatccccttacagttaaaaccggtaacgaaactattaaagtttagtttgggaacttcattttctcataagattcctattttcctaaggaaaaataaactaatttcccttgaaaaaatggaaaaactcttaggaaaatgatgtttccaatctaactctaacatggcttcttttccttgatttcggtaccaattcttagaaaaccggtactaaaattaagggacagaagcccggttcttcagtagtgtaccattcatgcaatgaaaaaattgttgcaacatatacaatatgtttacgggataagccttatcggcgttaataactgttgcttctaggtgtaccacttctctcaagatttagcttgtgtgtgtttttttttcttcttctcaatctgttgactctgcgctcattgaaccacccggtagacaacaattattggaagaccaaatttgaatatggatttctttctcgtgtgtggctgccatgcatttacactaacatgcacgcacctcatgcgcaaataaataataacaataactggctggccagcctgcctaaagatctagatctgttgactctgcgctcaatgaaccacctgtcggccggtagacaataattgttggatgaccagatttgaatatggatttgtttctcatgtgtacgtgacagccatggattttataataatatgcacgcgcatcatgcgcaaataactaataataactagcacaaaactctatgctactactacatacatatatgaacaacagatcgtagacatccattggcagcaagaaagaaaccaaggtacctagttcaaagagagcttagctaggaatacaatggagggcgctcttgcgagcgcagcaaccggagccctgcagtccgttgtggcgaagctgcaagctctgctccgcgatgagtacaggcgcctcacgggaatgcgcggcaagatggagtggctcactggcgagctggttgccatgaaggccttcctcaccgacatgtccagggacgagactcctcctgatgaacaacgcaagctgtggatgaaggacgtgcgggagctctcctacgacatcgaagacagcctcgacgacttcttcgtgcagcatgccgccaagccagacggcatcatggagaagatggcgagcctgctggagaggaccaagagtcgccaccggataggcaaggagttcgacgccatcaagaggaaagtcatggaggcggacgcaaggcgtaagagttacagtaccgaccgtccggtggccaaagccagatcatcatccatcgatccaagagcgctagctatatttgaggatgcgaggaagcctgttggcatcgacggagcaaaggacgaggtcaccagactgctgctgggacgactggaacaagaaggccaccaggagcagcggcaacgccagattgtctatattgttggatctggagggctggggaaaacgaccctggcataccaggtatatcaacaacttaagaatcgattcgaacatcggtccttcttatccgtgtccaggaatccggacatcaatgtcgttttcaaaacaatcctccatgaagtggtgaccgaagaagataggccgtccgtgttcaagggagactatgtcagcactgtcgctgcctcgctgggacccagcaacttatcacaatgatcagggaataccttaaacaaaaaaacaaaaggtactctaccatgtacaactcctttcttaccgctcatatttgtgcttatgtagttaatttgcttttgtaatcgacaagctagttctaatcatgtcttaatcgagtaactctatatctcttgttgtgttagtgcttaggcttaggcataaccatgtagagtaatttgctttgctcggttatttgctttctagtccttgtgctaaagtgttttggtgtgttgtactcactatcatttcatacctacaggaatccgacgaatctaggtcggcctaaaaccattgtaaataaggcttaataaattgttatttacatcagtttttgatttatttacatcggttctaggtcgttactaataaagcatcgtaaataagtttatttacatcggctaaccgccgtaaataattaatctatgacggtcatagctagccgacataagtaagggacggtcaggtttcaggttcaaacgcacgaaagaaaatgatttatactggctaaacaaaaatcatcgtagataactacttactttacttgcattccgaagctagtaggatttctacggaagtatatgcatacagaactacacaagaatgagacagaattaatgtagcacccgcatagaaagcaacaaaatagatttctacccagagccccagaattgctaccagattttaaaactacaatattatggcaagcactaaattccatatctatagtagaccaaacaagcatatcgtgcatggatcagtagcaagtttaggcatcttgaactattatatgatgcacaatctcagcaagatttcaagcaacaaattaactacagaaatactatctaccttgccaatggccacaccgcccacaacgttccaatttcaacagcagataaacaaccatacctggcgccacttatggtcatgaactgctacagcttgtcgcggtttcctctcctcagcttatgctgcacagtgcacacaaaccacacataatcaactatatatctttttaaaaaggagaaactaaacatcagattccaacagttcatacatcagaattaaccatttaacccacgaattcaaaccgggagctaacagaaccggggcaggtcatagatactcaccatcttggatcgcagaacgaggatgacgccggggaagtttggggtttcgtggcgaagcctgaactctagtagtctagctcttggctcctatcttttcaccttaaggcacctagactgccatatagatgcacgacaaatctataattgaataattgtacgagctcattttggtcagtgaccttaccttactcttcatcccatttactatgtaccaatgtgcagatattttattgtgctggatgatatatgggacacgaaaacatgggaaatcatcaagactgccttcccactgactcactgtggcagcataatcatcgtcaccactcgcataaacgaggttgctagggaatgctgtagatacagtgataatgggcatatatacaatatgaggcctcttaatatggagcactcagcacagctattctatggaagattattcagccctgaagagaaatgccctgggcacctccaagagatctctggccaaatcctggagaaatgtgccggcttaccattagcgatcatcgctatgtctggcctgctgtcgagcaaggggagaacaaggaaggagtgggatatagtgaaggactcgatgggccgtgcgctcgaaaggaattctgatgtccaacgaatgctagagataatttcactcagttatttggatcttcctcccgagcttagaacttgcctattgtacctcagcatatttccagaagattacacgattgacaaggacggtttgataaagaggagcttgctccagccaggagagatggacgagtttggtgtggtgaaaagctgtcgaattcatgacacagttcttgatttcattgtatccaaggccatcgaggagaactttgtcactttaataggagtacctggtgtaaatcctactgctgttggagacaaagacaaggtccgtcggttgtctatgcagaatgaaggcaagatcccaccggagctggtcttatctagcgtccggtcgcttaatgttttcggtgctagagtggaaatcccgtctctgtcgaggttcagacgcctgcgtgttttagcctttgaaggctgtgggcagctacaggatgaccatctcaaagatgtgggtgatctgttgcacctgaggtacttgaggctcaacgaagcaagtggtgtcacagagctcccagaaaaaacagctgggctaaagcacctgggggcactcgacgtacatgggcacaacacagtaatggaaatcccagcatccatttgtcaggccgggcgattggaatgcctggttactctagctgttgatcgtgaaactataatgcctgatgagattgcagacatgaaagcacttcaggttctggaaggcgttaatgtctacatccagtcggttgacttcattgaggggctcggcgagctaacgaacctgaggaagctggggataagatttatcaacagtgatgctgatgaagaatgggatgagaaatatgaagagatcgtctcctcggtccgtaagcttgccgactcaaaccttgattctcttcgtgttcatactttgaacgagccgccagaactactgaacaagctaaatgaccatggtacagttgaccttggagaacttgtcgtcacgggagatattgtctcggatcttgcagactggtggggtgtacttgtgaaccttcacaagctactcttttatacgtacggactcagtgagaaagatgtggagaccttaggaagcataactggtctggaatacctctgcatccatctcttcgatgcacccgacgaccctcatgagctgaaagctcccctagagagagcaatggatgcccacccaaaccgtcccagattggtatgggtcgatgaggattagacctcaactcaggcaccatttcttccttgcaaacactcattctttcttctgtctgctcaccagatacctttctgttgttggttaattcagtcggtttgtgtttgattcttagccaataataaagtttgaacccagttgggtgcgtccatgtactcgccagactcgtgcttagttcacgatgcggtgttcccattgtttctgttttctattgggtcgtacaagatgtcatgcatgcttctttctcagtcgtgggatggcgcacaggtgatcatgccgttgccattatgtacgtgtgtggtccgtgctcatcagttcgagcttgtgacgctgtgagtggacaactaagagccgagaaacaaaaaagccttgattacaaggagtcgcttagtggagaaacgaagagttttgaatataagaattctctaacacccacgcagcaggagtgtcggtagaccaagcattcattctttgaagacaacatatgataggccttttgtgaaaatgtgagccaactgcgacatcgtgggtacatgaagaacatgaacaacaccgacgacaactcgtcctccataactttgtttcttgcgagctcaagaggaacggtcaaagcctagaacgggagctcgccaatgtccgagagtccctaagacaggagagcaccgaacatgagaacatgcgggttgccgctatcttggcgtgcagcgacctcggaatctcccaacgcgaaggcctgagctctttagccatccaagtttcgaagctgataaaggacgccatcttcctcgatgtgcaccagtcgttttcgatcactccgtcccattatgacaacaatgatctcccggcgttggtgcagggcttcgcgctggggtacaccgaggaagagttggacaaattcgaggagacagaccctccatcgcggcatttggcagatcagactggaaggaggctcttcctaaaataaagtaattgtaaaaggattttatgtatccaactagggatgtactagtcttatgtcaggatttaactagtcatatgcccatgcattgctacggtttatatatatatgacataggataaattttgttttaataaagcacaaaatatatgttttctattgattaggtgtgtgtgaatgtggagtcaacaaccaagattcaaacactcacttatacataatttcaacttattttttacataaactctcctattatagtagtagaaaaaagattataggagtgtgggttgattctaaagaaatataggagttttttcgaaaaatattgacgcgggacaaccgttgaaactggtgctttaatatagtaaagatgtaggtcgttgtttcaactgcttcgcggatgaccaccttgttgcatcctgccgccttgggccaagatgtttccgctacaaggctcttggtcatcgctcctacgcctgctctgggccagtgaatggtgataggaagtttcctgtgcatcgacgactattgaggggagtggtttggagtaggctatcgacagtcgcgccaacgaacgccgaccgtgtggcgacagggcctgtcccgcagcaccagttggctcgggcctcggtctaggagcgacttctgcctccagcaccccatccacgcaagaagagagtcagtgtctggcgtagaatctcccctccaggcattgagaagggtcgggtgaaagggaaatgagcccttgggccatttctaagtattttggtgattaagtgtctaacacaaatggttatgtgttaaactatgtcaaatgatggacaaagtgcaaatcaatacaaaggtatgattttagacttagtacattggttttagtgtactaacatatttgtctaagtgctagaatcagagaaaagacaaatggaaaagacttggctcgagcagccaagactctgctcagtctgggtgcaccggactgtccggtggtgcaccggacagtgtccggtgcgccaggctggctctagtgaaaaggccgctctcgggatttcgtcggcggcgtacggctaaaaatcaccggactgtccggtgagccaacggtcggccgagccaacagtcggtcgcgcaatccgcgcgtgacccgtggccgggccaacggtccgatgggggcaccggactgtccggtgtgcaccggacagtgtccggtgcgccaacggctccaaaacttcaacggtcggctgcgccagaacaggaaagcaatcagcaccggacagtgtccggtggtgcaccggactgtccggtgcaccagtcgacagaaggcaagaattgccttcctggattgctctcaacggctcctagctgccttggggctataaaagggacccctaggcgcatggaggagtacaccaagcattctttgatcatctcttagcaccaagacatctctctagcgcatttgattcgttgtgatagcaatttgagctcctcttgagttgagaactccgtgtgtgatcttagagctcaagttgtgacttgtgtgtgctcgtgctttgaggcttgtgtgtgttgttcttcccactcttacatctgtgcttctttgtgatcatctcattgtaagggcgagaggctccaagttgtggagattcctcgcaaacgggaaagagtaaaggaaaaagaacatcgtggtattcaagttgatcattggatcacttgaaaggagttgagtgcaactctcgtccattgggacgccacaacgtggactaggcaagtgttgtacttggccgaaccacgggataaatctttgtgtctcttgtgcttgttctcactgtgtcaattgtggttcacaagagctctccttagccacttgattttattgtgctaacgcttaatcaagtttgtggctttaagtttcaagtttttacaggatcacctattcacccccccccctctaggtgctctcatcgggtacatttcgagatgatgaaaggggcagtggatgcgcgagcatttgttactccatccagtgatgtcggagctacagctggttctgtctcgcagggccccctcccgccccgcccgcgacgcatacgccatcgaaagcgcaagtcatcccctaggggtggttctgatctgggtcgtggacgatctgatcaacccagaaatgacaagacccctctggttgtacccagccttttgcatcatcagcacccttgtgtgatcggttggaatagtttgatggataaagcagaagaagatttgaagaacgcagtgtctatctttgtggtcagtgatgtgcttgtgccagtcgtcgatatcgcagatgcagtcgctcaaaaacttgaagccaattctgattcgctaatcttgaggcaattggctcatggacatttcctgctcatgcttcccaccctccagtcagttgaccagctgataacgagatggaacactattcgtgcaggcgccttctctctgcactgtaaaagatggtccaggttttttggaccctcaggtgcaagtttgcctatccctgtggaattcgagctaagtggcattccaattcatgtctgggaactatccactgtccgacacattttaaacccttttgcatgggtgcagaaggtacatgaggagactctcgagctcaagaatttggaggtctttcgctgttatggttggtgttatgacctggcctcaatccctcattctagagatctctggattactgattcgctgggaaatggaccaggcgttgaaaggctatctcttgcctatcgtgttcagattaagatcccaacagatatggatggttccacacgacagaggtggcgtttctgttcgcgttcgccaccaggggaccgtgatggtcgaaggggttcagcggaggacggtgtgcttaaggacagacgatctgctcttgaacgtctaggcccaaggtctaaagttcagcctagggaagaaggcgacgccagtcagtgtgatcagacagctggaaactatgagatattggaggagtcctcgaccgtggagatcaccattggtatatctgcagaatttgctgttgtcccgaatttggctgctgaccgggcacgtttggtgctagtttcttccccaccacaggcgtgcacctctcaaccccttgcagcctctcatgccttggacgtgggtccattggcccctgttgatgagctcgagaccgtggagcagctggtgcccaatattgatgatgttcacgctgattcttctgttccagccgtcaacctgtcgctacttattttggaagaaagaggtcttggtgctgctgtggttccagacactgtgcctgcccagggtacttctcaccctgttgacaggcctttgtttgttgagccgcaggatgttacccattttagcggaggtggcctcccttcccaccttcaggaccactctgacagcagattcaaagtaaagcctccctgtttcaaagtttactcaagaagaaaaaaactccaggcagcggcagcccagatgacagatgttgagaggacagaaaggttacaagatttcatgcagaatgttaccaagccagctgcaaggttgttggctgaccccccccccccggattaccaagcgaaagaagaggaagaccctgcccaatgacttcaatccaaggagaagcagaagggtggctaatctgccaccggaactgggcaatgaatctgcagctaaagtctgcaggcagctaggattttgtgatgaccaagaacatatttccttcgaagacgcccaaaagtatgttcacctttttgatgcagcactttccagagagcatattgctgccatggcagacttatttggctgggaactgcctgttgaaggccggtttcaaacctgattggagggggggtgtgctgtaggtcgtgtgtgttttagtgtaccctgttataatgcagccagtttttcttatctggaatgtaaggggcctgaatgacatgtctaggagagacattgttaagtccttggtccttggcatcaaaccagcggttgtctgtttgcaggaaactaagctatgctctatctcagcttttgacatcctgtctattcttggtgctgggtatagtgacttcgtttactccccagcgcaaggaaccagaggaggtgttttagtggcttgtagagatggagtctattctgctattgagagtttggtgcatgatttcacagtttcagtcaagttgcaagaggaaggtggtgctcagtggtggttcacgggtgtttatgggccacaccaagaccctctcaagcattcctttctccaggagcttagggaagtcagggagacatgcgctggcccttgggtaatagctggagattttaatcagatctacagctcagaagacaagaacaatgccaatataaatagggccatgatgggcagattcaggagacttatcaatgacttggagctaaaagaaatcccgttggtaggcaggaaattcacttggtcaaatgagagaaatgtccctacacttgttaaactcgaccatgttttctgtacagccagctgggaggagatccatccggattgtattctccatagcaactcttcggagctctctgaccattgtcccttagctctgcatcttaatgaggatgtcaaggggaagtgaagattccattttgagagtttttggactaagattccagattttttggagacggtggctacctcttgggagcagccagtgatgttttcttgtcccttggaagaatggctctaaagttgagaaggcttgcaaaggctttgcagtcgtggagtcataaaaggatcggaaatgttaaatctcagcttagcttggccagggaaattttgcacggacttgagattgctcaagacaatagactgttgtgtggggacgagatatggctgaaaggaaggcttaagcaccactgcctggggcttgcctctctggaaaggacaattgctagacttagatcgcggatcaaatatctgaaagagggagatgccaacacttccttttttcatctataggcttgctatcggaaaaagcggaactttatctctgaactagtgcatgaggacctgatcgccacctctcaagagcaaaagcagaaggtcttgtttgatttttttctccaatttgttgggtgtagcgaagcagcgtgatttcactctagatttggaggcttgccacaatgctgatgttgatcttggggccttggaccttcccattacagaggaggaggtccgggccactattgctagccttccctcggacaaagccccggggccagacggttatacaggaaggttttataaaacttgttggcacataattaaggttgatctgatggcggcagttatcaccctgcaccaaggtaacgcgcacaaattgtggatgatgaactctgcgtacctaacccttatccctaagaaggttgatgccaagacagctggagattacaggtcaattagtcttattcacagcttcgccaaattggtatccaaagtcttggctaatcgtttagcaccacaccttcaaaatctggtggctacaaatcaaagtgcctttgtcaagggtcgctccattcatgacaactacatgttggttcagcactctatcaaggcccttcacaggaagaagatcgttagtctatttctaaagctagatattacaaaagcttttgactcagtgtcatgggcctttctcctagaagtgttatctcatcttggcttcggacccaggtggtgcggccttgtgttcaatatgttatccacttcttccacacaagtgttattgaacggaactccggaggattatattcgacaccggagggggctgcgccaaggcgaccccttatctcctatgcttttcataatcgtgatggatgtgcttagtagcttattcaagcatgctgaggagagaggattgctgcatgacctggccatcaaaaacgtgaaatctaggctctccatttacgcagatgatgtggttctttttgtcaagcttgcagttgaagatcttatttgtgtcaaaatgatcctggattgctttggagaggcctcgggcttagttgtgaatttgcaaaaaagttgtgctatccctatcagttgtgatgatcagactgttcaggacagttgtaacattttgcagtgcatccggcttcttttccatgcagctatttggggctgcctgtttctgataagaagttggggaggagggacctcttgcagtgggtggacaagatagctaaccggctgcccggttggaaggctccatttctaaaccttgctggcaggacagccttggtccggttcgtgctctctgcaatccccgtatatcttttcatcgccatgaatgttcccaagtgggttatcagtgctattgacaaaattcaccgaggtttcttgtggaagggtagaaaagatgtgaaaggtgggcattgccttgtggcatgggataaagtcaccagaccgctggaccttggtggacttggtatcccaaacctgatatataagagttgggcgctgcaagctaaatggctttggctcatcaagactggcccgaataggccttggagtggattggatctccctgtttagtcacaagtaaggaaactagtggccagtttgatgtacactcatgtgggcaacggcaaaaacacccttttttggagggatagatggttaaatgggtgctctatcgctgagctggcacctgaagtgatctcaaaggtggataaaaaggtggcctctaccaggacagtgcatcaagctttggagggcatgttgtgggttagggacatcaagccaaccctttcccttgtaagtatacagcaatatcttacgctttgggacaccctgggtgagatcgtgctcactctccaggaggatcaccatgtgtggagattcaagtcttcgggccttttcttttctaggtcctgctacaaggttctatttttgggctccatcacctacgaaccttagaaaagactttggaaatcttgggctcctcctaagtgtaagacctttttatggttagccatgcagaataagtgttggacagctaacaggctggaaaaaacagttcagcatctgttgactggttgtgtcttcgccagacagttttggcatagcatcctctccccctttggtatgggccacctaactccaagaccagaggaaactaattttgctgattggtggggaatagtgaccattcaggtgcacagaaacaagagaaagggagtcaacagtgccattattttgggagcatggtgcctttggttgcatataaacagagttatcttcgatggagattcgccaaccattggcaaggtgcatagaagcttcatcgatgagctatccttatggatgttggctggtgccaaacacctcggaagccttggcttgctgccgctccaggcgcagcaggctcgacttaattttttcattggtcgtctttttgtatcttggtcctatggacagatttatttatgcttgttgttggccaccatagggtggttttttgtactggtcctcttggaccttaatttcccttcttaatataaagatgcgcagctctcctgcgtttttcaaaaaaaaattgaagtatttgtgatgagcccgactctctataattggtccgatcccacctacggattaagtttggtcggagagaggacttagttacactggtgagcgaaggtaccatggccgctggggcacaggatccttgtggtcggagagaggacttagttacattggtgagcgaaggtaccatggccgctggggcataggatccttgtggtccgaccggtgtaattcgctctttctacccacttgttttggtatgggtcgggtgcatccatgcttgctgcgggggagggggtcattctcttatcaaccccctagtgagggccgacctcttgctggcaatggggtcagtcgttactcagagtgggtccgttgtcacgggagaacaaattcttcaaggtcgtaactcagagaggcatgaaactagatgtagagaactttgtcaagcaatgtcaggtctgtcaacaagccaaaggtgaaaggaaacatcttgtagggttgttgcaaccttcacctctgcccttgggtgtttggcaagatatcacgatggccttcatcgaaaaacttcaaaaatccgaaggatatgacaccattcttgtggtggtcgaccgtttctctaaatatgctcactttttggcctagaaacatccctttatagcttcacaggtggctcaagtgttgttggatcaggtggtaaagttgcatggcctacctaaatggctaaatctatgaccactgatcaggacaaggtttttactagttccttatggactcagcttttcaagttattgggcaccaaactgaatttgagtacattgtaccacccttagaccaatggtcaaagtggacgtgtcaaacaatgtgtggagatgtatcttcgttgcgcaatgcatgcccaacctcataagtggaaggcatggttgttcctaggtgagttttggtacaacacttcttaccattcttacttgggatgctctcctttcaaggtgttgtatggctatgacccaccctttgttgatgctcctctgattccagctaaggccgaagtgaatgtggctaccatgctcgctgagcgtttagcctttagcactatgttgtgagaacagttaactggtgctcagaacatcatgaaaatgttgactgataggctccagactgagcgacagtttcaagttggcgatccagttttgctaaagttgcagtcgtatgctcaacactcgatgttgaatcgaccctctccgaaattagacttcaaaatctttggaccatacaaggtcgtcgaatgtgtggccgagttgcttatcgtgtagatttaccatctacaacacaagtgcatctagtgttccacgtttctcaaccgccagtcttttccactatacctcggtatgatgatctggcaaggggttgctcctatggagattctggatcggcggttggtgaagaatggcaaccgggtggttcctcaagtgctcatctgttggagtcacgtactcacgttcatcgggaatatgttacttgggaggattattatgcggttcaacaacacttgccacgcgcccttgcttgaggacaaacaagtccttcggcgggggcagatgttacgtctaaaaaaactaatgacactaagaacatgggcaacgaagctgaagacgctaggaacacgggcacccagctgattgtgtcggatggtgaatagggaggttggttgtgttgcagaaggcgtattattgcattacgttttagtctatggttgtgtgggtgttggaccgtggatgttgggaccggcccagtccgggaatatcactatcactacgtctttgaagtgggagtttcgtcgtgcgtcgtccccctccccacacgtgtagcgagcgagtgtcgctagagttcctatgggctcaacgaaatttaaaaaccgcccgttgggatttgaactatggtctctagtagggatggcaatcgggcaagtaagacatgggtatatggttggtgaacccatacccgcgagatgaaacttaactcatacccatatccatatatgttcatgagtatggatctgtactcgtacccaccgggttcctctacccgacgaatattcattacctgctcgcccactataattttagcattcatcacacaaacaacaattttatgataatcaaaaatttcatcgttcgaacaacatagaacaacaatttcagcacccaacaacaatttcaacatcaaattattagatgataatacagacaatataaaacaatattcgtggaatgataatacacaacattatagcaacaatataataaagtagcagggggctcggtgcattggccagtcgcctaggcccagttggcctactcagttacttagtttaggacttagggttggccggttggttgaatgggatttggaaattgagagatggcctacttgtcagatacctatcgagtaacggatatggatatccatatccacgaaaaatacacccatagataccttaatatatccatatatgtaccacggatacaaattttcactatactcgtacctgatggataattatctatggttatttactcaaacccgtatccactgtcatccctagtctctaggaagagagaccatgcctctaaccacggtaactcgaattggtttgggttatagtgttatacaaagaaactatatatgatatataacaaactagtaaataatgtaagcacgaacgaacaacgaataataacataattttaccacactgtatcgcggtatcgcctggtgtcgctcacgtccaagcgccttctcgccggcgtccaagggccatcacaggttggtgcatgtcgccggcgaaaggcctgacgaacgacaaagacctcggtgctcgccctgccgccctgcagcacagcagtgagcagtcagcaccagcgctcgtcggctgccgggtgccgcccgcg

SEQ ID NO: 23433 - DNA, 2040 bp, Zea Mays
gtttttttttcttcttctcaatctgttgactctgcgctcattgaaccacccggtagacaacaattattggaagaccaaatttgaatatggatttctttctcgtgtgtggctgccatgcatttacactaacatgcacgcacctcatgcgcaaataaataataacaataactggctggccagcctgcctaaagatctagatctgttgactctgcgctcaatgaaccacctgtcggccggtagacaataattgttggatgaccagatttgaatatggatttgtttctcatgtgtacgtgacagccatggattttataataatatgcacgcgcatcatgcgcaaataactaataataactagcacaaaactctatgctactactacatacatatatgaacaacagatcgtagacatccattggcagcaagaaagaaaccaaggtacctagttcaaagagagcttagctaggaatacaatggagggcgctcttgcgagcgcagcaaccggagccctgcagtccgttgtggcgaagctgcaagctctgctccgcgatgagtacaggcgcctcacgggaatgcgcggcaagatggagtggctcactggcgagctggttgccatgaaggccttcctcaccgacatgtccagggacgagactcctcctgatgaacaacgcaagctgtggatgaaggacgtgcgggagctctcctacgacatcgaagacagcctcgacgacttcttcgtgcagcatgccgccaagccagacggcatcatggagaagatggcgagcctgctggagaggaccaagagtcgccaccggataggcaaggagttcgacgccatcaagaggaaagtcatggaggcggacgcaaggcgtaagagttacagtaccgaccgtccggtggccaaagccagatcatcatccatcgatccaagagcgctagctatatttgaggatgcgaggaagcctgttggcatcgacggagcaaaggacgaggtcaccagactgctgctgggacgactggaacaagaaggccaccaggagcagcggcaacgccagattgtctatattgttggatctggagggctggggaaaacgaccctggcataccaggtatatcaacaacttaagaatcgattcgaacatcggtccttcttatccgtgtccaggaatccggacatcaatgtcgttttcaaaacaatcctccatgaagtggtgaccgaagaagataggccgtccgtgttcaagggagactatgtcagcactgtcgctgcctcgctgggacccagcaacttatcacaatgatcagggaataccttaaacaaaaaaacaaaaggaatccgacgaatctaggtcggcctaaaaccattgtaaataaggcttaataaattgttatttacatcagtttttgatttatttacatcggttctaggtcgttactaataaagcatcgtaaataagtttatttacatcggctaaccgccgtaaataattaatctatgacggtcatagctagccgacataagtaagggacggtcaggtttcaggttcaaacgcacgaaagaaaatgatttatactggctaaacaaaaatcatcgtagataactacttactttacttgcattccgaagctagtaggatttctacggaagtatatgcatacagaactacacaagaatgagacagaattaatgtagcacccgcatagaaagcaacaaaatagatttctacccagagccccagaattgctaccagattttaaaactacaatattatggcaagcactaaattccatatctatagtagaccaaacaagcatatcgtgcatggatcagtagcaagtttaggcatcttgaactattatatgatgcacaatctcagcaagatttcaagcaacaaattaactacagaaatactatctaccttgccaatggccacaccgcccacaacgttccaatttcaacagcagataaacaaccatacctggcgccacttatggtcatgaactgctacagcttgtcgcggtttcctctcctcagcttat

SEQ ID NO: 23434 - DNA, 3202 bp, Zea Mays
cacatcaccgcccactcccaccgcgttccttgtctcttccctgtcccgactcccgacccgatctcccaccgcgtcgggatcctcctgcccgcctacccgcccgcgcgccgccgtcccgttcgccagaaccatggacggcatcgagggcctgctggcccgcgacttcggcgtccggccgcagggcaaggccgcccccatggccggcgcctcccgctccaccggatccagcgccggcgccgacgcatgggccagctacggcagatccaccccggccccctccgcggccccgtcctacgacgacctcttcggcgcctcgctcttcgactcgttcaagggccccaccaccaccacaaccaccaatcccgccgcgccttcgcctgcccccgcgtacgacgacgacatcttcgacgcggtcccggggctgcgcccctccagctccgcgtccaccaccgcctcctccgcgccgcggtacgacgacggcgtgttcggctcttcggcggccccggcgtacgacgacgtgttcgccaccagcgcccgctccgcgccgccgcctcccgcttacgacgacgacatcctcggcggattcgggagcgcgctgccgcaggcacaggccgaggagaggaggaggccggtggctgtcgacgacgacgacctgctcggggcgttcgggaggagcccgtcagagggaaagaggaagccggctcctgcgcaggcggaccgagtggggagcacggggttcgatgatctgatccctggattcgcggggagcagcccgccgaggagtaggaagtctaacgacgataacaaaatgaagccaccagttccgacttctaaacagagagctagcatggcagatggcccatttgttgttctagaaacagcctcggcatatacatccccaggaaggtccaccgatcccgtggaagatctggataagactgcaagctttgatggcaaagctgccaatagtactgctgatgacgatagtttattcgagcaatcaagcgcttttgaccaggctccaaaatcagatcctttgtttacctctgaattcaatggtcatgccaaggacacaaaaccgccaagcgcagtccgtgattcgagtcctctacaccattcaatggatagaaatccagcgcgtcaatcttctatggaagactttgataatgtaatgcccaagtcacagtctgcaaggtattctgacgttcgtggtaatgatacggaggatcagtcaccaagatctactgaatctgaagatgatatatggcttacagtttccgagattccccttttcacagcaccaactattgctccaccaccctccagatcaccacctcttctcaaacgaaagccactgagagcaaatgcaaaggagaatgggcatgctcgtcagtctaccccaaatcagaaccattacacagatttgccaaagcaaccggaggtttcttcaatagatgacctggaaggcttttccatgggcaaacctcaaatgcctgcttatggcaacactgtttttgatgaggactatgaaagaagctcatcagatactgaagagaaagacaggcaagaaagattggagaaagaaagagaaatgaagctgagggaggagatggagagggagcagagaaggcttgaaaaggagagggagttggaacaacagagagaaagagagagagaacgacaggcagtggagagggctacaaaggaggcacgtgagagagcatctgctgaagctcgtgcaaaagctgaaagagaggcccgccagcgttcacagcgtgctgctgtgcaaagggctcaacaggaagcccgtgagagggctgcagttgaggccaaagaaagagcagctagggtagctgcagaagcaagggagagagctgctgcagaagcaaaggagagggctgctgctgaagccaaggagaaggcagcagctgaagccaaggagagggagagggctgctgctagggagagggcagcagcagaaagagctgctgctgagagagctcagcaagaagcaaggaagagagctgaacgagctgcagtggaaagagctgctactgaggctcgagaaaggcaggcagctgcagctgcagccgctgccaccgcagcagcagctgctgctgcaagagaaaaacagagcacggcagatgatcttgagtcattcttcggtgtgggttctcgtgccaacagtgcgccgaaacagagggctccaacaccaacagtggattctatgtttggttttggagctcaaggcagaggaacaactaatggatcacagagagcagcatcaacttcggctcctgtgagaaaagtggcatcagccacaagttttggtgatgatctgtctgacttatttggagctcctgcatcttctgatgtttttcaagaagttgagggagaaagtgaagaaagaagacgtgctaggttagaacgtcatcagaggactcgtgaacgagcggcaaaagctctggctgagaagaatgaacgtgatatgcaagttcagagggagcaggcagagagagatagaattggagacactctagacttcgaaatcaagaggtggtctgctgaagcagtacaggaaggcaacactgtgcattcatcctgataaggtgcaacagaaaggtgcaacacttcagcagaaatatattgccgaaaaagtctttgacattcttaaggaggcatggaacaaattcaactctgaagagctcttctgaagcaacctccgtgactgtgaatatgcatatatgatggacagcttaactgcataccaacatgagtcgccggagtagcaaggcacaagtgaacaaagtgaaagctccacctcagttaccatcgttcgacagattgtgttcagttgctcctcccgtccactgtgctctgctgctcccatctgtatctgttcactcatggtacttgcactccacatctacgaatatacgtacgccatctttttttgttttagtttttgcagcgtgggttggctcatacaaccaagatttacactgtatgtcttaaatactatctcgtgtacgatggaccacagatgttgaaaccacacttgctgtctaagcccttgttgatttctattgaaagtgttgtacgctgtacagattgtaccattgttgatttgagatgtgatttggtttactcaaatttgtaacatatatcttcagtattcagcttacccaaggctagctccaat

SEQ ID NO: 23435 - DNA, 3311 bp, Zea Mays
cacatcaccgcccactcccaccgcgttccttgtctcttccctgtcccgactcccgacccgatctcccaccgcgtcgggatcctcctgcccgcctacccgcccgcgcgccgccgtcccgttcgccagaaccatggacggcatcgagggcctgctggcccgcgacttcggcgtccggccgcagggcaaggccgcccccatggccggcgcctcccgctccaccggatccagcgccggcgccgacgcatgggccagctacggcagatccaccccggccccctccgcggccccgtcctacgacgacctcttcggcgcctcgctcttcgactcgttcaagggccccaccaccaccacaaccaccaatcccgccgcgccttcgcctgcccccgcgtacgacgacgacatcttcgacgcggtcccggggctgcgcccctccagctccgcgtccaccaccgcctcctccgcgccgcggtacgacgacggcgtgttcggctcttcggcggccccggcgtacgacgacgtgttcgccaccagcgcccgctccgcgccgccgcctcccgcttacgacgacgacatcctcggcggattcgggagcgcgctgccgcaggcacaggccgaggagaggaggaggccggtggctgtcgacgacgacgacctgctcggggcgttcgggaggagcccgtcagagggaaagaggaagccggctcctgcgcaggcggaccgagtggggagcacggggttcgatgatctgatccctggattcgcggggagcagcccgccgaggagaagtctaacgacgataacaaaatgaagccaccagttccgacttctaaacagagagctagcatggcagatggcccatttgttgttctagaaacagcctcggcatatacatccccaggaaggtccaccgatcccgtggaagatctggataagactgcaagctttgatggcaaagctgccaatagtactgctgatgacgatagtttattcgagcaatcaagcgcttttgaccaggctccaaaatcagatcctttgtttacctctgaattcaatggtcatgccaaggacacaaaaccgccaagcgcagtccgtgattcgagtcctctacaccattcaatggatagaaatccagcgcgtcaatcttctatggaagactttgataatgtaatgcccaagtcacagtctgcaaggtattctgacgttcgtggtaatgatacggaggatcagtcaccaagatctactgaatctgaagatgatatatggcttacagtttccgagattccccttttcacagcaccaactattgctccaccaccctccagatcaccacctcttctcaaacgaaagccactgagagcaaatgcaaaggagaatgggcatgctcgtcagtctaccccaaatcagaaccattacacagatttgccaaagcaaccggaggtttcttcaatagatgacctggaaggcttttccatgggcaaacctcaaatgcctgcttatggcaacactgtttttgatgaggactatgaaagaagctcatcagatactgaagagaaagacaggcaagaaagattggagaaagaaagagaaatgaagctgagggaggagatggagagggagcagagaaggcttgaaaaggagagggagttggaacaacagagagaaagagagagagaacgacaggcagtggagagggctacaaaggaggcacgtgagagagcatctgctgaagctcgtgcaaaagctgaaagagaggcccgccagcgttcacagcgtgctgctgtgcaaagggctcaacaggaagcccgtgagagggctgcagttgaggccaaagaaagagcagctagggtagctgcagaagcaagggagagagctgctgcagaagcaaaggagagggctgctgctgaagccaaggagaaggcagcagctgaagccaaggagagggagagggctgctgctagggagagggcagcagcagaaagagctgctgctgagagagctcagcaagaagcaaggaagagagctgaacgagctgcagtggaaagagctgctactgaggctcgagaaaggcaggcagctgcagctgcagccgctgccaccgcagcagcagctgctgctgcaagagaaaaacagagcacggcagatgatcttgagtcattcttcggtgtgggttctcgtgccaacagtgcgccgaaacagagggctccaacaccaacagtggattctatgtttggttttggagctcaaggcagaggaacaactaatggatcacagagagcagcatcaacttcggctcctgtgagaaaagtggcatcagccacaagttttggtgatgatctgtctgacttatttggagctcctgcatcttctgatgtttttcaagaagttgagggagaaagtgaagaaagaagacgtgctaggttagaacgtcatcagaggactcgtgaacgagcggcaaaagctctggctgagaagaatgaacgtgatatgcaagttcagagggagcaggcagagagagatagaattggagacactctagacttcgaaatcaagaggtggtctgctggtaaagagggcaacttgcgtgctttgttatcaactttacaatatatactttggccagaatgtggatggcaagctgtatcattgactgatttaattactggagctgctgttaagaagcagtacaggaaggcaacactgtgcattcatcctgataaggtgcaacagaaaggtgcaacacttcagcagaaatatattgccgaaaaagtctttgacattcttaaggaggcatggaacaaattcaactctgaagagctcttctgaagcaacctccgtgactgtgaatatgcatatatgatggacagcttaactgcataccaacatgagtcgccggagtagcaaggcacaagtgaacaaagtgaaagctccacctcagttaccatcgttcgacagattgtgttcagttgctcctcccgtccactgtgctctgctgctcccatctgtatctgttcactcatggtacttgcactccacatctacgaatatacgtacgccatctttttttgttttagtttttgcagcgtgggttggctcatacaaccaagatttacactgtatgtcttaaatactatctcgtgtacgatggaccacagatgttgaaaccacacttgctgtctaagcccttgttgatttctattgaaagtgttgtacgctgtacagattgtaccattgttgatttgagatgtgatttggtttactcaaatttgtaacatatatcttcagtattcagcttacccaaggctagctccaat

SEQ ID NO: 23436 - DNA, 3311 bp, Zea Mays
cacatcaccgcccactcccaccgcgttccttgtctcttccctgtcccgactcccgacccgatctcccaccgcgtcgggatcctcctgcccgcctacccgcccgcgcgccgccgtcccgttcgccagaaccatggacggcatcgagggcctgctggcccgcgacttcggcgtccggccgcagggcaaggccgcccccatggccggcgcctcccgctccaccggatccagcgccggcgccgacgcatgggccagctacggcagatccaccccggccccctccgcggccccgtcctacgacgacctcttcggcgcctcgctcttcgactcgttcaagggccccaccaccaccacaaccaccaatcccgccgcgccttcgcctgcccccgcgtacgacgacgacatcttcgacgcggtcccggggctgcgcccctccagctccgcgtccaccaccgcctcctccgcgccgcggtacgacgacggcgtgttcggctcttcggcggccccggcgtacgacgacgtgttcgccaccagcgcccgctccgcgccgccgcctcccgcttacgacgacgacatcctcggcggattcgggagcgcgctgccgcaggcacaggccgaggagaggaggaggccggtggctgtcgacgacgacgacctgctcggggcgttcgggaggagcccgtcagagggaaagaggaagccggctcctgcgcaggcggaccgagtggggagcacggggttcgatgatctgatccctggattcgcggggagcagcccgccgaggagtagtctaacgacgataacaaaatgaagccaccagttccgacttctaaacagagagctagcatggcagatggcccatttgttgttctagaaacagcctcggcatatacatccccaggaaggtccaccgatcccgtggaagatctggataagactgcaagctttgatggcaaagctgccaatagtactgctgatgacgatagtttattcgagcaatcaagcgcttttgaccaggctccaaaatcagatcctttgtttacctctgaattcaatggtcatgccaaggacacaaaaccgccaagcgcagtccgtgattcgagtcctctacaccattcaatggatagaaatccagcgcgtcaatcttctatggaagactttgataatgtaatgcccaagtcacagtctgcaaggtattctgacgttcgtggtaatgatacggaggatcagtcaccaagatctactgaatctgaagatgatatatggcttacagtttccgagattccccttttcacagcaccaactattgctccaccaccctccagatcaccacctcttctcaaacgaaagccactgagagcaaatgcaaaggagaatgggcatgctcgtcagtctaccccaaatcagaaccattacacagatttgccaaagcaaccggaggtttcttcaatagatgacctggaaggcttttccatgggcaaacctcaaatgcctgcttatggcaacactgtttttgatgaggactatgaaagaagctcatcagatactgaagagaaagacaggcaagaaagattggagaaagaaagagaaatgaagctgagggaggagatggagagggagcagagaaggcttgaaaaggagagggagttggaacaacagagagaaagagagagagaacgacaggcagtggagagggctacaaaggaggcacgtgagagagcatctgctgaagctcgtgcaaaagctgaaagagaggcccgccagcgttcacagcgtgctgctgtgcaaagggctcaacaggaagcccgtgagagggctgcagttgaggccaaagaaagagcagctagggtagctgcagaagcaagggagagagctgctgcagaagcaaaggagagggctgctgctgaagccaaggagaaggcagcagctgaagccaaggagagggagagggctgctgctagggagagggcagcagcagaaagagctgctgctgagagagctcagcaagaagcaaggaagagagctgaacgagctgcagtggaaagagctgctactgaggctcgagaaaggcaggcagctgcagctgcagccgctgccaccgcagcagcagctgctgctgcaagagaaaaacagagcacggcagatgatcttgagtcattcttcggtgtgggttctcgtgccaacagtgcgccgaaacagagggctccaacaccaacagtggattctatgtttggttttggagctcaaggcagaggaacaactaatggatcacagagagcagcatcaacttcggctcctgtgagaaaagtggcatcagccacaagttttggtgatgatctgtctgacttatttggagctcctgcatcttctgatgtttttcaagaagttgagggagaaagtgaagaaagaagacgtgctaggttagaacgtcatcagaggactcgtgaacgagcggcaaaagctctggctgagaagaatgaacgtgatatgcaagttcagagggagcaggcagagagagatagaattggagacactctagacttcgaaatcaagaggtggtctgctggtaaagagggcaacttgcgtgctttgttatcaactttacaatatatactttggccagaatgtggatggcaagctgtatcattgactgatttaattactggagctgctgttaagaagcagtacaggaaggcaacactgtgcattcatcctgataaggtgcaacagaaaggtgcaacacttcagcagaaatatattgccgaaaaagtctttgacattcttaaggaggcatggaacaaattcaactctgaagagctcttctgaagcaacctccgtgactgtgaatatgcatatatgatggacagcttaactgcataccaacatgagtcgccggagtagcaaggcacaagtgaacaaagtgaaagctccacctcagttaccatcgttcgacagattgtgttcagttgctcctcccgtccactgtgctctgctgctcccatctgtatctgttcactcatggtacttgcactccacatctacgaatatacgtacgccatctttttttgttttagtttttgcagcgtgggttggctcatacaaccaagatttacactgtatgtcttaaatactatctcgtgtacgatggaccacagatgttgaaaccacacttgctgtctaagcccttgttgatttctattgaaagtgttgtacgctgtacagattgtaccattgttgatttgagatgtgatttggtttactcaaatttgtaacatatatcttcagtattcagcttacccaaggctagctccaat

SEQ ID NO: 23437 - DNA, 984 bp, Zea Mays
cgtccttgctttggcagatgaggagataagtcattgggaagcagttggggagaagggcctatgttctctggctgcctatgcagctgctccctagggtggtgtgttgatttttttctttcacatgatgaatacttttttgtatgctatcttatggcccccgtaaggaggcctgctgatgtatggtctattttagacctctttattctatcttcttaatttataaaggggcgcagttctcctgcgtgttttcgagaaaaaaaaaagtgacgtcaagcatctgatgttctatatgaaagagggggtagcacataagctaaaagataagttttatagaatgacaattagaccggttatgttgtatacttgtatggtgcaaaatgttggcctacaaaaagacaacatgctcaacaaataagtgtagtgaaaatgcatatgttgtgttggatttgtggccatacaagaagagatcgagtctgaaacgatgatatatgtgataggctagggatagcaccaattaaagaaaaacttatccagtactgattgagatggtttggacatgtccaacaaagatctctagaggtaccagtgcataatgggatcctaaggcaaaatagcaatgggaacataggcaagggaaggccgaagttaacatgggaacagtaaaaagagacttcaaaggatggaatataacaaaggtttagtattgaataggagtgcatgaaaaacagctatgcatgtgcatcagctttgacttgtggtttcgattgggtttcaaatctagcctaccacaacttacttagaactaaaaggctttattattattgtaaataaaaatggcgacacagaaaccagcagcagcaatttgataattccaccccaccaaacaaaactattgctacccaacagcaacaattagagaaccatgggccactgaacagatacccaaccgggtcatcccacaccattgaataaaattatattcac

SEQ ID NO: 23438 - DNA, 1064 bp, Zea Mays
tgaaatctcagcaaactgcttgatgaactccttcttttccaagtgtatgaatgcacatgacaagagcacattctttgtgttctcactgcatcagatgagaactgataaaatacaaagatatggacatgaaactaaaaagaaatatcaagttgcattccaaggttggactgcagacagccccttacatagaattaagaaaaacttaaccaaccaatttctataatctaagaactaagcatacaccattgttggcaacctcaaaactaaccgaagaagaatagacaagttgcattagatttttatgtagtgtataaataacagatgcatatgcaaaacttcaaatagatagcatgataagaatcttgcaaaaacagaataatttcaaagcagcgagggaacatgaatccaaagcatatcacctgacataataaggaaaatcctcaaaggtaacatcaatatcacttggattaataattccttgtttcatcccatccttaaaggcttgacatctactcggaggcacactggctgaagcgttaagatccctgatgagatccctctgatcttcaagagctttaaaaagatcaccagtcaaatcgaactcggatatagttgatcctgtaatcatcctcagaactggccttatcttataggttgcaatcttaccgatttccgcaccaagatgagcatcaggcaaaaagccattttgttgacatgcatcgttcgcagcagcatcaggagatatgggggctgcagcagcatccattggagagtcttcaatgttagaattaacctcattagcattttccccattctcaaattccttatcagggctcacagtgtgcccttttgatttatcagacgcagatgatgccattggcagcattactctttggctgttctctccggcgaacgcgggaggtgctgctgctacatcctttgcctgattagatgtagatggcaacatctctgtaccagcaatagcagaagtgtctcctgttctcttatctgtacggatgcgctttacgctagcaaccggaggttctataagactaacagcagat

SEQ ID NO: 23439 - DNA, 551 bp, Zea Mays
gttgtgtagtggttcagggaacactttcctacatttgcagtgcctttggtgcaggtctctgtagccctctccagttcatcgcatgccattcccctgtgctggtgaccacgcctgcagttctcccacctcgccatggctcggacgtcctaaggagttgctggcctggatgaagcttgttctgtaatcatctcagagctcccaaaataaagagtgaagattcaagatgaagtggttgctaaagaggagtctactccagtgcctgctcatcaagtggatggagctatctaactaaaggttgggtagaaggatctagtacctcttcactgcaataaggtgatgaggagtacactacctgttcctaaggctggaggacgtttccagttctggaggaagattagttaggcttatgtataagctttggagggttcctacctttctgctattgtaataagttatgcactttgagtatatcaggacttgtaataaatgtaaccttcccatgtaataaccttcagttttagaaataaaaagaatgttttgtaaagtctttc

SEQ ID NO: 23440 - DNA, 464 bp, Zea Mays
ctttcctacatttgcagtgcctttggtgcaggttcagtgaagctctcctccttgtctcgagtctagccatggttccctgcttagggtggtgattctaaagtctacaggtctctgtagccctctccagttcatcgcatgccattcccctgtgctggtgaccacgcctgcagttctcccacctcgccatggctcggacgtcctaaggagttgctggcctggatgaagcttgttctgtaatcatctcaggtgatgaggagtacactacctgttcctaaggctggaggacgtttccagttctggaggaagattagttaggcttatgtataagctttggagggttcctacctttctgctattgtaataagttatgcactttgagtatatcaggacttgtaataaatgtaaccttcccatgtaataaccttcagttttagaaataaaaagaatgttttgtaaagtctttc

SEQ ID NO: 23441 - DNA, 1958 bp, Zea Mays
accaccgttgggagccggcagccccgcacgcttcttcttcccgccgcgccgccaccccaccaatccccagtcccccacgaaagaccaaacccctcgccctcctccgctatttcccagccgaatcccacccatcccgaccaattctgtggtccgccgcgccctccatacccccgcccctgtggcgcactcatctctctcgccgcggcaaaatcgtttagccgtcccaatccgaccacttttctccgatcgagcatgagcatggcgttctcctgcgcgggcgcgcgcctccacggtcgcaccggcgtcggcggcgccaaatgccgtcccggcgcggctctgctcgggcggcggggcacctgcttccgtccgaccgcctggaggtggagcaccgccaggggaatccgcgctgacctcccgccaccgccgcgggcgagcgcggatggcgccgccacctccggcccggacgtcgtcgtccccgaagcgggggacgctactgaggaggtggccgcggttgttcaacctgttgtgctcccggagaagcttgatgtcgatgatggtggaaatggcaagctccctcccgccgccggcggcggtggggacggcgagaatggcggcggtagcggcggcgggggtgacggtgacgaggaggaggatgagttcggacccatactcagcttcgaccaggtggtccaggaggcggagaagagaggggttagtctgcccagtttgcccacggacatagttgaggcggccaagagcgttgggattcagaaactgctgctgctgagatatctggacatgcaggcgtcggcttggcccttggggcctgcaattaggtcctgctcgcttctccggaataggatgctggttgatcctgcattcctcttcaaaattggcactgagatagtcatcgatacatgttgtgcgacatttgctgaggttcagaagagaggggaggagttttggtcagaatttgagttgtatgctgcagatatgttggtaggagtagttgttaatgtagctttagtcggcatgttagcgccatatgctcgatttggtagcagatctgcatcagaaggtctccttgggcgcgttaggcatgcttatgatgccctcccaagcagcgtttttgaagctgaaaggccaggatacaaattttctgtgcagcaacggataggaacatactttttcaagggaatattgtatggttctgttggattcttttgtggtcttgtgggacaagggattgctaatttgataatgacagccaaacggagtgttaagaagtcagatgatgatgtacctgttccacctcttctcaagacttctgctttgtggggtgcattccttgctgtttcttccaacacacggtaccagattattaatggattagagcgcctggttgaggcttcacctgttgggaagcgtgtcccggctgcttctttggcattcactgttggtgtgaggtttgccaataacgtgtacggagggatgcagtttgttgactgggcaagaatgagtggctgccaatgagttgcgagctttcatttctgtggtgagtcactattcaccgcgatgctgtattgttgttgcttgctgtctgctacctgttattccacccaaattcgtcgaattttcatcatggcaaagtcaaagatgtggtataaatatcttggggggcaaaagatataaaaaataaatgtggaggtttctcggagaatgatgagtttagcattaggagtgcttagcgcagcatagaaccaggagaggttgaattgcttgttttgttgttgaagatgtcaccgtcttgatttggatagttgagtgtactagtacttgcttatactctattgaatttgctgttctcatattttcatatgttctgtggactactttggaagtccaacatcttgtcacttatttattattagtttttatggtactagcgtgtgtttcat

SEQ ID NO: 23442 - DNA, 4673 bp, Zea Mays
ggaacggcccacgacggcccatcagcgacacttccgtctcagtcctccccgtttcacccacgcgtgcgctctctcctcactctccctctccctctcgtcgacgattgggaaagcgccgccgccgccgcgccacaccacgccaggtggcgagttcttcgtagcgccgttcgccaggtctccgtagcgcccttagccgtccgcgagaaccctcaaaggcatttgcattatggttgcagcgtaggtggggagccattagaaggaggggcaacaagagttgctgggcatggcggctcaggaggccgcggcagctgattctttgggccctcggtttgctccggatgacccgacgctccctgcgccttggaaagggctgattgatggcgcgacgctgtactattggaatcctgagacgaatgtcacccagtatgagaagccggctgcaactgcaggtgtgccccctttgtcagcaggtcttccgccggcaacccctgcgcaggttccggaatctgcaccagtggcttttccgcagcttaacgtgcagtttggacaagctggccaggcagggcaccaggagcgtcctgaccaggcagcttatcctcaggctggccagcttggccagcagcacactcaacagccagctcagcagcaaccgtttcagcagcagcaaccgtttcagcagcatgtccaggcgcaacaccaagcttcgtttcagcatgtgccatatcagcaacagcaaacacacatgccaaatcagccacatcaataccacagcacgcatcctcaacacatgccgtaccagcatggtctttacatgcaacctcagcagcaacagcaggctccaccatattcatatcaggcagaccagcagccacagatgcgacaaactgcttataatcaagctcagcagccatcagtgcctcaagctgcctacaatcaaagtcagagtcagcagccaccaatgcctcaatcttcctacgatcaaggtcagagtcagcagccaccaatgccgcaaccttcctacaatcaaggtcaagttcagcagccaccgatgccacaaccttcttacaatcaaggtcagcaatccatgataccacagtctgcctacaatcaagctcagcagcctcaaattccacatggtgcttataatcaaagccagcaaccgctgggagataggattccccagggtcaagggcaacatcctcaacaatctttgagctctcatcatcctgcccaagcttcgcagtcgccgcaagtttcccaacctcaaggacctaaaatgccgactcaacaaggtcaactgcaacatggattgccgttcactcagcatggaaaaacgccattgtcacatgggcaacaaagtcctttgttgaaggatgatgatggaggagttcatgaaggcaagcggactggctttccgttaccacttagtcagcagcgtggccaagctcctcttccaaatcagcagctaccttctactcatcaacatcctggagcccttagtagccagccaaatatacctggagtcggtgggccattttatcctgccaggaatcttcctgatggaccatcctctgctgagactaataacatgggttttatgaactcacctgctcaaatgcatcaaggtggagcagatacaaactaccagaaaaaaccagttagtggccatacagttccaaatcatgttggtccatcaccaattcgacctccaatggggttcgatatgggtaatagtgttggacactttgaaagagatgaccctcactcttatggaaggtttgatggagcaaaggctctccagcagcagccaaagcttgctgctctcccaacttcacaaaattccatggtcatgcataatggaccgctttatcctcggccagacaattttggtggtcataacatggcacctccgcattcagtaccaaatccatataatcttggtccattgcctattggaacttcagtgaggccaccgtcaagtatgtttgctcctccagattttccaagcgtatcttcagctgatgcataccgtcaacaccatgaagtcactgccatgggtgagaacgttcctgctccgtttatgacatttgaggccactggattccctccagagattctgagagagattataaaatgaggctgaggcttcctgcttcttgtctctgccactgaatcaacaaagagcttcttcatgccttgagttgcttaaatccatgcagctggtttttcaaatcccactccaattcaagctcaaacatggcctgttgcgctgcaaaaccgggacatagtagctattgctaagacagggtctggaaagacgctggggtacctaatccctgcttttatacatctgaggagatgccacaataatccgatgctgggccctacagtattggttttggcccctactcgcgaacttgcttcacaaatacaagccgaagtagttaagtttggtcaatcatctagagtttcttgcacatgcctatatggtggaacttcaaaggtccctcagctaagagaacttgagcgtggagcagatattgtggtagcaacaccagggcgtcttaatgatatcctggagatgaagaggattaacctccatcaggtttcattacttgtgcttgatgaagcagaccgcatgcttgacatggggtttgaaccgcaaatacggaagattgtggatgagcttcctaatgctaggcagactctaatgtacactgccacttggccaaaggaggttacaaaaatagctggggatttactgagagatcctgtccaggtgaacattggcagtatcgatgaacttgttgctaacaaatccatcactcagtatgtagaggtggttccacctatggacaagcagcggcgtctagagcagattcttggagatcaagaaaggggctcaaaaatcatcatattttgctcaactaagaaaatgtgcgatcagcttgctcgtggcattggtcgcaactttaatgctgtaagcattcatggtgataaatcacaggccgaaagagataatgttctcaatcagtttcgaactggcagggcttcagtattagtagccacagatgttgctgctcgtggacttgatatcaaagatattagagtggtaatcaattatgactttccaactgggatagaggactatgtgcatcgcatagggcgtacaggaagagctggcgctactggagtctcgtacacatttttctcagaacaagattggaaatatgcttgtgatttggtgaaactcttgcaaggtgccaaccagcttgtccctccgcagctgcaagacatggctgcacgcagtgcttctggaggtccaagaaaccaggcttctgggatgagtcgctgggatgggcctggtggtcgtggttttgaacctggtgttggtggccctgttggttatggtggtgttagggagggtcctggaggttttggtggtcgtgagggcccaggtggacttggtgttcgagaaagcccagccatgtttggtggccccggtggcttcggtgatcgggaaggccccggtggcttcagtggccatgagggccatggtggctttggtggccgggaacgggagggtcctggtggctttgttggcagaaagggcccaggtggttttggtggacgggatggccctgggtcaagtggtttcggtggtagaggacagcgtggatctggtggttttggcagtagaggtggagcaagccctgggggctttggtggacgtggtggcaggggcgattctcctggttttggtggacgcggcaggggtgatttttccggttttggtggacgaggtaggggagatttttctggtgggcgcggtggcaggggccgtggatttggtggcaggggacgttctgaccggtttgtctcagatggacggggacgatatgataaccgtcgaggatttggagacaagggtagggatcggagctacagccgcagcccggatagagtccgggcacggggttatgacagaagaagtgacagcaggagcattagtaggagcaggagtcgcagcaggagctggtcacgcagcagaagccgcagcaggagctggagccgaagcagcagccggagtcacagcaggagcaggagtcgtgaccatggggcagcaccggagcgcaggccccgagcaagatccggcttcgatgtgctgcctcctgcaactggagctgctggacctgcacctgttcccgtacctggaccagcagcaccgcctgttcctgctccggcacctgaacaatcactggctaatacatcttcaatgtcaccgatgtctcctggtggcctagtccagccagctgctgcacctgctggtggccaaccttcccaagggactggcgctgcattccccagttctcctgcaggcgaaacgtttccaggcgcagcagctcagcatcccgcgcctgatgtataatgagtcggacgacatccagtgccctaaatatgtaatccggtgtacaataggagaaatgagtttccgggtagtagtttatatggcaaaaaaatcggcttttccgcaattttctgatctcgtggtgaattgacgtatggatgttgtgtgtttttgtgctgaattcaagaaaaagttatgttgtgcaactatattttgttttgtgtgttttctcgttttacaattttgtgtttctttgaattctttt

SEQ ID NO: 23443 - DNA, 6388 bp, Zea Mays
gcgacacttccgtctcagtcctccccgtttcacccacgcgtgcgctctctcctcactctccctctccctctcgtcgacgattgggaaagcgccgccgccgccgcgccacaccacgccaggtggcgagttcttcgtagcgccgttcgccaggtctccgtagcgcccttagccgtccgcgagaaccctcaaaggcatttgcattatggttgcagcgtaggtggggagccattagaaggaggggcaacaagagttgctgggcatggcggctcaggaggccgcggcagctgattctttgggccctcggtttgctccggatgacccgacgctccctgcgccttggaaagggctgattgatggcgcgacgctgtactattggaatcctgagacgaatgtcacccagtatgagaagccggctgcaactgcaggtgtgccccctttgtcagcaggtcttccgccggcaacccctgcgcaggttccggaatctgcaccagtggcttttccgcagcttaacgtgcagtttggacaagctggccaggcagggcaccaggagcgtcctgaccaggcagcttatcctcaggctggccagcttggccagcagcacactcaacagccagctcagcagcaaccgtttcagcagcagcaaccgtttcagcagcatgtccaggcgcaacaccaagcttcgtttcagcatgtgccatatcagcaacagcaaacacacatgccaaatcagccacatcaataccacagcacgcatcctcaacacatgccgtaccagcatggtctttacatgcaacctcagcagcaacagcaggctccaccatattcatatcaggcagaccagcagccacagatgcgacaaactgcttataatcaagctcagcagccatcagtgcctcaagctgcctacaatcaaagtcagagtcagcagccaccaatgcctcaatcttcctacgatcaaggtcagagtcagcagccaccaatgccgcaaccttcctacaatcaaggtcaagttcagcagccaccgatgccacaaccttcttacaatcaaggtcagcaatccatgataccacagtctgcctacaatcaagctcagcagcctcaaattccacatggtgcttataatcaaagccagcaaccgctgggagataggattccccagggtcaagggcaacatcctcaacaatctttgagctctcatcatcctgcccaagcttcgcagtcgccgcaagtttcccaacctcaaggacctaaaatgccgactcaacaaggtcaactgcaacatggattgccgttcactcagcatggaaaaacgccattgtcacatgggcaacaaagtcctttgttgaaggatgatgatggaggagttcatgaaggcaagcggactggctttccgttaccacttagtcagcagcgtggccaagctcctcttccaaatcagcagctaccttctactcatcaacatcctggagcccttagtagccagccaaatatacctggagtcggtgggccattttatcctgccaggaatcttcctgatggaccatcctctgctgagactaataacatgggttttatgaactcacctgctcaaatgcatcaaggtggagcagatacaaactaccagaaaaaaccagttagtggccatacagttccaaatcatgttggtccatcaccaattcgacctccaatggggttcgatatgggtaatagtgttggacactttgaaagagatgaccctcactcttatggaaggtttgatggagcaaaggctctccagcagcagccaaagcttgctgctctcccaacttcacaaaattccatggtcatgcataatggaccgctttatcctcggccagacaattttggtggtcataacatggcacctccgcattcagtaccaaatccatataatcttggtccattgcctattggaacttcagtgaggccaccgtcaagtatgtttgctcctccagattttccaagcgtatcttcagctgatgcataccgtcaacaccatgaagtcactgccatgggtgagaacgttcctgctccgtttatgacatttgaggccactggattccctccagagattctgagagagaaattcttgacaatgtgggccgttgaaaatgatatctttgaaatggaaaattatcttctctcatagtgagtgcattgtatgcattgctcaatgatgtagcacaatggatttacggtgatgctgagtgccctaattcaacaataggttttcaatttctgggcactgtagtgaaatacttgtggctattttctgctgacaagtattgggaggattgatgttgtttcagattataaaatgaggctgaggcttcctgcttcttgtctctgccactgaatcaacaaagagcttcttcatgccttgagttgcttaaatccatgcagctggtttttcaaatcccactccaattcaagctcaaacatggcctgttgcgctgcaaaaccgggacatagtagctattgctaagacagggtctggaaagacgctggggtacctaatccctgcttttatacatctgaggagatgccacaataatccgatgctgggccctacagtattggttttggcccctactcgcgaacttgcttcacaaatacaagccgaagtagttaagtttggtcaatcatctagagtttcttgcacatgcctatatggtggaacttcaaaggtccctcagctaagagaacttgagcgtggagcagatattgtggtagcaacaccagggcgtcttaatgatatcctggagatgaagaggattaacctccatcaggtttcattacttgtgcttgatgaagcagaccgcatgcttgacatggggtttgaaccgcaaatacggaagattgtggatgagcttcctaatgctaggcagactctaatgtacactgccacttggccaaaggaggttacaaaaatagctggggatttactgagagatcctgtccaggtgaacattggcagtatcgatgaacttgttgctaacaaatccatcactcagtatgtagaggtggttccacctatggacaagcagcggcgtctagagcagattcttggagatcaagaaaggggctcaaaaatcatcatattttgctcaactaagaaaatgtgcgatcagcttgctcgtggcattggtcgcaactttaatgctgtaagcattcatggtgataaatcacaggccgaaagagataatgttctcaatcagtttcgaactggcagggcttcagtattagtagccacagatgttgctgctcgtggacttgatatcaaagatattagagtggtaatcaattatgactttccaactgggatagaggactatgtgcatcgcatagggcgtacaggaagagctggcgctactggagtctcgtacacatttttctcagaacaagattggaaatatgcttgtgatttggtgaaactcttgcaaggtgccaaccagcttgtccctccgcagctgcaagacatggctgcacgcagtgcttctggaggtccaagaaaccaggcttctgggatgagtcgctgggatgggcctggtggtcgtggttttgaacctggtgttggtggccctgttggttatggtggtgttagggagggtcctggaggttttggtggtcgtgagggcccaggtggacttggtgttcgagaaagcccagccatgtttggtggccccggtggcttcggtgatcgggaaggccccggtggcttcagtggccatgagggccatggtggctttggtggccgggaacgggagggtcctggtggctttgttggcagaaagggcccaggtggttttggtggacgggatggccctgggtcaagtggtttcggtggtagaggacagcgtggatctggtggttttggcagtagaggtggagcaagccctgggggctttggtggacgtggtggcaggggcgattctcctggttttggtggacgcggcaggggtgatttttccggttttggtggacgaggtaggggagatttttctggtgggcgcggtggcaggggccgtggatttggtggcaggggacgttctgaccggtttgtctcagatggacggggacgatatgataaccgtcgaggatttggagacaagggtagggatcggagctacagccgcagcccggatagagtccgggcacggggttatgacagaagaagtgacagcaggagcattagtaggagcaggagtcgcagcaggagctggtcacgcagcagaagccgcagcaggagctggagccgaagcagcagccggagtcacagcaggagcaggagtcgtgaccatggggcagcaccggagcgcaggccccgagcaagatccggcttcgatgtgctgcctcctgcaactggagctgctggacctgcacctgttcccgtacctggaccagcagcaccgcctgttcctgctccggcacctgaacaatcactggctaatacatcttcaatgtcaccgatgtctcctggtggcctagtccagccagctgctgcacctgctggtggccaaccttcccaagggactggcgctgcattccccagttctcctgcaggcgaaacgtttccaggcgcagcagctcagcatcccgcgcctgatgtataatgagtcggacgacatccagtgccctaaatatgtaatccggtgtacaataggagaaatgagtttccgggtagtagtttatatggcaaaaaaatcggcttttccgcaattttctgatctcgtggtgaattgacgtatggatgttgtgtgtttttgtgctgaattcaagaaaaagttatgttgtgcaactatattttgttttgtgtgttttctcgttttacaattttgtgtttctttgaattcttttgttgttgctatttttgcctacaattgcgcgacctgattttgcgtacaattgcgcgacctggtctgcattcttgtacttgtgttttgttgccagctaaatccagttgtttaacaggttttcagcgaaacacgtggtcgatacattttaaatttttctttcaaaatttgttgtttccgggtcaactgaattgtcgcttcgtgttgtcattgtttttttttaaaaaaaatcggctaaattctgttagttcgaccggtttttctggcatgtgaggtacatacaatttttttttttggagctgaaaagaatagttgaaaacatgagttcaaaggaacatacgataaaattttggcaaaatctaaaggattttatgcagcggtcgcgtcgctcgttctagtcacaatgtgctgccactaccgaccgatcagccctgaagcactcgccgccgacaggaggtaccatccgcttcgactacttaggccgaggaataaacagtgctgcagggtgtgaacattaacacgctatatctagagggagagagaagagaaccgacgtgtagagccctgcggggtgcagcgctgcgggcgtagggtgcccccctgcaggcgtcatgcaatgggagagggctgcaccgctgcagccagccttattctttctcccatctctctgtctttgtctttctactgggtttactttggtgttccccgattacaggggtttatggtttattgctgcaggtgggttcttgagaaggatccgaagcctactggggtttaaattgtgcgtatcaccccagtggggtttcattcctgagcgtgttcctccttttccaatacttatgtgtgtatataacttacagaattttgtcgttgaaggatggagacacttatagatttgcactagtgttaagtaaaataaagggaggaagttgggagatcagtcatatgaatgtttttttttatttctacggtgctatatgtttgcactatttcaagggacactagaaataaaaagcattcatatgactgacccacctaataaaaaaacaacttacctaataaaaaaagcaactcactattacccgttgcatcggcaattgttgggctatttggttaagtaggaatggtgtggtttttaataaaccgtctcctaaattatgtctgcacaggtcactttcagggcaacttattggtgctacttctggacacagcttcagcctagaagggaggaccctagacacagcttcagcctagaagggaggatcaagaattaatagtctttatgtcgtaatgtgcagatggtgctaccacagttttttcccgcaatttcggatgggggtcttcgttgtgtttagctttgtagtagcttggatttagtagttggtgttctttggtgaggtcgtgtgataggtcaatacattatgctgcctttagttgtaataattggccataacctcgtttgaggtcaaggtcgaactatatttccattatctaaaaataaggggtccgattttgtc

SEQ ID NO: 23444 - DNA, 4554 bp, Zea Mays
cgacacttccgtctcagtcctccccgtttcacccacgcgtgcgctctctcctcactctccctctccctctcgtcgacgattgggaaagcgccgccgccgccgcgccacaccacgccaggtggcgagttcttcgtagcgccgttcgccaggtctccgtagcgcccttagccgtccgcgagaaccctcaaaggcatttgcattatggttgcagcgtaggtggggagccattagaaggaggggcaacaagagttgctgggcatggcggctcaggaggccgcggcagctgattctttgggccctcggtttgctccggatgacccgacgctccctgcgccttggaaagggctgattgatggcgcgacgctgtactattggaatcctgagacgaatgtcacccagtatgagaagccggctgcaactgcaggtgtgccccctttgtcagcaggtcttccgccggcaacccctgcgcaggttccggaatctgcaccagtggcttttccgcagcttaacgtgcagtttggacaagctggccaggcagggcaccaggagcgtcctgaccaggcagcttatcctcaggctggccagcttggccagcagcacactcaacagccagctcagcagcaaccgtttcagcagcagcaaccgtttcagcagcatgtccaggcgcaacaccaagcttcgtttcagcatgtgccatatcagcaacagcaaacacacatgccaaatcagccacatcaataccacagcacgcatcctcaacacatgccgtaccagcatggtctttacatgcaacctcagcagcaacagcaggctccaccatattcatatcaggcagaccagcagccacagatgcgacaaactgcttataatcaagctcagcagccatcagtgcctcaagctgcctacaatcaaagtcagagtcagcagccaccaatgcctcaatcttcctacgatcaaggtcagagtcagcagccaccaatgccgcaaccttcctacaatcaaggtcaagttcagcagccaccgatgccacaaccttcttacaatcaaggtcagcaatccatgataccacagtctgcctacaatcaagctcagcagcctcaaattccacatggtgcttataatcaaagccagcaaccgctgggagataggattccccagggtcaagggcaacatcctcaacaatctttgagctctcatcatcctgcccaagcttcgcagtcgccgcaagtttcccaacctcaaggacctaaaatgccgactcaacaaggtcaactgcaacatggattgccgttcactcagcatggaaaaacgccattgtcacatgggcaacaaagtcctttgttgaaggatgatgatggaggagttcatgaaggcaagcggactggctttccgttaccacttagtcagcagcgtggccaagctcctcttccaaatcagcagctaccttctactcatcaacatcctggagcccttagtagccagccaaatatacctggagtcggtgggccattttatcctgccaggaatcttcctgatggaccatcctctgctgagactaataacatgggttttatgaactcacctgctcaaatgcatcaaggtggagcagatacaaactaccagaaaaaaccagttagtggccatacagttccaaatcatgttggtccatcaccaattcgacctccaatggggttcgatatgggtaatagtgttggacactttgaaagagatgaccctcactcttatggaaggtttgatggagcaaaggctctccagcagcagccaaagcttgctgctctcccaacttcacaaaattccatggtcatgcataatggaccgctttatcctcggccagacaattttggtggtcataacatggcacctccgcattcagtaccaaatccatataatcttggtccattgcctattggaacttcagtgaggccaccgtcaagtatgtttgctcctccagattttccaagcgtatcttcagctgatgcataccgtcaacaccatgaagtcactgccatgggtgagaacgttcctgctccgtttatgacatttgaggccactggattccctccagagattctgagagagctggtttttcaaatcccactccaattcaagctcaaacatggcctgttgcgctgcaaaaccgggacatagtagctattgctaagacagggtctggaaagacgctggggtacctaatccctgcttttatacatctgaggagatgccacaataatccgatgctgggccctacagtattggttttggcccctactcgcgaacttgcttcacaaatacaagccgaagtagttaagtttggtcaatcatctagagtttcttgcacatgcctatatggtggaacttcaaaggtccctcagctaagagaacttgagcgtggagcagatattgtggtagcaacaccagggcgtcttaatgatatcctggagatgaagaggattaacctccatcaggtttcattacttgtgcttgatgaagcagaccgcatgcttgacatggggtttgaaccgcaaatacggaagattgtggatgagcttcctaatgctaggcagactctaatgtacactgccacttggccaaaggaggttacaaaaatagctggggatttactgagagatcctgtccaggtgaacattggcagtatcgatgaacttgttgctaacaaatccatcactcagtatgtagaggtggttccacctatggacaagcagcggcgtctagagcagattcttggagatcaagaaaggggctcaaaaatcatcatattttgctcaactaagaaaatgtgcgatcagcttgctcgtggcattggtcgcaactttaatgctgtaagcattcatggtgataaatcacaggccgaaagagataatgttctcaatcagtttcgaactggcagggcttcagtattagtagccacagatgttgctgctcgtggacttgatatcaaagatattagagtggtaatcaattatgactttccaactgggatagaggactatgtgcatcgcatagggcgtacaggaagagctggcgctactggagtctcgtacacatttttctcagaacaagattggaaatatgcttgtgatttggtgaaactcttgcaaggtgccaaccagcttgtccctccgcagctgcaagacatggctgcacgcagtgcttctggaggtccaagaaaccaggcttctgggatgagtcgctgggatgggcctggtggtcgtggttttgaacctggtgttggtggccctgttggttatggtggtgttagggagggtcctggaggttttggtggtcgtgagggcccaggtggacttggtgttcgagaaagcccagccatgtttggtggccccggtggcttcggtgatcgggaaggccccggtggcttcagtggccatgagggccatggtggctttggtggccgggaacgggagggtcctggtggctttgttggcagaaagggcccaggtggttttggtggacgggatggccctgggtcaagtggtttcggtggtagaggacagcgtggatctggtggttttggcagtagaggtggagcaagccctgggggctttggtggacgtggtggcaggggcgattctcctggttttggtggacgcggcaggggtgatttttccggttttggtggacgaggtaggggagatttttctggtgggcgcggtggcaggggccgtggatttggtggcaggggacgttctgaccggtttgtctcagatggacggggacgatatgataaccgtcgaggatttggagacaagggtagggatcggagctacagccgcagcccggatagagtccgggcacggggttatgacagaagaagtgacagcaggagcattagtaggagcaggagtcgcagcaggagctggtcacgcagcagaagccgcagcaggagctggagccgaagcagcagccggagtcacagcaggagcaggagtcgtgaccatggggcagcaccggagcgcaggccccgagcaagatccggcttcgatgtgctgcctcctgcaactggagctgctggacctgcacctgttcccgtacctggaccagcagcaccgcctgttcctgctccggcacctgaacaatcactggctaatacatcttcaatgtcaccgatgtctcctggtggcctagtccagccagctgctgcacctgctggtggccaaccttcccaagggactggcgctgcattccccagttctcctgcaggcgaaacgtttccaggcgcagcagctcagcatcccgcgcctgatgtataatgagtcggacgacatccagtgccctaaatatgtaatccggtgtacaataggagaaatgagtttccgggtagtagtttatatggcaaaaaaatcggcttttccgcaattttctgatctcgtggtgaattgacgtatggatgttgtgtgtttttgtgctgaattcaagaaaaagttatgttgtgcaactatattttgttttgtgtgttttctcgttttacaattttgtgtttctttgaattctttt

SEQ ID NO: 23445 - DNA, 4814 bp, Zea Mays
cacttccgtctcagtcctccccgtttcacccacgcgtgcgctctctcctcactctccctctccctctcgtcgacgattgggaaagcgccgccgccgccgcgccacaccacgccaggtggcgagttcttcgtagcgccgttcgccaggtctccgtagcgcccttagccgtccgcgagaaccctcaaaggcatttgcattatggttgcagcgtaggtggggagccattagaaggaggggcaacaagagttgctgggcatggcggctcaggaggccgcggcagctgattctttgggccctcggtttgctccggatgacccgacgctccctgcgccttggaaagggctgattgatggcgcgacgctgtactattggaatcctgagacgaatgtcacccagtatgagaagccggctgcaactgcaggtgtgccccctttgtcagcaggtcttccgccggcaacccctgcgcaggttccggaatctgcaccagtggcttttccgcagcttaacgtgcagtttggacaagctggccaggcagggcaccaggagcgtcctgaccaggcagcttatcctcaggctggccagcttggccagcagcacactcaacagccagctcagcagcaaccgtttcagcagcagcaaccgtttcagcagcatgtccaggcgcaacaccaagcttcgtttcagcatgtgccatatcagcaacagcaaacacacatgccaaatcagccacatcaataccacagcacgcatcctcaacacatgccgtaccagcatggtctttacatgcaacctcagcagcaacagcaggctccaccatattcatatcaggcagaccagcagccacagatgcgacaaactgcttataatcaagctcagcagccatcagtgcctcaagctgcctacaatcaaagtcagagtcagcagccaccaatgcctcaatcttcctacgatcaaggtcagagtcagcagccaccaatgccgcaaccttcctacaatcaaggtcaagttcagcagccaccgatgccacaaccttcttacaatcaaggtcagcaatccatgataccacagtctgcctacaatcaagctcagcagcctcaaattccacatggtgcttataatcaaagccagcaaccgctgggagataggattccccagggtcaagggcaacatcctcaacaatctttgagctctcatcatcctgcccaagcttcgcagtcgccgcaagtttcccaacctcaaggacctaaaatgccgactcaacaaggtcaactgcaacatggattgccgttcactcagcatggaaaaacgccattgtcacatgggcaacaaagtcctttgttgaaggatgatgatggaggagttcatgaaggcaagcggactggctttccgttaccacttagtcagcagcgtggccaagctcctcttccaaatcagcagctaccttctactcatcaacatcctggagcccttagtagccagccaaatatacctggagtcggtgggccattttatcctgccaggaatcttcctgatggaccatcctctgctgagactaataacatgggttttatgaactcacctgctcaaatgcatcaaggtggagcagatacaaactaccagaaaaaaccagttagtggccatacagttccaaatcatgttggtccatcaccaattcgacctccaatggggttcgatatgggtaatagtgttggacactttgaaagagatgaccctcactcttatggaaggtttgatggagcaaaggctctccagcagcagccaaagcttgctgctctcccaacttcacaaaattccatggtcatgcataatggaccgctttatcctcggccagacaattttggtggtcataacatggcacctccgcattcagtaccaaatccatataatcttggtccattgcctattggaacttcagtgaggccaccgtcaagtatgtttgctcctccagattttccaagcgtatcttcagctgatgcataccgtcaacaccatgaagtcactgccatgggtgagaacgttcctgctccgtttatgacatttgaggccactggattccctccagagattctgagagagcacaatggatttacggtgatgctgagtgccctaattcaacaataggttttcaatttctgggcactgtagtgaaatacttgtggctattttctgctgacaagtattgggaggattgatgttgtttcagattataaaatgaggctgaggcttcctgcttcttgtctctgccactgaatcaacaaagagcttcttcatgccttgagttgcttaagtgggcatgcccttatgatgcttattcgttttttcatttaagatccatgcagctggtttttcaaatcccactccaattcaagctcaaacatggcctgttgcgctgcaaaaccgggacatagtagctattgctaagacagggtctggaaagacgctggggtacctaatccctgcttttatacatctgaggagatgccacaataatccgatgctgggccctacagtattggttttggcccctactcgcgaacttgcttcacaaatacaagccgaagtagttaagtttggtcaatcatctagagtttcttgcacatgcctatatggtggaacttcaaaggtccctcagctaagagaacttgagcgtggagcagatattgtggtagcaacaccagggcgtcttaatgatatcctggagatgaagaggattaacctccatcaggtttcattacttgtgcttgatgaagcagaccgcatgcttgacatggggtttgaaccgcaaatacggaagattgtggatgagcttcctaatgctaggcagactctaatgtacactgccacttggccaaaggaggttacaaaaatagctggggatttactgagagatcctgtccaggtgaacattggcagtatcgatgaacttgttgctaacaaatccatcactcagtatgtagaggtggttccacctatggacaagcagcggcgtctagagcagattcttggagatcaagaaaggggctcaaaaatcatcatattttgctcaactaagaaaatgtgcgatcagcttgctcgtggcattggtcgcaactttaatgctgtaagcattcatggtgataaatcacaggccgaaagagataatgttctcaatcagtttcgaactggcagggcttcagtattagtagccacagatgttgctgctcgtggacttgatatcaaagatattagagtggtaatcaattatgactttccaactgggatagaggactatgtgcatcgcatagggcgtacaggaagagctggcgctactggagtctcgtacacatttttctcagaacaagattggaaatatgcttgtgatttggtgaaactcttgcaaggtgccaaccagcttgtccctccgcagctgcaagacatggctgcacgcagtgcttctggaggtccaagaaaccaggcttctgggatgagtcgctgggatgggcctggtggtcgtggttttgaacctggtgttggtggccctgttggttatggtggtgttagggagggtcctggaggttttggtggtcgtgagggcccaggtggacttggtgttcgagaaagcccagccatgtttggtggccccggtggcttcggtgatcgggaaggccccggtggcttcagtggccatgagggccatggtggctttggtggccgggaacgggagggtcctggtggctttgttggcagaaagggcccaggtggttttggtggacgggatggccctgggtcaagtggtttcggtggtagaggacagcgtggatctggtggttttggcagtagaggtggagcaagccctgggggctttggtggacgtggtggcaggggcgattctcctggttttggtggacgcggcaggggtgatttttccggttttggtggacgaggtaggggagatttttctggtgggcgcggtggcaggggccgtggatttggtggcaggggacgttctgaccggtttgtctcagatggacggggacgatatgataaccgtcgaggatttggagacaagggtagggatcggagctacagccgcagcccggatagagtccgggcacggggttatgacagaagaagtgacagcaggagcattagtaggagcaggagtcgcagcaggagctggtcacgcagcagaagccgcagcaggagctggagccgaagcagcagccggagtcacagcaggagcaggagtcgtgaccatggggcagcaccggagcgcaggccccgagcaagatccggcttcgatgtgctgcctcctgcaactggagctgctggacctgcacctgttcccgtacctggaccagcagcaccgcctgttcctgctccggcacctgaacaatcactggctaatacatcttcaatgtcaccgatgtctcctggtggcctagtccagccagctgctgcacctgctggtggccaaccttcccaagggactggcgctgcattccccagttctcctgcaggcgaaacgtttccaggcgcagcagctcagcatcccgcgcctgatgtataatgagtcggacgacatccagtgccctaaatatgtaatccggtgtacaataggagaaatgagtttccgggtagtagtttatatggcaaaaaaatcggcttttccgcaattttctgatctcgtggtgaattgacgtatggatgttgtgtgtttttgtgctgaattcaagaaaaagttatgttgtgcaactatattttgttttgtgtgttttctcgttttacaattttgtgtttctttgaattctttt

SEQ ID NO: 23446 - DNA, 4727 bp, Zea Mays
cacttccgtctcagtcctccccgtttcacccacgcgtgcgctctctcctcactctccctctccctctcgtcgacgattgggaaagcgccgccgccgccgcgccacaccacgccaggtggcgagttcttcgtagcgccgttcgccaggtctccgtagcgcccttagccgtccgcgagaaccctcaaaggcatttgcattatggttgcagcgtaggtggggagccattagaaggaggggcaacaagagttgctgggcatggcggctcaggaggccgcggcagctgattctttgggccctcggtttgctccggatgacccgacgctccctgcgccttggaaagggctgattgatggcgcgacgctgtactattggaatcctgagacgaatgtcacccagtatgagaagccggctgcaactgcaggtgtgccccctttgtcagcaggtcttccgccggcaacccctgcgcaggttccggaatctgcaccagtggcttttccgcagcttaacgtgcagtttggacaagctggccaggcagggcaccaggagcgtcctgaccaggcagcttatcctcaggctggccagcttggccagcagcacactcaacagccagctcagcagcaaccgtttcagcagcagcaaccgtttcagcagcatgtccaggcgcaacaccaagcttcgtttcagcatgtgccatatcagcaacagcaaacacacatgccaaatcagccacatcaataccacagcacgcatcctcaacacatgccgtaccagcatggtctttacatgcaacctcagcagcaacagcaggctccaccatattcatatcaggcagaccagcagccacagatgcgacaaactgcttataatcaagctcagcagccatcagtgcctcaagctgcctacaatcaaagtcagagtcagcagccaccaatgcctcaatcttcctacgatcaaggtcagagtcagcagccaccaatgccgcaaccttcctacaatcaaggtcaagttcagcagccaccgatgccacaaccttcttacaatcaaggtcagcaatccatgataccacagtctgcctacaatcaagctcagcagcctcaaattccacatggtgcttataatcaaagccagcaaccgctgggagataggattccccagggtcaagggcaacatcctcaacaatctttgagctctcatcatcctgcccaagcttcgcagtcgccgcaagtttcccaacctcaaggacctaaaatgccgactcaacaaggtcaactgcaacatggattgccgttcactcagcatggaaaaacgccattgtcacatgggcaacaaagtcctttgttgaaggatgatgatggaggagttcatgaaggcaagcggactggctttccgttaccacttagtcagcagcgtggccaagctcctcttccaaatcagcagctaccttctactcatcaacatcctggagcccttagtagccagccaaatatacctggagtcggtgggccattttatcctgccaggaatcttcctgatggaccatcctctgctgagactaataacatgggttttatgaactcacctgctcaaatgcatcaaggtggagcagatacaaactaccagaaaaaaccagttagtggccatacagttccaaatcatgttggtccatcaccaattcgacctccaatggggttcgatatgggtaatagtgttggacactttgaaagagatgaccctcactcttatggaaggtttgatggagcaaaggctctccagcagcagccaaagcttgctgctctcccaacttcacaaaattccatggtcatgcataatggaccgctttatcctcggccagacaattttggtggtcataacatggcacctccgcattcagtaccaaatccatataatcttggtccattgcctattggaacttcagtgaggccaccgtcaagtatgtttgctcctccagattttccaagcgtatcttcagctgatgcataccgtcaacaccatgaagtcactgccatgggtgagaacgttcctgctccgtttatgacatttgaggccactggattccctccagagattctgagagaggttttcaatttctgggcactgtagtgaaatacttgtggctattttctgctgacaagtattgggaggattgatgttgtttcagattataaaatgaggctgaggcttcctgcttcttgtctctgccactgaatcaacaaagagcttcttcatgccttgagttgcttaaatccatgcagctggtttttcaaatcccactccaattcaagctcaaacatggcctgttgcgctgcaaaaccgggacatagtagctattgctaagacagggtctggaaagacgctggggtacctaatccctgcttttatacatctgaggagatgccacaataatccgatgctgggccctacagtattggttttggcccctactcgcgaacttgcttcacaaatacaagccgaagtagttaagtttggtcaatcatctagagtttcttgcacatgcctatatggtggaacttcaaaggtccctcagctaagagaacttgagcgtggagcagatattgtggtagcaacaccagggcgtcttaatgatatcctggagatgaagaggattaacctccatcaggtttcattacttgtgcttgatgaagcagaccgcatgcttgacatggggtttgaaccgcaaatacggaagattgtggatgagcttcctaatgctaggcagactctaatgtacactgccacttggccaaaggaggttacaaaaatagctggggatttactgagagatcctgtccaggtgaacattggcagtatcgatgaacttgttgctaacaaatccatcactcagtatgtagaggtggttccacctatggacaagcagcggcgtctagagcagattcttggagatcaagaaaggggctcaaaaatcatcatattttgctcaactaagaaaatgtgcgatcagcttgctcgtggcattggtcgcaactttaatgctgtaagcattcatggtgataaatcacaggccgaaagagataatgttctcaatcagtttcgaactggcagggcttcagtattagtagccacagatgttgctgctcgtggacttgatatcaaagatattagagtggtaatcaattatgactttccaactgggatagaggactatgtgcatcgcatagggcgtacaggaagagctggcgctactggagtctcgtacacatttttctcagaacaagattggaaatatgcttgtgatttggtgaaactcttgcaaggtgccaaccagcttgtccctccgcagctgcaagacatggctgcacgcagtgcttctggaggtccaagaaaccaggcttctgggatgagtcgctgggatgggcctggtggtcgtggttttgaacctggtgttggtggccctgttggttatggtggtgttagggagggtcctggaggttttggtggtcgtgagggcccaggtggacttggtgttcgagaaagcccagccatgtttggtggccccggtggcttcggtgatcgggaaggccccggtggcttcagtggccatgagggccatggtggctttggtggccgggaacgggagggtcctggtggctttgttggcagaaagggcccaggtggttttggtggacgggatggccctgggtcaagtggtttcggtggtagaggacagcgtggatctggtggttttggcagtagaggtggagcaagccctgggggctttggtggacgtggtggcaggggcgattctcctggttttggtggacgcggcaggggtgatttttccggttttggtggacgaggtaggggagatttttctggtgggcgcggtggcaggggccgtggatttggtggcaggggacgttctgaccggtttgtctcagatggacggggacgatatgataaccgtcgaggatttggagacaagggtagggatcggagctacagccgcagcccggatagagtccgggcacggggttatgacagaagaagtgacagcaggagcattagtaggagcaggagtcgcagcaggagctggtcacgcagcagaagccgcagcaggagctggagccgaagcagcagccggagtcacagcaggagcaggagtcgtgaccatggggcagcaccggagcgcaggccccgagcaagatccggcttcgatgtgctgcctcctgcaactggagctgctggacctgcacctgttcccgtacctggaccagcagcaccgcctgttcctgctccggcacctgaacaatcactggctaatacatcttcaatgtcaccgatgtctcctggtggcctagtccagccagctgctgcacctgctggtggccaaccttcccaagggactggcgctgcattccccagttctcctgcaggcgaaacgtttccaggcgcagcagctcagcatcccgcgcctgatgtataatgagtcggacgacatccagtgccctaaatatgtaatccggtgtacaataggagaaatgagtttccgggtagtagtttatatggcaaaaaaatcggcttttccgcaattttctgatctcgtggtgaattgacgtatggatgttgtgtgtttttgtgctgaattcaagaaaaagttatgttgtgcaactatattttgttttgtgtgttttctcgttttacaattttgtgtttctttgaattctttt

SEQ ID NO: 23447 - DNA, 4671 bp, Zea Mays
cacttccgtctcagtcctccccgtttcacccacgcgtgcgctctctcctcactctccctctccctctcgtcgacgattgggaaagcgccgccgccgccgcgccacaccacgccaggtggcgagttcttcgtagcgccgttcgccaggtctccgtagcgcccttagccgtccgcgagaaccctcaaaggcatttgcattatggttgcagcgtaggtggggagccattagaaggaggggcaacaagagttgctgggcatggcggctcaggaggccgcggcagctgattctttgggccctcggtttgctccggatgacccgacgctccctgcgccttggaaagggctgattgatggcgcgacgctgtactattggaatcctgagacgaatgtcacccagtatgagaagccggctgcaactgcaggtgtgccccctttgtcagcaggtcttccgccggcaacccctgcgcaggttccggaatctgcaccagtggcttttccgcagcttaacgtgcagtttggacaagctggccaggcagggcaccaggagcgtcctgaccaggcagcttatcctcaggctggccagcttggccagcagcacactcaacagccagctcagcagcaaccgtttcagcagcagcaaccgtttcagcagcatgtccaggcgcaacaccaagcttcgtttcagcatgtgccatatcagcaacagcaaacacacatgccaaatcagccacatcaataccacagcacgcatcctcaacacatgccgtaccagcatggtctttacatgcaacctcagcagcaacagcaggctccaccatattcatatcaggcagaccagcagccacagatgcgacaaactgcttataatcaagctcagcagccatcagtgcctcaagctgcctacaatcaaagtcagagtcagcagccaccaatgcctcaatcttcctacgatcaaggtcagagtcagcagccaccaatgccgcaaccttcctacaatcaaggtcaagttcagcagccaccgatgccacaaccttcttacaatcaaggtcagcaatccatgataccacagtctgcctacaatcaagctcagcagcctcaaattccacatggtgcttataatcaaagccagcaaccgctgggagataggattccccagggtcaagggcaacatcctcaacaatctttgagctctcatcatcctgcccaagcttcgcagtcgccgcaagtttcccaacctcaaggacctaaaatgccgactcaacaaggtcaactgcaacatggattgccgttcactcagcatggaaaaacgccattgtcacatgggcaacaaagtcctttgttgaaggatgatgatggaggagttcatgaaggcaagcggactggctttccgttaccacttagtcagcagcgtggccaagctcctcttccaaatcagcagctaccttctactcatcaacatcctggagcccttagtagccagccaaatatacctggagtcggtgggccattttatcctgccaggaatcttcctgatggaccatcctctgctgagactaataacatgggttttatgaactcacctgctcaaatgcatcaaggtggagcagatacaaactaccagaaaaaaccagttagtggccatacagttccaaatcatgttggtccatcaccaattcgacctccaatggggttcgatatgggtaatagtgttggacactttgaaagagatgaccctcactcttatggaaggtttgatggagcaaaggctctccagcagcagccaaagcttgctgctctcccaacttcacaaaattccatggtcatgcataatggaccgctttatcctcggccagacaattttggtggtcataacatggcacctccgcattcagtaccaaatccatataatcttggtccattgcctattggaacttcagtgaggccaccgtcaagtatgtttgctcctccagattttccaagcgtatcttcagctgatgcataccgtcaacaccatgaagtcactgccatgggtgagaacgttcctgctccgtttatgacatttgaggccactggattccctccagagattctgagagagtattgggaggattgatgttgtttcagattataaaatgaggctgaggcttcctgcttcttgtctctgccactgaatcaacaaagagcttcttcatgccttgagttgcttaaatccatgcagctggtttttcaaatcccactccaattcaagctcaaacatggcctgttgcgctgcaaaaccgggacatagtagctattgctaagacagggtctggaaagacgctggggtacctaatccctgcttttatacatctgaggagatgccacaataatccgatgctgggccctacagtattggttttggcccctactcgcgaacttgcttcacaaatacaagccgaagtagttaagtttggtcaatcatctagagtttcttgcacatgcctatatggtggaacttcaaaggtccctcagctaagagaacttgagcgtggagcagatattgtggtagcaacaccagggcgtcttaatgatatcctggagatgaagaggattaacctccatcaggtttcattacttgtgcttgatgaagcagaccgcatgcttgacatggggtttgaaccgcaaatacggaagattgtggatgagcttcctaatgctaggcagactctaatgtacactgccacttggccaaaggaggttacaaaaatagctggggatttactgagagatcctgtccaggtgaacattggcagtatcgatgaacttgttgctaacaaatccatcactcagtatgtagaggtggttccacctatggacaagcagcggcgtctagagcagattcttggagatcaagaaaggggctcaaaaatcatcatattttgctcaactaagaaaatgtgcgatcagcttgctcgtggcattggtcgcaactttaatgctgtaagcattcatggtgataaatcacaggccgaaagagataatgttctcaatcagtttcgaactggcagggcttcagtattagtagccacagatgttgctgctcgtggacttgatatcaaagatattagagtggtaatcaattatgactttccaactgggatagaggactatgtgcatcgcatagggcgtacaggaagagctggcgctactggagtctcgtacacatttttctcagaacaagattggaaatatgcttgtgatttggtgaaactcttgcaaggtgccaaccagcttgtccctccgcagctgcaagacatggctgcacgcagtgcttctggaggtccaagaaaccaggcttctgggatgagtcgctgggatgggcctggtggtcgtggttttgaacctggtgttggtggccctgttggttatggtggtgttagggagggtcctggaggttttggtggtcgtgagggcccaggtggacttggtgttcgagaaagcccagccatgtttggtggccccggtggcttcggtgatcgggaaggccccggtggcttcagtggccatgagggccatggtggctttggtggccgggaacgggagggtcctggtggctttgttggcagaaagggcccaggtggttttggtggacgggatggccctgggtcaagtggtttcggtggtagaggacagcgtggatctggtggttttggcagtagaggtggagcaagccctgggggctttggtggacgtggtggcaggggcgattctcctggttttggtggacgcggcaggggtgatttttccggttttggtggacgaggtaggggagatttttctggtgggcgcggtggcaggggccgtggatttggtggcaggggacgttctgaccggtttgtctcagatggacggggacgatatgataaccgtcgaggatttggagacaagggtagggatcggagctacagccgcagcccggatagagtccgggcacggggttatgacagaagaagtgacagcaggagcattagtaggagcaggagtcgcagcaggagctggtcacgcagcagaagccgcagcaggagctggagccgaagcagcagccggagtcacagcaggagcaggagtcgtgaccatggggcagcaccggagcgcaggccccgagcaagatccggcttcgatgtgctgcctcctgcaactggagctgctggacctgcacctgttcccgtacctggaccagcagcaccgcctgttcctgctccggcacctgaacaatcactggctaatacatcttcaatgtcaccgatgtctcctggtggcctagtccagccagctgctgcacctgctggtggccaaccttcccaagggactggcgctgcattccccagttctcctgcaggcgaaacgtttccaggcgcagcagctcagcatcccgcgcctgatgtataatgagtcggacgacatccagtgccctaaatatgtaatccggtgtacaataggagaaatgagtttccgggtagtagtttatatggcaaaaaaatcggcttttccgcaattttctgatctcgtggtgaattgacgtatggatgttgtgtgtttttgtgctgaattcaagaaaaagttatgttgtgcaactatattttgttttgtgtgttttctcgttttacaattttgtgtttctttgaattctttt

SEQ ID NO: 23448 - DNA, 4260 bp, Zea Mays
cacttccgtctcagtcctccccgtttcacccacgcgtgcgctctctcctcactctccctctccctctcgtcgacgattgggaaagcgccgccgccgccgcgccacaccacgccaggtggcgagttcttcgtagcgccgttcgccaggtctccgtagcgcccttagccgtccgcgagaaccctcaaaggcatttgcattatggttgcagcgtaggtggggagccattagaaggaggggcaacaagagttgctgggcatggcggctcaggaggccgcggcagctgattctttgggccctcggtttgctccggatgacccgacgctccctgcgccttggaaagggctgattgatggcgcgacgctgtactattggaatcctgagacgaatgtcacccagtatgagaagccggctgcaactgcaggtgtgccccctttgtcagcaggtcttccgccggcaacccctgcgcaggttccggaatctgcaccagtggcttttccgcagcttaacgtgcagtttggacaagctggccaggcagggcaccaggagcgtcctgaccaggcagcttatcctcaggctggccagcttggccagcagcacactcaacagccagctcagcagcaaccgtttcagcagcagcaaccgtttcagcagcatgtccaggcgcaacaccaagcttcgtttcagcatgtgccatatcagcaacagcaaacacacatgccaaatcagccacatcaataccacagcacgcatcctcaacacatgccgtaccagcatggtctttacatgcaacctcagcagcaacagcaggctccaccatattcatatcaggcagaccagcagccacagatgcgacaaactgcttataatcaagctcagcagccatcagtgcctcaagctgcctacaatcaaagtcagagtcagcagccaccaatgcctcaatcttcctacgatcaaggtcagagtcagcagccaccaatgccgcaaccttcctacaatcaaggtcaagttcagcagccaccgatgccacaaccttcttacaatcaaggtcagcaatccatgataccacagtctgcctacaatcaagctcagcagcctcaaattccacatggtgcttataatcaaagccagcaaccgctgggagataggattccccagggtcaagggcaacatcctcaacaatctttgagctctcatcatcctgcccaagcttcgcagtcgccgcaagtttcccaacctcaaggacctaaaatgccgactcaacaaggtcaactgcaacatggattgccgttcactcagcatggaaaaacgccattgtcacatgggcaacaaagtcctttgttgaaggatgatgatggaggagttcatgaaggcaagcggactggctttccgttaccacttagtcagcagcgtggccaagctcctcttccaaatcagcagctaccttctactcatcaacatcctggagcccttagtagccagccaaatatacctggagtcggtgggccattttatcctgccaggaatcttcctgatggaccatcctctgctgagactaataacatgggttttatgaactcacctgctcaaatgcatcaaggtggagcagatacaaactaccagaaaaaaccagttagtggccatacagttccaaatcatgttggtccatcaccaattcgacctccaatggggttcgatatgggtaatagtgttggacactttgaaagagatgaccctcactcttatggaaggtttgatggagcaaaggctctccagcagcagccaaagcttgctgctctcccaacttcacaaaattccatggtcatgcataatggaccgctttatcctcggccagacaattttggtggtcataacatggcacctccgcattcagtaccaaatccatataatcttggtccattgcctattggaacttcagtgaggccaccgtcaagtatgtttgctcctccagattttccaagcgtatcttcagctgatgcataccgtcaacaccatgaagtcactgccatgggtgagaacgttcctgctccgtttatgacatttgaggccactggattccctccagagattctgagagagattataaaatgaggctgaggcttcctgcttcttgtctctgccactgaatcaacaaagagcttcttcatgccttgagttgcttaaatccatgcagctggtttttcaaatcccactccaattcaagctcaaacatggcctgttgcgctgcaaaaccgggacatagtagctattgctaagacagggtctggaaagacgctggggtacctaatccctgcttttatacatctgaggagatgccacaataatccgatgctgggccctacagtattggttttggcccctactcgcgaacttgcttcacaaatacaagccgaagtagttaagtttggtcaatcatctagagtttcttgcacatgcctatatggtggaacttcaaaggtccctcagctaagagaacttgagcgtggagcagatattgtggtagcaacaccagggcgtcttaatgatatcctggagatgaagaggattaacctccatcaggtttcattacttgtgcttgatgaagcagaccgcatgcttgacatggggtttgaaccgcaaatacggaagattgtggatgagcttcctaatgctaggcagactctaatgtacactgccacttggccaaaggaggttacaaaaatagctggggatttactgagagatcctgtccaggtgaacattggcagtatcgatgaacttgttgctaacaaatccatcactcagtatgtagaggtggttccacctatggacaagcagcggcgtctagagcagattcttggagatcaagaaaggggctcaaaaatcatcatattttgctcaactaagaaaatgtgcgatcagcttgctcgtggcattggtcgcaactttaatgctgtaagcattcatggtgataaatcacaggccgaaagagataatgttctcaatcagtttcgaactggcagggcttcagtattagtagccacagatgttgctgctcgtggacttgatatcaaagatattagagtggtaatcaattatgactttccaactgggatagaggactatgtgcatcgcatagggcgtacaggaagagctggcgctactggagtctcgtacacatttttctcagaacaagattggaaatatgcttgtgatttggtgaaactcttgcaaggtgccaaccagcttgtccctccgcagctgcaagacatggctgcacgcagtgcttctggaggtccaagaaaccaggcttctgggatgagtcgctgggatgggcctggtggtcgtggttttgaacctggtgttggtggccctgttggttatggtggtgttagggagggtcctggaggttttggtggtcgtgagggcccaggtggacttggtgttcgagaaagcccagccatgtttggtggccccggtggcttcggtgatcgggaaggccccggtggcttcagtggccatgagggccatggtggctttggtggccgggaacgggagggtcctggtggctttgttggcagaaagggcccaggtggttttggtggacgggatggccctgggtcaactggtcacgcagcagaagccgcagcaggagctggagccgaagcagcagccggagtcacagcaggagcaggagtcgtgaccatggggcagcaccggagcgcaggccccgagcaagatccggcttcgatgtgctgcctcctgcaactggagctgctggacctgcacctgttcccgtacctggaccagcagcaccgcctgttcctgctccggcacctgaacaatcactggctaatacatcttcaatgtcaccgatgtctcctggtggcctagtccagccagctgctgcacctgctggtggccaaccttcccaagggactggcgctgcattccccagttctcctgcaggcgaaacgtttccaggcgcagcagctcagcatcccgcgcctgatgtataatgagtcggacgacatccagtgccctaaatatgtaatccggtgtacaataggagaaatgagtttccgggtagtagtttatatggcaaaaaaatcggcttttccgcaattttctgatctcgtggtgaattgacgtatggatgttgtgtgtttttgtgctgaattcaagaaaaagttatgttgtgcaactatattttgttttgtgtgttttctcgttttacaattttgtgtttctttgaattctttt

SEQ ID NO: 23449 - DNA, 4626 bp, Zea Mays
ccccgtttcacccacgcgtgcgctctctcctcactctccctctccctctcgtcgacgattgggaaagcgccgccgccgccgcgccacaccacgccaggtggcgagttcttcgtagcgccgttcgccaggtctccgtagcgcccttagccgtccgcgagaaccctcaaagcatttgcattatggttgcagcgtaggtggggagccattagaaggaggggcaacaagagttgctgggcatggcggctcaggaggccgcggcagctgattctttgggccctcggtttgctccggatgacccgacgctccctgcgccttggaaagggctgattgatggcgcgacgctgtactattggaatcctgagacgaatgtcacccagtatgagaagccggctgcaactgcaggtgtgccccctttgtcagcaggtcttccgccggcaacccctgcgcaggttccggaatctgcaccagtggcttttccgcagcttaacgtgcagtttggacaagctggccaggcagggcaccaggagcgtcctgaccaggcagcttatcctcaggctggccagcttggccagcagcacactcaacagccagctcagcagcaaccgtttcagcagcagcaaccgtttcagcagcatgtccaggcgcaacaccaagcttcgtttcagcatgtgccatatcagcaacagcaaacacacatgccaaatcagccacatcaataccacagcacgcatcctcaacacatgccgtaccagcatggtctttacatgcaacctcagcagcaacagcaggctccaccatattcatatcaggcagaccagcagccacagatgcgacaaactgcttataatcaagctcagcagccatcagtgcctcaagctgcctacaatcaaagtcagagtcagcagccaccaatgcctcaatcttcctacgatcaaggtcagagtcagcagccaccaatgccgcaaccttcctacaatcaaggtcaagttcagcagccaccgatgccacaaccttcttacaatcaaggtcagcaatccatgataccacagtctgcctacaatcaagctcagcagcctcaaattccacatggtgcttataatcaaagccagcaaccgctgggagataggattccccagggtcaagggcaacatcctcaacaatctttgagctctcatcatcctgcccaagcttcgcagtcgccgcaagtttcccaacctcaaggacctaaaatgccgactcaacaaggtcaactgcaacatggattgccgttcactcagcatggaaaaacgccattgtcacatgggcaacaaagtcctttgttgaaggatgatgatggaggagttcatgaaggcaagcggactggctttccgttaccacttagtcagcagcgtggccaagctcctcttccaaatcagcagctaccttctactcatcaacatcctggagcccttagtagccagccaaatatacctggagtcggtgggccattttatcctgccaggaatcttcctgatggaccatcctctgctgagactaataacatgggttttatgaactcacctgctcaaatgcatcaaggtggagcagatacaaactaccagaaaaaaccagttagtggccatacagttccaaatcatgttggtccatcaccaattcgacctccaatggggttcgatatgggtaatagtgttggacactttgaaagagatgaccctcactcttatggaaggtttgatggagcaaaggctctccagcagcagccaaagcttgctgctctcccaacttcacaaaattccatggtcatgcataatggaccgctttatcctcggccagacaattttggtggtcataacatggcacctccgcattcagtaccaaatccatataatcttggtccattgcctattggaacttcagtgaggccaccgtcaagtatgtttgctcctccagattttccaagcgtatcttcagctgatgcataccgtcaacaccatgaagtcactgccatgggtgagaacgttcctgctccgtttatgacatttgaggccactggattccctccagagattctgagagagattataaaatgaggctgaggcttcctgcttcttgtctctgccactgaatcaacaaagagcttcttcatgccttgagttgcttaaatccatgcagctggtttttcaaatcccactccaattcaagctcaaacatggcctgttgcgctgcaaaaccgggacatagtagctattgctaagacagggtctggaaagacgctggggtacctaatccctgcttttatacatctgaggagatgccacaataatccgatgctgggccctacagtattggttttggcccctactcgcgaacttgcttcacaaatacaagccgaagtagttaagtttggtcaatcatctagagtttcttgcacatgcctatatggtggaacttcaaaggtccctcagctaagagaacttgagcgtggagcagatattgtggtagcaacaccagggcgtcttaatgatatcctggagatgaagaggattaacctccatcaggtttcattacttgtgcttgatgaagcagaccgcatgcttgacatggggtttgaaccgcaaatacggaagattgtggatgagcttcctaatgctaggcagactctaatgtacactgccacttggccaaaggaggttacaaaaatagctggggatttactgagagatcctgtccaggtgaacattggcagtatcgatgaacttgttgctaacaaatccatcactcagtatgtagaggtggttccacctatggacaagcagcggcgtctagagcagattcttggagatcaagaaaggggctcaaaaatcatcatattttgctcaactaagaaaatgtgcgatcagcttgctcgtggcattggtcgcaactttaatgctgtaagcattcatggtgataaatcacaggccgaaagagataatgttctcaatcagtttcgaactggcagggcttcagtattagtagccacagatgttgctgctcgtggacttgatatcaaagatattagagtggtaatcaattatgactttccaactgggatagaggactatgtgcatcgcatagggcgtacaggaagagctggcgctactggagtctcgtacacatttttctcagaacaagattggaaatatgcttgtgatttggtgaaactcttgcaaggtgccaaccagcttgtccctccgcagctgcaagacatggctgcacgcagtgcttctggaggtccaagaaaccaggcttctgggatgagtcgctgggatgggcctggtggtcgtggttttgaacctggtgttggtggccctgttggttatggtggtgttagggagggtcctggaggttttggtggtcgtgagggcccaggtggacttggtgttcgagaaagcccagccatgtttggtggccccggtggcttcggtgatcgggaaggccccggtggcttcagtggccatgagggccatggtggctttggtggccgggaacgggagggtcctggtggctttgttggcagaaagggcccaggtggttttggtggacgggatggccctgggtcaagtggtttcggtggtagaggacagcgtggatctggtggttttggcagtagaggtggagcaagccctgggggctttggtggacgtggtggcaggggcgattctcctggttttggtggacgcggcaggggtgatttttccggttttggtggacgaggtaggggagatttttctggtgggcgcggtggcaggggccgtggatttggtggcaggggacgttctgaccggtttgtctcagatggacggggacgatatgataaccgtcgaggatttggagacaagggtagggatcggagctacagccgcagcccggatagagtccgggcacggggttatgacagaagaagtgacagcaggagcattagtaggagcaggagtcgcagcaggagctggtcacgcagcagaagccgcagcaggagctggagccgaagcagcagccggagtcacagcaggagcaggagtcgtgaccatggggcagcaccggagcgcaggccccgagcaagatccggcttcgatgtgctgcctcctgcaactggagctgctggacctgcacctgttcccgtacctggaccagcagcaccgcctgttcctgctccggcacctgaacaatcactggctaatacatcttcaatgtcaccgatgtctcctggtggcctagtccagccagctgctgcacctgctggtggccaaccttcccaagggactggcgctgcattccccagttctcctgcaggcgaaacgtttccaggcgcagcagctcagcatcccgcgcctgatgtataatgagtcggacgacatccagtgccctaaatatgtaatccggtgtacaataggagaaatgagtttccgggtagtagtttatatggcaaaaaaatcggcttttccgcaattttctgatctcgtggtgaattgacgtatggatgttgtgtgtttttgtgctgaattcaagaaaaagttatgttgtgcaactatattttgttttgtgtgttttctcgttttacaattttgtgtttctttgaattctttt

SEQ ID NO: 23450 - DNA, 209 bp, Zea Mays
caccggggcttgcctgggataaacactaggttagtgttgttagacgatgtctgcttgacgaccattcttgtcctagcacttgatcggcaggttcgtctattagcaccaccatgcggagtagcccgcgcttgaggtcaacttggttcgtctttcgcatcgcgcgattaataagcgtacctaaatgatttgcataatgcacatgaatgcat

SEQ ID NO: 23451 - DNA, 2239 bp, Zea Mays
ctcgaccacgagtatggacgttaacacgtgatagctgtgaatgtaaaggtcactaaattttaatcatcctcgtttatcatgatttggatatcgtgtttgtctccatctgtttaaattgtcctaaattatttcacaaaaattcggactttagtaatctttcgaaacatcgaatccagtatcgttttggttgagccatcgacgtcttgcccaaactctaatcctagaaatcggatctggtcccttaaacttcatttgaaattctttcacgcttgtgttgcacgtgtctctctgtggcctgacatcgtgacacgggtggcaggtgctaaccggtgtctggatagcgcacaacctctcgcccacgtgaacgatgtgtgacgtcgctttcgcaaggatcacaatttcgatgctgtatcgatctcgcgtatttatttcacgaaatgtcgagtctgatgtccgtttaaaatttatggattaagagaatatgaatttggaatcccgacccactcttgtgatttttgacccaagtgaattttattagaagatcgacgacaagagtgtcgatgcgagattaaattggaccgagataattagagccggaattgagtaatcgtaattaatttgtttccctgtttagacgcggatgaaattatttaatttcaaataattcgaatcaaacgtaaaatagcgatgttaatattattttggttcatccttgcatctcgcttagacccaaatcctagaacccaaatttgtccatgtctaaaaaaatgtgtgagagaaacataggaaaatcccttttcagttttattttttcattgtcgttgataatctcccatggtgccgtctctctgggattttcttgaagtcgctcggatccctatcctccaccgtctagactcctcttcttatcccttcgtacacaactgctgctagatttctccaggccatcagcttgtctctgctcgcccaagcacaggtgttggcttcctcccatcgtatcaaccatatgtggagtccttgcttatcccctgcgcataggaagccagctccctcacgttgcctcatccctagacgcgctcgcccagatcgagcgtcgtcgctcagctcgcccagccctccccatccttctctagccatggtgctgctcccagtcttctgctcgcccctgccctcagccttggcgtctggccgccactgccccagctttccatggcggcattttctgcttcctggtggccgacgccctccctaaactgagcaccgccgtcaactgcgccttggcgctaatcctccccaacctcttctttgccggtggtcgtctccagccccttccatggcacctagttttattcccatggcgagctcgcccaagcaatcacctccatcacagctcgccgtgcctgcgcagccccgacaacgactccctcttctgcgtcgcgccattgacccgctcgatggaatgccgcagcgagctctacccgatctgcaacgcctgcgcgccgtcgtcgaaatccccgcaaccgtgttggtccgcaacaacacgtcctcgatctgcaatccctagccttgtggtcgaccttgccctccgtcgatgtcctgccttgcgcatcgcttgctcaacgaaagcctcactcgtgaacgacatgcgcgactcatccgatcccgccaggtacgctagatgattatgcgaattggagggcatggatcaggatggatcacaaggtggctttgatggacccatctcgatatggacgacttgatcaagtgtcaggattgttgatgctcgccaagcggacttcatctaaccacactaacctagtgtatcccaggcaagccccggtgcatttgccacctccttgctgtttttaaacttttatcatttatatgatgcattaggtggtaggagttgaatgattaaacctttgttgcataacttccttgaactattgattaccatccttgatacctgttttaaaaagctagatgtgcttagtatgctcatagactaagaacaaaatgttttgatctatgaatcatgtttttacaaagaaaagaggctggagtgatgaaggtatcaaaggccttgatgactccatcatttcagtagggtacctctgacaggtaccaggttttcagaaataacttaatatgagaccagacgttgagcaggaaatgtcgcccgtctgtgtcgcttaaggaccgttccgattgttggcctgctgatctaggaccctttaac

SEQ ID NO: 23452 - DNA, 2133 bp, Zea Mays
ctcgaccacgagtatggacgttaacacgtgatagctgtgaatgtaaaggtcactaaattttaatcatcctcgtttatcatgatttggatatcgtgtttgtctccatctgtttaaattgtcctaaattatttcacaaaaattcggactttagtaatctttcgaaacatcgaatccagtatcgttttggttgagccatcgacgtcttgcccaaactctaatcctagaaatcggatctggtcccttaaacttcatttgaaattctttcacgcttgtgttgcacgtgtctctctgtggcctgacatcgtgacacgggtggcaggtgctaaccggtgtctggatagcgcacaacctctcgcccacgtgaacgatgtgtgacgtcgctttcgcaaggatcacaatttcgatgctgtatcgatctcgcgtatttatttcacgaaatgtcgagtctgatgtccgtttaaaatttatggattaagagaatatgaatttggaatcccgacccactcttgtgatttttgacccaagtgaattttattagaagatcgacgacaagagtgtcgatgcgagattaaattggaccgagataattagagccggaattgagtaatcgtaattaatttgtttccctgtttagacgcggatgaaattatttaatttcaaataattcgaatcaaacgtaaaatagcgatgttaatattattttggttcatccttgcatctcgcttagacccaaatcctagaacccaaatttgtccatgtctaaaaaaatgtgtgagagaaacataggaaaatcccttttcagttttattttttcattgtcgttgataatctcccatggtgccgtctctctgggattttcttgaagtcgctcggatccctatcctccaccgtctagactcctcttcttatcccttcgtacacaactgctgctagatttctccaggccatcagcttgtctctgctcgcccaagcacaggtgttggcttcctcccatcgtatcaaccatatgtggagtccttgcttatcccctgcgcataggaagccagctccctcacgttgcctcatccctagacgcgctcgcccagatcgagcgtcgtcgctcagctcgcccagccctccccatccttctctagccatggtgctgctcccagtcttctgctcgcccctgccctcagccttggcgtctggccgccactgccccagctttccatggcggcattttctgcttcctggtggccgacgccctccctaaactgagcaccgccgtcaactgcgccttggcgctaatcctccccaacctcttctttgccggtggtcgtctccagccccttccatggcacctagttttattcccatggcgagctcgcccaagcaatcacctccatcacagctcgccgtgcctgcgcagccccgacaacgactccctcttctgcgtcgcgccattgacccgctcgatggaatgccgcagcgagctctacccgatctgcaacgcctgcgcgccgtcgtcgaaatccccgcaaccgtgttggtccgcaacaacacgtcctcgatctgcaatccctagccttgtggtcgaccttgccctccgtcgatgtcctgccttgcgcatcgcttgctcaacgaaagcctcactcgtgaacgacatgcgcgactcatccgatcccgccaggtacgctagatgattatgcgaattggagggcatggatcaggatggatcacaaggtggctttgatggacccatctcgatatggacgacttgatcaagtgtcaggattgttgatgctcgccaagcggacttcatctaaccacactaacctagtgtatcccaggtaccggaggctatactcgataccaggctgcgtcatcgtgctggaaaggtggtgactcaactgctgattaaatggagtggttggcacgctgcgctggccacctaggaagacgaggtcgacatcaagcagaaatttccattcgccccagcttggggacaagttggccatcaaggaagggaagatgtcagcgacctgaaggctgggagtcatccaaccaccaacgtcggaaatacgaactaggggagaaccgtgaagatggcatttctaggccaagtcagaagagtattcgaacgagccgaagaat

SEQ ID NO: 23453 - DNA, 1947 bp, Zea Mays
ctcgaccacgagtatggacgttaacacgtgatagctgtgaatgtaaaggtcactaaattttaatcatcctcgtttatcatgatttggatatcgtgtttgtctccatctgtttaaattgtcctaaattatttcacaaaaattcggactttagtaatctttcgaaacatcgaatccagtatcgttttggttgagccatcgacgtcttgcccaaactctaatcctagaaatcggatctggtcccttaaacttcatttgaaattctttcacgcttgtgttgcacgtgtctctctgtggcctgacatcgtgacacgggtggcaggtgctaaccggtgtctggatagcgcacaacctctcgcccacgtgaacgatgtgtgacgtcgctttcgcaaggatcacaatttcgatgctgtatcgatctcgcgtatttatttcacgaaatgtcgagtctgatgtccgtttaaaatttatggattaagagaatatgaatttggaatcccgacccactcttgtgatttttgacccaagtgaattttattagaagatcgacgacaagagtgtcgatgcgagattaaattggaccgagataattagagccggaattgagtaatcgtaattaatttgtttccctgtttagacgcggatgaaattatttaatttcaaataattcgaatcaaacgtaaaatagcgatgttaatattattttggttcatccttgcatctcgcttagacccaaatcctagaacccaaatttgtccatgtctaaaaaaatgtgtgagagaaacataggaaaatcccttttcagttttattttttcattgtcgttgataatctcccatggtgccgtctctctgggattttcttgaagtcgctcggatccctatcctccaccgtctagactcctcttcttatcccttcgtacacaactgctgctagatttctccaggccatcagcttgtctctgctcgcccaagcacaggtgttggcttcctcccatcgtatcaaccatatgtggagtccttgcttatcccctgcgcataggaagccagctccctcacgttgcctcatccctagacgcgctcgcccagatcgagcgtcgtcgctcagctcgcccagccctccccatccttctctagccatggtgctgctcccagtcttctgctcgcccctgccctcagccttggcgtctggccgccactgccccagctttccatggcggcattttctgcttcctggtggccgacgccctccctaaactgagcaccgccgtcaactgcgccttggcgctaatcctccccaacctcttctttgccggtggtcgtctccagccccttccatggcacctagttttattcccatggcgagctcgcccaagcaatcacctccatcacagctcgccgtgcctgcgcagccccgacaacgactccctcttctgcgtcgcgccattgacccgctcgatggaatgccgcagcgagctctacccgatctgcaacgcctgcgcgccgtcgtcgaaatccccgcaaccgtgttggtccgcaacaacacgtcctcgatctgcaatccctagccttgtggtcgaccttgccctccgtcgatgtcctgccttgcgcatcgcttgctcaacgaaagcctcactcgtgaacgacatgcgcgactcatccgatcccgccaggtacgctagatgattatgcgaattggagggcatggatcaggatggatcacaaggtggctttgatggacccatctcgatatggacgacttgatcaagtgtcaggattgttgatgctcgccaagcggacttcatctaaccacactaacctagtgtatcccaggtcactttcagaggaacacattggacaaggttctagacactgttgcagaaggaggaggacagacctcaagtaaaatggggttgtcgtgtgcttaaaacaacaatgatggagatctttt

SEQ ID NO: 23454 - DNA, 1815 bp, Zea Mays
gatcacaatttcgatgctgtatcgatctcgcgtatttatttcacgaaatgtcgagtctgatgtccgtttaaaatttatggattaagagaatatgaatttggaatcccgacccactcttgtgatttttgacccaagtgaattttattagaagatcgacgacaagagtgtcgatgcgagattaaattggaccgagataattagagccggaattgagtaatcgtaattaatttgtttccctgtttagacgcggatgaaattatttaatttcaaataattcgaatcaaacgtaaaatagcgatgttaatattattttggttcatccttgcatctcgcttagacccaaatcctagaacccaaatttgtccatgtctaaaaaaatgtgtgagagaaacataggaaaatcccttttcagttttattttttcattgtcgttgataatctcccatggtgccgtctctctgggattttcttgaagtcgctcggatccctatcctccaccgtctagactcctcttcttatcccttcgtacacaactgctgctagatttctccaggccatcagcttgtctctgctcgcccaagcacaggtgttggcttcctcccatcgtatcaaccatatgtggagtccttgcttatcccctgcgcataggaagccagctccctcacgttgcctcatccctagacgcgctcgcccagatcgagcgtcgtcgctcagctcgcccagccctccccatccttctctagccatggtgctgctcccagtcttctgctcgcccctgccctcagccttggcgtctggccgccactgccccagctttccatggcggcattttctgcttcctggtggccgacgccctccctaaactgagcaccgccgtcaactgcgccttggcgctaatcctccccaacctcttctttgccggtggtcgtctccagccccttccatggcacctagttttattcccatggcgagctcgcccaagcaatcacctccatcacagctcgccgtgcctgcgcagccccgacaacgactccctcttctgcgtcgcgccattgacccgctcgatggaatgccgcagcgagctctacccgatctgcaacgcctgcgcgccgtcgtcgaaatccccgcaaccgtgttggtccgcaacaacacgtcctcgatctgcaatccctagccttgtggtcgaccttggtacgctagatgattatgcgaattggagggcatggatcaggatggatcacaaggtggctttgatggacccatctcgatatggacgacttgatcaagtgtcaggattgttgatgctcgccaagcggacttcatctaaccacactaacctagtgtatcccaggtacgctagatgattatgcgaattggagggcatggatcaggatggatcacaaggtggctttgatggacccatctcgatatggacgacttgatcaagtgtcaggattgttgatgctcgccaagcggacttcatctaaccacactaacctagtgtatcccaggtaccggaggctatactcgataccaggctgcgtcatcgtgctggaaaggtggtgactcaactgctgattaaatggagtggttggcacgctgcgctggccacctaggaagacgaggtcgacatcaagcagaaatttccattcgccccagcttggggacaagttggccatcaaggaagggaagatgtcagcgacctgaaggctgggagtcatccaaccaccaacgtcggaaatacgaactaggggagaaccgtgaagatggcatttctaggccaagtcagaagagtattcgaacgagccgaagaat

SEQ ID NO: 23455 - DNA, 2989 bp, Zea Mays
ataggtgttggcccgttgttacgagaagctatagaagagaagaagaaaaaaaaatggtaccatgtcacgtggtgatgggctgacagtctgtctgcatatgattcgtgggccgttctgggcatatatgctggatgaatactttccacaagatagataagcgaggcctcttcgttcacctctgtctcgctttcctttcccgttcaccccaagcccccaacctgcgagctgcgacaagttcgtctctctcgtggccacgactggccgccgcccccgcctccgtcccctcgcagattcccaggtcttcgccgctcccttcgccgccaaagagcacccactaggcatgcttaccccttctcttctcttcctgctgtgcgaaacgagaacccaaaccctaatatcagctatttggatatttgtattcggatctgatctactactagtgtatacatgtcttgcgcctacaagtttcgattttttttgcagaagttattgggtgtacactgtttttagacatgtcctttactggttccgcccctttcttggcttaagcgcaaaaatcatactggattttagatttctgtactgttttttattggctaaattctactgtatgcttatttgttttctgcggttcacttgcccctttagctacaatttgcctcaaaattatgtttcaggttaaatccgccagggggaaatctccatcaagtggctcgtgctaattatgcgatcttcatgggctgactcagttgcgaacgccgaggaatcggcgcccgcgactgctgctgctaatggctctgttgcaactcatagcacctcgcgccctacgcgcagctcctacgtgcctccacatcttcgtggccgctcagctggtgctgctgttgaagctcaagcaggcttagtagcaccagcacaaggtggaccactgccattggctgctgcacaaccttctggtcagggtgctgctgttggtggccctcgctgggctggcattgtgaatggtggtggtggtggtggcagcattggtgctcctcgccagggccatggtggcggaggcgggggccgtggtgcttggaactcccgtcctggtggttgggaccgcagagaccgggagccagatccgtttgcgaaagccgaggctgaagaaattgatttcgacggccaggagaatactggcatcaattttgatgcctatgaagacatccctgttgagaccagtggccatgatgtgcctgcaccagtcaacacatttgcagagattgatttgggtgatgcattgaatgacaatatccggaggtgcaagtatgtgaaaccaacaccagtgcagcgttacgccatcccaatctccattgctgggcgggatctcatggcctgcgcacagactggatccggaaaaaccgccgcattctgttttccaatcatcagtgggatcttgaagtcaccaaagccacaccagaggtcacggagtacaaggaccgcttgccctctagctctgatcttatcacccactcgtgagctttcagtccaaatccatgaagaagcaaggaagtttgcataccagactggtgtcagagttgtggttgcatatggtggcgcaccaataactaaccagctgagggagttagagagaggtgtggaaatcctggtggcaactcctggtcgcttgatggatctgttggagagggctagagtctcacttcaaatgataaagtatttagctcttgatgaagctgatcggatgcttgatatgggttttgagccacagatacgtaaaattgttgagggcatggacatgcctcaacgtggtgagaggcagacaatgttgttcagtgcaacattcccaaaagagatacagaggatggccgcagatttccttgctgattacatctttcttgctgttgggagagttggttcaagcaccgatttgattgttcagagggtggagtttgtcctcgattcagacaaacgaagctacctcatggatcttctgcatgcacaaaaggctaatggcacacatggaaagcacgctcttacattggtctttgtggagacaaagaggggggctgatgccctggaggactggctttttagaaatggatttcctgcaactagcattcatggagacaggacacaacaggaaagggagcatgcccttaggtccttcaagagcggagcaactcccatccttgtggcgactgatgttgctgctcgtggtcttgacataccacatgttgcccatgtgattaattttgacctccctaatgatatagatgactatgttcatcggattggaaggactggacgtgctgggaaatctggtcttgcgactgcattcttcaacgagagcaacactacgcttgcaaggccgttgagtgatctcatgaaagaggccaaccaggaggttcctaagtggcttgagggatacgctgcccgatcagcctacggaggtggaggtggtagaaaccgcagacaaggtagcagtgccagatttggtggccgtgatttccggcgagataggggcagtggtggaggatatggtggtggttcctacggaggaggtggtggtggtggatatgggggatcatcaggatacggtggtgcctatggtggcggtggcagcggcggcggcggctatggtggtggtcagagtacgagttcttgggactgaactgaactctgattagaagtgaaaaatgggccaaccttttgggcgtgaaaaatgggtcaaccgttatcgattagtccctgttggatggagcgaatgcttgaaatttgttgcttgacatacgattaatcttgcgttgtgttgtgctaagggattggcttatgttattatctggattggtggtttttctacgcctcatgcttgtgctgtctcgtttcacaaaatatcttttttgcttatgtcatagatataatttcatctaggtctgtcatttatatcaacttctgacttcgaccattatcgtgtcaaatcttcttgcacata

SEQ ID NO: 23456 - DNA, 2346 bp, Zea Mays
gttcacctcggctctttctcgctttctttctcccgttcacgccggctctacctgcgataggttaaatctgccagcaggacatctccatcaagtgactggtgctaattatgcgatcttcatgggctgactcagttgcgaacgccgaggaatcggcgcccgcgactgctgctgctaacggctctgttgcaaatcatagcaactcgcgccctacgcgcagctcctacgtgcctcctcatctccgtggccgctcagctggtgctgctgttggagctcaagcaggctcagtagcaccagcacaaggtggaccactgccattggctgctgcacaaccttctggccagggcgctgttgttggtggccctcgctgggctggcattgtgaatggtggtggtggtggcagcgttggtgctcctcgccagggttatggtggtggtggtgggggcggaggccgtggtgcttggaactcccgtcctggtggttgggaccgcagagaccgggagccagatccgtttgccaaagccgaggctgaagaagttgacttcgacggccaggagaatactggcatcaattttgatgcctatgaagacatccctgttgagaccagtggccatgatgtgcctgcaccagtcaatacatttgcagagattgatttgggtgatgcattgaatgaaaatatccggaggtgcaagtatgtgaaaccaacaccagtgcagcgttacgctatcccaatctccatcgctgggcgggatctcatggcctgcgcacagactggatccggaaaaaccgccgcattctgttttccaatcataagtgggatcttgaagtcaccaaagccacaccagaggtcacggagtacaaggaccgcttgtcctctagctctgatcttatcacccactcgagagctctcagtccaaatccatgaggaagcaaggaagtttgcataccagactggtgtcagagtcgtggttgcatatggtggtgcaccaataactaaccagctgagggagttagagagaggtgtggaaatcctggtggcaactcctggtcgcttgatggatctgttggagagggctagagtctcacttcaaatgataaagtatttagctcttgatgaagctgatcggatgcttgatatgggtttcgagccacagatacgtaaaattgttgagggcatggacatgcctcaacgtggtgagaggcagacaatgttgtttagtgcgacattcccaaaagagatacagaggatggctgcagatttccttgctgattacatctttcttgctgttgggagagttggttcaagcaccgatttaattgttcagagggtggagtttgtcctcgattcagacaaacgaagctacctcatggatcttattcatgcacaaaaggctaatggcacacatggaaagcacgctcttacattggtctttgtggagacaaagaggggggctgatgccctggaggactggctttttagaaatggtttccctgcaactagcattcatggagacaggacacaacaggaaagggagcatgcccttaggtccttcaagagcggagcaactcctatccttgtggcgactgatgttgctgctcgtggtcttgacataccacatgttgcccatgtgattaattttgacctccctaatgatatagatgattatgttcatcggattggaaggaccggacgtgctgggaaatctggtcttgcgactgcattcttcaacgagagcaacactacgcttgcaaggccattgagtgatctcatgaaagaggcaaaccaggaggttcctaagtggcttgacgggtacgctgcccgctcagcctacggaggtggaggtggtagaaaccgcagacaaggtagtggtgccagatttggtggccgtgatttccggcgagataggggcagtggtggttcctacggaggaggtggtggtggtggtggaggatatggcggatcatcaggatacggtggtgcttatggcggcggcggcagcagtggctatggtggtggtcagagtacgagttcttgggactgaactgaattctggttagaagtgaaaaatgggtcaacctgttgggtgtgaaaaatgggtcaaccgttatcgattagtccctgttggatggagcgaatgcctgaaatttgttgcttgacttgcgagtacggtgtcaggaggtttcccagtgccttaatcttgcattttgtgttgtactagggattgcttatgttattatctgaattggtggtttcttttctacgcctcatgcttgtgctgtcttcttcacaaagtatcttgtgctaacttctgatcatagatataatttcatctaggtctcatttatatc

SEQ ID NO: 23457 - DNA, 2416 bp, Zea Mays
gttcacctcggctctttctcgctttctttctcccgttcacgccggctctacctgcgataggttcgtctctctcgtggcaacgactggccgccgccctcgccctcgcccccgcccccgcgcaggttcccaggttaaatctgccagcaggacatctccatcaagtgactggtgctaattatgcgatcttcatgggctgactcagttgcgaacgccgaggaatcggcgcccgcgactgctgctgctaacggctctgttgcaaatcatagcaactcgcgccctacgcgcagctcctacgtgcctcctcatctccgtggccgctcagctggtgctgctgttggagctcaagcaggctcagtagcaccagcacaaggtggaccactgccattggctgctgcacaaccttctggccagggcgctgttgttggtggccctcgctgggctggcattgtgaatggtggtggtggtggcagcgttggtgctcctcgccagggttatggtggtggtggtgggggcggaggccgtggtgcttggaactcccgtcctggtggttgggaccgcagagaccgggagccagatccgtttgccaaagccgaggctgaagaagttgacttcgacggccaggagaatactggcatcaattttgatgcctatgaagacatccctgttgagaccagtggccatgatgtgcctgcaccagtcaatacatttgcagagattgatttgggtgatgcattgaatgaaaatatccggaggtgcaagtatgtgaaaccaacaccagtgcagcgttacgctatcccaatctccatcgctgggcgggatctcatggcctgcgcacagactggatccggaaaaaccgccgcattctgttttccaatcataagtgggatcttgaagtcaccaaagccacaccagaggtcacggagtacaaggaccgcttgtcctctagctctgatcttatcacccactcgagagctctcagtccaaatccatgaggaagcaaggaagtttgcataccagactggtgtcagagtcgtggttgcatatggtggtgcaccaataactaaccagctgagggagttagagagaggtgtggaaatcctggtggcaactcctggtcgcttgatggatctgttggagagggctagagtctcacttcaaatgataaagtatttagctcttgatgaagctgatcggatgcttgatatgggtttcgagccacagatacgtaaaattgttgagggcatggacatgcctcaacgtggtgagaggcagacaatgttgtttagtgcgacattcccaaaagagatacagaggatggctgcagatttccttgctgattacatctttcttgctgttgggagagttggttcaagcaccgatttaattgttcagagggtggagtttgtcctcgattcagacaaacgaagctacctcatggatcttattcatgcacaaaaggctaatggcacacatggaaagcacgctcttacattggtctttgtggagacaaagaggggggctgatgccctggaggactggctttttagaaatggtttccctgcaactagcattcatggagacaggacacaacaggaaagggagcatgcccttaggtccttcaagagcggagcaactcctatccttgtggcgactgatgttgctgctcgtggtcttgacataccacatgttgcccatgtgattaattttgacctccctaatgatatagatgattatgttcatcggattggaaggaccggacgtgctgggaaatctggtcttgcgactgcattcttcaacgagagcaacactacgcttgcaaggccattgagtgatctcatgaaagaggcaaaccaggaggttcctaagtggcttgacgggtacgctgcccgctcagcctacggaggtggaggtggtagaaaccgcagacaaggtagtggtgccagatttggtggccgtgatttccggcgagataggggcagtggtggttcctacggaggaggtggtggtggtggtggaggatatggcggatcatcaggatacggtggtgcttatggcggcggcggcagcagtggctatggtggtggtcagagtacgagttcttgggactgaactgaattctggttagaagtgaaaaatgggtcaacctgttgggtgtgaaaaatgggtcaaccgttatcgattagtccctgttggatggagcgaatgcctgaaatttgttgcttgacttgcgagtacggtgtcaggaggtttcccagtgccttaatcttgcattttgtgttgtactagggattgcttatgttattatctgaattggtggtttcttttctacgcctcatgcttgtgctgtcttcttcacaaagtatcttgtgctaacttctgatcatagatataatttcatctaggtctcatttatatc

SEQ ID NO: 23458 - DNA, 2423 bp, Zea Mays
gttcacctcggctctttctcgctttctttctcccgttcacgccggctctacctgcgataggttcgtctctctcgtggcaacgactggccgccgccctcgccctcgcccccgcccccgcgcaggttcccaggtcttcgccggtcccttcgccgccaaagagcacccactaggttaaatctgccagcaggacatctccatcaagtgactggtgctaattatgcgatcttcatgggctgactcagttgcgaacgccgaggaatcggcgcccgcgactgctgctgctaacggctctgttgcaaatcatagcaactcgcgccctacgcgcagctcctacgtgcctcctcatctccgtggccgctcagctggtgctgctgttggagctcaagcaggctcagtagcaccagcacaaggtggaccactgccattggctgctgcacaaccttctggccagggcgctgttgttggtggccctcgctgggctggcattgtgaatggtggtggtggtggcagcgttggtgctcctcgccagggttatggtggtggtggtgggggcggaggccgtggtgcttggaactcccgtcctggtggttgggaccgcagagaccgggagccagatccgtttgccaaagccgaggctgaagaagttgacttcgacggccaggagaatactggcatcaattttgatgcctatgaagacatccctgttgagaccagtggccatgatgtgcctgcaccagtcaatacatttgcagagattgatttgggtgatgcattgaatgaaaatatccggaggtgcaagtatgtgaaaccaacaccagtgcagcgttacgctatcccaatctccatcgctgggcgggatctcatggcctgcgcacagactggatccggaaaaaccgccgcattctgttttccaatcataagtgggatcttgaagtcaccaaagccacaccagaggtcacggagtacaaggaccgcttgtcctctagctctgatcttatcacccactcgagagctctcagtccaaatccatgaggaagcaaggaagtttgcataccagactggtgtcagagtcgtggttgcatatggtggtgcaccaataactaaccagctgagggagttagagagaggtgtggaaatcctggtggcaactcctggtcgcttgatggatctgttggagagggctagagtctcacttcaaatgataaagtatttagctcttgatgaagctgatcggatgcttgatatgggtttcgagccacagatacgtaaaattgttgagggcatggacatgcctcaacgtggtgagaggcagacaatgttgtttagtgcgacattcccaaaagagatacagaggatggctgcagatttccttgctgattacatctttcttgctgttgggagagttggttcaagcaccgatttaattgttcagagggtggagtttgtcctcgattcagacaaacgaagctacctcatggatcttattcatgcacaaaaggctaatggcacacatggaaagcacgctcttacattggtctttgtggagacaaagaggggggctgatgccctggaggactggctttttagaaatggtttccctgcaactagcattcatggagacaggacacaacaggaaagggagcatgcccttaggtccttcaagagcggagcaactcctatccttgtggcgactgatgttgctgctcgtggtcttgacataccacatgttgcccatgtgattaattttgacctccctaatgatatagatgattatgttcatcggattggaaggaccggacgtgctgggaaatctggtcttgcgactgcattcttcaacgagagcaacactacgcttgcaaggccattgagtgatctcatgaaagaggcaaaccaggaggttcctaagtggcttgacgggtacgctgcccgctcagcctacggaggtggaggtggtagaaaccgcagacaaggtagtggtgccagatttggtggccgtgatttccggcgagataggggcagtggtggatatggcggatcatcaggatacggtggtgcttatggcggcggcggcagcagtggctatggtggtggtcagagtacgagttcttgggactgaactgaattctggttagaagtgaaaaatgggtcaacctgttgggtgtgaaaaatgggtcaaccgttatcgattagtccctgttggatggagcgaatgcctgaaatttgttgcttgacttgcgagtacggtgtcaggaggtttcccagtgccttaatcttgcattttgtgttgtactagggattgcttatgttattatctgaattggtggtttcttttctacgcctcatgcttgtgctgtcttcttcacaaagtatcttgtgctaacttctgatcatagatataatttcatctaggtctcatttatatc

SEQ ID NO: 23459 - DNA, 2356 bp, Zea Mays
agcacccaaaccctaatttcagctatttggttatttgtattcggatctgatctactactggtgtatacatgttaaatctgccagcaggacatctccatcaagtgactggtgctaattatgcgatcttcatgggctgactcagttgcgaacgccgaggaatcggcgcccgcgactgctgctgctaacggctctgttgcaaatcatagcaactcgcgccctacgcgcagctcctacgtgcctcctcatctccgtggccgctcagctggtgctgctgttggagctcaagcaggctcagtagcaccagcacaaggtggaccactgccattggctgctgcacaaccttctggccagggcgctgttgttggtggccctcgctgggctggcattgtgaatggtggtggtggtggcagcgttggtgctcctcgccagggttatggtggtggtggtgggggcggaggccgtggtgcttggaactcccgtcctggtggttgggaccgcagagaccgggagccagatccgtttgccaaagccgaggctgaagaagttgacttcgacggccaggagaatactggcatcaattttgatgcctatgaagacatccctgttgagaccagtggccatgatgtgcctgcaccagtcaatacatttgcagagattgatttgggtgatgcattgaatgaaaatatccggaggtgcaagtatgtgaaaccaacaccagtgcagcgttacgctatcccaatctccatcgctgggcgggatctcatggcctgcgcacagactggatccggaaaaaccgccgcattctgttttccaatcataagtgggatcttgaagtcaccaaagccacaccagaggtcacggagtacaaggaccgcttgtcctctagctctgatcttatcacccactcgagagctctcagtccaaatccatgaggaagcaaggaagtttgcataccagactggtgtcagagtcgtggttgcatatggtggtgcaccaataactaaccagctgagggagttagagagaggtgtggaaatcctggtggcaactcctggtcgcttgatggatctgttggagagggctagagtctcacttcaaatgataaagtatttagctcttgatgaagctgatcggatgcttgatatgggtttcgagccacagatacgtaaaattgttgagggcatggacatgcctcaacgtggtgagaggcagacaatgttgtttagtgcgacattcccaaaagagatacagaggatggctgcagatttccttgctgattacatctttcttgctgttgggagagttggttcaagcaccgatttaattgttcagagggtggagtttgtcctcgattcagacaaacgaagctacctcatggatcttattcatgcacaaaaggctaatggcacacatggaaagcacgctcttacattggtctttgtggagacaaagaggggggctgatgccctggaggactggctttttagaaatggtttccctgcaactagcattcatggagacaggacacaacaggaaagggagcatgcccttaggtccttcaagagcggagcaactcctatccttgtggcgactgatgttgctgctcgtggtcttgacataccacatgttgcccatgtgattaattttgacctccctaatgatatagatgattatgttcatcggattggaaggaccggacgtgctgggaaatctggtcttgcgactgcattcttcaacgagagcaacactacgcttgcaaggccattgagtgatctcatgaaagaggcaaaccaggaggttcctaagtggcttgacgggtacgctgcccgctcagcctacggaggtggaggtggtagaaaccgcagacaaggtagtggtgccagatttggtggccgtgatttccggcgagataggggcagtggtggttcctacggaggaggtggtggtggtggtggaggatatggcggatcatcaggatacggtggtgcttatggcggcggcggcagcagtggctatggtggtggtcagagtacgagttcttgggactgaactgaattctggttagaagtgaaaaatgggtcaacctgttgggtgtgaaaaatgggtcaaccgttatcgattagtccctgttggatggagcgaatgcctgaaatttgttgcttgacttgcgagtacggtgtcaggaggtttcccagtgccttaatcttgcattttgtgttgtactagggattgcttatgttattatctgaattggtggtttcttttctacgcctcatgcttgtgctgtcttcttcacaaagtatcttgtgctaacttctgatcatagatataatttcatctaggtctcatttatatc

SEQ ID NO: 23460 - DNA, 2350 bp, Zea Mays
gtcctttactggttccgcccctgcttggctcaagcgcaaaaatcatactggattttagatttctgttaaatctgccagcaggacatctccatcaagtgactggtgctaattatgcgatcttcatgggctgactcagttgcgaacgccgaggaatcggcgcccgcgactgctgctgctaacggctctgttgcaaatcatagcaactcgcgccctacgcgcagctcctacgtgcctcctcatctccgtggccgctcagctggtgctgctgttggagctcaagcaggctcagtagcaccagcacaaggtggaccactgccattggctgctgcacaaccttctggccagggcgctgttgttggtggccctcgctgggctggcattgtgaatggtggtggtggtggcagcgttggtgctcctcgccagggttatggtggtggtggtgggggcggaggccgtggtgcttggaactcccgtcctggtggttgggaccgcagagaccgggagccagatccgtttgccaaagccgaggctgaagaagttgacttcgacggccaggagaatactggcatcaattttgatgcctatgaagacatccctgttgagaccagtggccatgatgtgcctgcaccagtcaatacatttgcagagattgatttgggtgatgcattgaatgaaaatatccggaggtgcaagtatgtgaaaccaacaccagtgcagcgttacgctatcccaatctccatcgctgggcgggatctcatggcctgcgcacagactggatccggaaaaaccgccgcattctgttttccaatcataagtgggatcttgaagtcaccaaagccacaccagaggtcacggagtacaaggaccgcttgtcctctagctctgatcttatcacccactcgagagctctcagtccaaatccatgaggaagcaaggaagtttgcataccagactggtgtcagagtcgtggttgcatatggtggtgcaccaataactaaccagctgagggagttagagagaggtgtggaaatcctggtggcaactcctggtcgcttgatggatctgttggagagggctagagtctcacttcaaatgataaagtatttagctcttgatgaagctgatcggatgcttgatatgggtttcgagccacagatacgtaaaattgttgagggcatggacatgcctcaacgtggtgagaggcagacaatgttgtttagtgcgacattcccaaaagagatacagaggatggctgcagatttccttgctgattacatctttcttgctgttgggagagttggttcaagcaccgatttaattgttcagagggtggagtttgtcctcgattcagacaaacgaagctacctcatggatcttattcatgcacaaaaggctaatggcacacatggaaagcacgctcttacattggtctttgtggagacaaagaggggggctgatgccctggaggactggctttttagaaatggtttccctgcaactagcattcatggagacaggacacaacaggaaagggagcatgcccttaggtccttcaagagcggagcaactcctatccttgtggcgactgatgttgctgctcgtggtcttgacataccacatgttgcccatgtgattaattttgacctccctaatgatatagatgattatgttcatcggattggaaggaccggacgtgctgggaaatctggtcttgcgactgcattcttcaacgagagcaacactacgcttgcaaggccattgagtgatctcatgaaagaggcaaaccaggaggttcctaagtggcttgacgggtacgctgcccgctcagcctacggaggtggaggtggtagaaaccgcagacaaggtagtggtgccagatttggtggccgtgatttccggcgagataggggcagtggtggttcctacggaggaggtggtggtggtggtggaggatatggcggatcatcaggatacggtggtgcttatggcggcggcggcagcagtggctatggtggtggtcagagtacgagttcttgggactgaactgaattctggttagaagtgaaaaatgggtcaacctgttgggtgtgaaaaatgggtcaaccgttatcgattagtccctgttggatggagcgaatgcctgaaatttgttgcttgacttgcgagtacggtgtcaggaggtttcccagtgccttaatcttgcattttgtgttgtactagggattgcttatgttattatctgaattggtggtttcttttctacgcctcatgcttgtgctgtcttcttcacaaagtatcttgtgctaacttctgatcatagatataatttcatctaggtctcatttatatc

SEQ ID NO: 23461 - DNA, 1644 bp, Zea Mays
ggggaccccttggatgggttggtcaagtgcgagaagtggattagggacgatgatgacaggttggagaaatcgaagacaacatcaaagacggcatggtggctgaatcggctgatcgggcagaaggaggaggtcaatttcggttggccatttcctttcgtggagggcaggctctttgttcttactctcagtgctgggttggagggttaccatgtgagcgttgatgggcgacatgtcacttcgtttccttaccgcactgggtttgtgttggaggacgctacaggcctgtcactgaatggggacctagatgtgcattcagtgattgcagggtctttgcccactacacacccaagttttgcgccacataattatctggagttttctaatgtttggcaggctcctctgctgcctgatgagccagttgagattttcattggcattctgtcagcagccaatcattttgctgaacgtatgggtgtgaggaagacatggatgtctgctgtccacaagtcaccaaacatggtggctcgtttcttcgttgcactgcatggcagaatggaagtgaatgcggagttgaagaaggaagctgaattttttcgggacattgtttttgtgcccttcctggacaactatgatcttgttgttatgaagactcttgcaatatgcgagttcatgttgtctctgctaaatatgtaatgaagtgtgatgatgatactttcgtgagacttgattcagtagtcactgaaattaagaaggtaccaggtgggagaagtctttacatggggagtatgaatatacaacacaagccactacgccatgggaaatgggctgtaacctatgaggagtggccacaagaggtgtatccgttatatgcaaatggccctggatatgttatatcatctgatattgctgattttatcatgtcagaattcatgaagcaaaagttgatgctcttcaaaatggaagatgtgagcttgggtgtgtgggttgagcagttcaataagacaagacccgttgaatacgttcacagcgacaaattttgtccaaatggatgcgtccctgactactatactgctcattaccaatcgccaaggctaatgctatgcatgtggcagaagttactggaaggaagaccagactgttgcaatgcgagataacaatgatggcgtagttcaaaaaagaagaagaaaacaacaattacagaatgagtagcatttgaccatcatccatagagccagtctcatgtaatcaacaaattaggttataaagtaatctgcattacatgggattaattcatacatcttcatggtagtttatatcctccttgagtcatgcaactgatcctacctagtcacaacagtgggcaagccagcacactaataattgtgctctgtgctctctttgagcgcccaaacacataggtagaagttggcaggtgctctggagatgcccggggacttaatttggaaatatagagagtcgaaatagttcagttaagttattactgtttccagaatggctttaaggtctggttgtagttgcagctaaacacatctggttaacagggcaaccttcaagatttcagtcaatttgtttaacgcattatcttattcagtcttgactttacttagggggtgtttgtttggg

SEQ ID NO: 23462 - DNA, 1650 bp, Zea Mays
gggaccccttggatgggttggtcaagtgcgagaagtggattagggacgatgatgacaggttggagaaatcgaagacaacatcaaagacggcatggtggctgaatcggctgatcgggcagaaggaggaggtcaatttcggttggccatttcctttcgtggagggcaggctctttgttcttactctcagtgctgggttggagggttaccatgtgagcgttgatgggcgacatgtcacttcgtttccttaccgcactgggtttgtgttggaggacgctacaggcctgtcactgaatggggacctagatgtgcattcagtgattgcagggtctttgcccactacacacccaagttttgcgccacataattatctggagttttctaatgtttggcaggctcctctgctgcctgatgagccagttgagattttcattggcattctgtcagcagccaatcattttgctgaacgtatgggtgtgaggaagacatggatgtctgctgtccacaagtcaccaaacatggtggctcgtttcttcgttgcactgcatggcagaatggaagtgaatgcggagttgaagaaggaagctgaattttttcgggacattgtttttgtgcccttcctggacaactatgatcttgttgttatgaagactcttgcaatatgcgagtatggggttcatgttgtctctgctaaatatgtaatgaagtgtgatgatgatactttcgtgagacttgattcagtagtcactgaaattaagaaggtaccaggtgggagaagtctttacatggggagtatgaatatacaacacaagccactacgccatgggaaatgggctgtaacctatgaggagtggccacaagaggtgtatccgttatatgcaaatggccctggatatgttatatcatctgatattgctgattttatcatgtcagaattcatgaagcaaaagttgatgctcttcaaaatggaagatgtgagcttgggtgtgtgggttgagcagttcaataagacaagacccgttgaatacgttcacagcgacaaattttgtccaaatggatgcgtccctgactactatactgctcattaccaatcgccaaggctaatgctatgcatgtggcagaagttactggaaggaagaccagactgttgcaatgcgagataacaatgatggcgtagttcaaaaaagaagaagaaaacaacaattacagaatgagtagcatttgaccatcatccatagagccagtctcatgtaatcaacaaattaggttataaagtaatctgcattacatgggattaattcatacatcttcatggtagtttatatcctccttgagtcatgcaactgatcctacctagtcacaacagtgggcaagccagcacactaataattgtgctctgtgctctctttgagcgcccaaacacataggtagaagttggcaggtgctctggagatgcccggggacttaatttggaaatatagagagtcgaaatagttcagttaagttattactgtttccagaatggctttaaggtctggttgtagttgcagctaaacacatctggttaacagggcaaccttcaagatttcagtcaatttgtttaacgcattatcttattcagtcttgactttacttagggggtgtttgtttggg

SEQ ID NO: 23463 - DNA, 850 bp, Zea Mays
gtacaatgttatattttcctcttgaaaaaatctcctctgtaaaattgtcacagcaatgaacctagtgcagcggtgagacttgtctcactgagttaacatgttgcgggttcgaagcaagcctctccgcatttgcggagggaagccttacctcagctcttcaaaatggaagatgtgagcttgggtgtgtgggttgagcagttcaataagacaagacccgttgaatacgttcacagcgacaaattttgtccaaatggatgcgtccctgactactatactgctcattaccaatcgccaaggctaatgctatgcatgtggcagaagttactggaaggaagaccagactgttgcaatgcgagataacaatgatggcgtagttcaaaaaagaagaagaaaacaacaattacagaatgagtagcatttgaccatcatccatagagccagtctcatgtaatcaacaaattaggttataaagtaatctgcattacatgggattaattcatacatcttcatggtagtttatatcctccttgagtcatgcaactgatcctacctagtcacaacagtgggcaagccagcacactaataattgtgctctgtgctctctttgagcgcccaaacacataggtagaagttggcaggtgctctggagatgcccggggacttaatttggaaatatagagagtcgaaatagttcagttaagttattactgtttccagaatggctttaaggtctggttgtagttgcagctaaacacatctggttaacagggcaaccttcaagatttcagtcaatttgtttaacgcattatcttattcagtcttgactttacttagggggtgtttgtttggg

SEQ ID NO: 23464 - DNA, 1243 bp, Zea Mays
agcgtacaaaaaaagataccgtcccgtccagctctccgttcccgtcctcctcgttgttttgttccgtttccccccttgcctcgctcgtcgcgtacagctggacgcctcctttctcgctgcgggctgttgccttgcctccgtcccctcccctcgtcgcctccgactccacctcccctccccggtctctgagagagggagcccggacccggagaccgccagcaagcgcgaggcagaggaggagcatggcggccccgccgtcgaggtcgcggggcgactacgaccacctgattaagctcctgctcatcggcgacagcggagttggaaagagttgcttgctgctgcggttctctgatgacacattcacgacaagttttatcaccaccatcgggttaggacggtcgagctcgatggaaagcgtgtaaaattacaaatttgggacactgctggtcaagaacgtttccgaacaattaccactgcttactacagaggagctatgggcattctgcttgtatacgatgtcacagacgaatcgtccttcgataacattaggaactggattcgcaacatagagcagcacgcatctgataatgtcaacaagatcttggtgggcaacaaggtcgatatggatgcgaagcgggtggtctccacagctcaaggtcagaagctcgcagatgaatacgggatcaagtttttcgagacgagtgcgaaaacgaaccgaaatgtggagcaggtattcttcgccatggcaagggacgtgaagcaaaggctcaccgagaccgttgccgctgcggctgagcccccgaccattcagattagcaggccagaccccgaccaggctgacgcagcctcctcgcggcggtggtcgtcgtcctgctgtaacacctgatctggcgactgccgtggcgaaatcaagcagcgtgaatcttgatgcgcgtgactggactgctaggttactgattgtcgcatgtgttcactttcattccggtgccgtgccaagccaagccgggatgtataaatttcgctgtctagtattcacctcaatcaatgtgttaactcccgctgcttcgcacgtcacgtcgtttgtttgttgagagcaaaacgtgtgtggggcagataaaaaaaaaagccctggtgggtttgctcctgtcacgtactaaacagaacgtgtctgatgattgtgtcgacggtggaacttggaagcgtgcttgtctcactattgttccgtgttttcgtccaacgccgg

SEQ ID NO: 23465 - DNA, 1237 bp, Zea Mays
ctccgttcccgtcctcctcgttgttttgttccgtttccccccttgcctcgctcgtcgcgtacagctggacgcctcctttctcgctgcgggctgttgccttgcctccgtcccctcccctcgtcgcctccgactccacctcccctccccggtctctgagagagggagcccggacccggagaccgccagcaagcgcgaggcagaggaggagcatggcggccccgccgtcgaggtcgcggggcgactacgaccacctgattaagctcctgctcatcggcgacagcggagttggaaagagttgcttgctgctgcggttctctgatgacacattcacgacaagttttatcaccaccatcggcattgatttcaaggttaggacggtcgagctcgatggaaagcgtgtaaaattacaaatttgggacactgctggtcaagaacgtttccgaacaattaccactgcttactacagaggagctatgggcattctgcttgtatacgatgtcacagacgaatcgtccttcgatagtacgcaacaacatacattaggaactggattcgcaacatagagcagcacgcatctgataatgtcaacaagatcttggtgggcaacaaggtcgatatggatgcgaagcgggtggtctccacagctcaaggtcagaagctcgcagatgaatacgggatcaagtttttcgagacgagtgcgaaaacgaaccgaaatgtggagcaggtattcttcgccatggcaagggacgtgaagcaaaggctcaccgagaccgttgccgctgcggctgagcccccgaccattcagattagcaggccagaccccgaccaggctgacgcagcctcctcgcggcggtggtcgtcgtcctgctgtaacacctgatctggcgactgccgtggcgaaatcaagcagcgtgaatcttgatgcgcgtgactggactgctaggttactgattgtcgcatgtgttcactttcattccggtgccgtgccaagccaagccgggatgtataaatttcgctgtctagtattcacctcaatcaatgtgttaactcccgctgcttcgcacgtcacgtcgtttgtttgttgagagcaaaacgtgtgtggggcagataaaaaaaaaagccctggtgggtttgctcctgtcacgtactaaacagaacgtgtctgatgattgtgtcgacggtggaacttggaagcgtgcttgtctcactattgttccgtgttttcgtccaacgccgg

SEQ ID NO: 23466 - DNA, 3779 bp, Zea Mays
ttttaattatagcttcaaacagctaactttaatacgaaacgaacatgtaatatactcgatacaaaatttacaacccaacattaggtttcatcagttcaccgtcgtaaaaagtaaaactaccggaagtttgtaactaacccaacaaaaccgccgttatcatacgcgtattaccacctatccgttgtgcttgctgttccagcctcctcacaacacaagggtccatgccctgcgccgccgccgcggcgaccccccaccccgcgtcccccgcaacggtcacagctcacctcagctcaacgcgcccagacccggcgaccccgaccctcctctccagctagtatttaccaccacccagcccccttcccgcaccgcaccaaacggctactacccctcccctcccctcccaggctcccacccccactgccttccagaaccttccgccgtccgcgatgccgacaccgcctccgcggaagaagcgcctggtccgcgcaggcctcctcgccgccgcggccggttacttcgccttcgtcctcctcttcgagctgcccctgctgccctttctggcgtcgtcctcccccgccgccaccacctcctcctcctcctcctcgctccccttccagcacccgcgccggcgggagctggaggccgcggcggcggcgttcacgtccccgttctcgcccgcccgcccctccaagcgggccttccccgccgccgccgcaccggccccgggctccacgccgcggctcccgatcttctcttccctcctcctcctcccgcggcccaatgccacggccacccccttcgacaacaccgccgccgacgccttcgccgcggccaagccgcacctcgcccacctccaggccacggccaaccccaccgccgcgtctgcgcccgcgtcgtcgccgccgccgacctgccccgcctcggtcgccgtgcaccgggagcagctcccctacgacggcgtccgcgtggtggagctcccctgcgggctggcggtgggctcccacgtcaccgtggtggcccggccccggcccgcccggcccgagtacgaccccaagatcgccgagcgcaaggacggggaggccgcggtcatggtgtcgcagttcatggtcgagctggtcggcaccaaggccgtcgacggggaggcgccgcccaggatcctgcacttgaaccccaggatccgcggggactacagccggaagcccgtcgtcgagatgaacagctgctaccggatgcagtggggacagtcgcagcgctgcgagggcttcgcctcccgccccgtcgaggacaccggtgagttgtcgtcaacctctccagcgacctccggatttgtcggggttcattttgatttgctattttgattattactttgattcttcgattaatcgtcctatgttctagctgccgtttttctggtttagttttcaattaactacaaagatcgaggtcggtacgagtacgactattaatgggtgacttgttagttacggaaattgaagccagtcaacttcagggtgtggaatagcttagcttggtggaattgggcatagaaggtacaaacttggcgcaggaaatttctagaaacggttagaattcatttccagatttgttttttctttcctgtttgcggagaaatgtgagcgaggggtctgatgccgacgcgtcccatttttaaaatcgaatggaatcttacaaggcacatattgacctgcaaccgcgttcagagctgttcagttttgacgaggcaactgacgtgggaacctgacccttcttgtctttgtttttttttcctcttattggaacataaacaatttctactgccacaacatgtgttgtgtttttaggagttcatgtgtccaatgagttccagctacttataagttacggatgattcaatgctgctaaaaccaggatttcttttacttcaagaatacaaccctgactttgctttgcaacattggcacatgattcatgtgacatgtctcactttcatgtttcagttgacgggcaactcaagtgtgagaaatggatccgtgacgatgacagcaagtcagaggaatcaaagatgaaatggtgggtcaagcgtttgattggcaggcctaaggatgtccgcatcatttggccatacccattcacggaaggcaagctatttgttatgactttaacagctggtttggaaggttaccatgttaatgttgatgggcggcatgttgcttcgtttccttaccgcactggttactctcttgaggatgcaactgcattatccctgaatggagacatcgatattgagtcgatttttgctagttctctacccaattcgcatccaagcttcgctcccgagcgataccttgagatgtctgaacagtggagagctccacctctgcccactgaacctgttgagcttttcatcggcattctttctgcagccagccattttgctgagcgtatggctgtaaggaaatcgtggatgatgtatacaaggaaatcatccaatgttgtagctcggttctttgtggctctgaatggaaagaaggaggttaacgcagagctcaagaaggaggcagagttcttccaggacattgtcatagtgccttttatcgatacctatgacctcgttgtgttgaagaccgttgccattgctgagtatggggtgcgcgtcgtccctgcaaagtacgtaatgaaatgcgacgacgacacattcgtgaggatcgattcggtactggatcaagtgaagaatgttggaaacgataaaagcgtttacgtagggagtataaactacttccatcgaccactaagatctggcaagtgggcagtaacgtacgaggaatggcctgaagcactgtatccgaattatgctaatggacctggctacgtaatttcatccgatattgctcgctacatcgtgtccgaattcgacaaccagacgcttcggctgtttaagatggaggatgtgagcatgggcatgtgggtggagaagttcaacaggacgcggcgggcggtggagatccggcacgacgtgcggttctaccagtcgggctgctacaacggctacttcacggcgcactaccagtccccgcagcacatgatctgcctgtggcggaagctgcagtccgggagtgcccggtgctgcaacgtcagatgacgcattgcgagagagagcctgattttgtactctttcttgatcaaagaggagagaaacagatggtggtggacgacgggtcggcagcccgtaagcgcagctcttctgcgatggacacagctgacgacgacccgttacgacggtgggtttgcaggaggaggttgctcttctggaccttgtgatgcgatgattctttcattcttttggtcggtggcccgtttgagctgctgattctgacagccctggtcggcgtccatggtcggggattctcttatgctgctgctgctgctaccacctgttgatatttttaggtggtagatccagtacatgaggctaagtagggctccggatcatatgggatctatccttgtgctttgcgtcaaacttctttgacctagaaattttaacttgggtgagttcggttggtaggctgtgcttgtctataaaaaatgattttctgagtttgtatttgtgttggcttatcttatatacgaacttgtgcgtgaaaaaaaaaatcaacgtgtcttcttttgttatgccattctcgttaaatagcatgccacatattcaagcaggatgatatggcatgcaatttaatggagaggtgtcatagagttttcatggggataaaattgggtacaca

SEQ ID NO: 23467 - DNA, 2356 bp, Zea Mays
cttaaatatagagatgaaaactactccatctattccaatttatagtttgcactacaacgagccaatcaaacttagtgtaaaaagaccagacaaaagagatggagtaagagttcagagtaatactgttttgggacataagagattattacatgaaagttggacccagctggtgagcctgtaagtacagtaaaaggggaaaaaataatcaaagccacagcccacagtgaacagagcaaaaggtcaaatgaactggtaaaagaaaacctgccgtagtggactagtggacagtggtcgtagcaagcagatttctacttttctcgcctccggtttcactcgctgcgtgggcagaaaccacggggcggcggtgggcaatccaccacctctctctctccagcaggccgcgcgccgcagttttctccccgggcacatgcccgtgggcacgcgtgcaggccactggccacccccacgcagaaaaaccagcggccgcgcgcaccgacccggccgacgactccggcgaccgcgcgcacacgacaaaaccccggcggcgacgacagacccacaggatcagacgactcagcgagcggaacaccccctggcgccggccgttaaagtcaagtcaagcaccggagccggtgtataaagctccggcgactggtgcccaccacggctagctgccgtcgtcgcagaagtaggagctcgcgtttctccatccgtacgtcctgcagtagtgattgggcagcatcgtcatcgatcgatcgccatgaggctccgcggcgtgctgcgcctcgtcctcgcgctcctcctcgccgccaccgccatcgtgccggtgctgctccttagcgagaacggcggcggcggcgtcgcacctgcgccgccgttcaactcctcgcgtgtcaaggccgtctcgtggcatccaaggatcttcgtgtacaaggggttcctctccgacgccgagtgtgaccacctcgtgactctggcgaagaaaaagatccagcggtccatggtggcggacaacgagtccggcaagagcgtcaagagcgaggtgcgcaccagctccggcatgttcctcgacaagcgccaggacccggtggtgagtcggatcgaggagaggatcgcggcatggacgtttcttcctcaagagaacgccgagaacatgcaggtgctgcgctacgagccggggcagaagtacgagccgcacttcgactacttccacgacagggtcaaccaggcccgcggcggccaccgctacgccaccgtgctcatgtacctgtccaccgtccgcgagggaggcgagaccgtgttccccaacgccaagggttgggagtcccagcccaaggacgccactttctccgagtgtgcacacaaaggattggcagtgaaaccggtgaaaggcgacgccgtgctcttcttcagcctgcacgccgacggcacgccggacccgctcagcctccacgggagctgcccggtgatccggggcgagaagtggtcggcgcccaagtggatccacgtcaggtcgtacgaggacgaaccccaggcagtactcgtgctccccgaggaaaccgacggcgcgcgggtgcgccgataggagcgagcgctgcgcgaagtgggccgcggcgggtgagtgcgcctggaacccggcgtacatgctcggcgccggcgatgagggggcgcctgggcagtgccgcaggagctgcggagtctgcgattcgtaggcgcgtccttgccttttctttctttcttcctttctttgtttgttttgggatgcagtattcagataactagtggctgtttttctgtacttgatgatgatgtgtacatagctagtgaaagctttcttcagatgatgatgacgatgatatgagtcggcaaccaatagatataaacgctgcagctgtttgcttctcttgctgagatatggtgccggttgaactggacagcaattggaggttggagagtggagagaatactattggagtactgccttgattattgctacttgcttcattgcttgccgccagcagtgagctagggacagggagtagtggccgagatcctacaggagcagcaacggcatctcctgcttcatccccatcgccgccaacgtgttgaacttgaaccgttgaagccagccgccgccatcaggttgaaaatgagagtctgagctagggtttgcagttttgcacaagaaaaggcagagagagatacgtacgccacctgctgaaattgagcacgataatgggctgggtcggacgcgcgcaagaaaatggcccaggtttgctttagctgccgctagaagatggcccatttaacggatttcgccggctaatagcggctaatagcggtcaccaagcaatag

SEQ ID NO: 23468 - DNA, 2088 bp, Zea Mays
gttttctccccgggcacatgcccgtgggcacgcgtgcaggccactggccacccccacgcagaaaaaccagcggccgcgcgcaccgacccggccgacgactccggcgaccgcgcgcacacgacaaaaccccggcggcgacgacagacccacaggatcagacgactcagcgagcggaacaccccctggcgccggccgttaaagtcaagtcaagcaccggagccggtgtataaagctccggcgactggtgcccaccacggctagctgccgtcgtcgcagaagtaggagctcgcgtttctccatccgtacgtcctgcagtagtgattgggcagcatcgtcatcgatcgatcgccatgaggctccgcggcgtgctgcgcctcgtcctcgcgctcctcctcgccgccaccgccatcgtgccggtgctgctccttagcgagaacggcggcggcggcgtcgcacctgcgccgccgttcaactcctcgcgtgtcaaggccgtctcgtggcatccaaggatcttcgtgtacaaggggttcctctccgacgccgagtgtgaccacctcgtgactctggcgaagaaaaagatccagcggtccatggtggcggacaacgagtccggcaagagcgtcaagagcgaggtgcgcaccagctccggcatgttcctcgacaagcgccaggacccggtggtgagtcggatcgaggagaggatcgcggcatggacgtttcttcctcaagagaacgccgagaacatgcaggtgctgcgctacgagccggggcagaagtacgagccgcacttcgactacttccacgacagggtcaaccaggcccgcggcggccaccgctacgccaccgtgctcatgtacctgtccaccgtccgcgagggaggcgagaccgtgttccccaacgccaagggttgggagtcccagcccaaggacgccactttctccgagtgtgcacacaaaggattggcaggtaattaatctcccacccaagagaatggtgcaccaggccaggccatgccatgccatgtctgtcttcaagaacggcaggagaaaggcgagaagcttcggacgacgacgctgacagattcgcttattgcttgcttgccgcgcgcgtgcagtgaaaccggtgaaaggcgacgccgtgctcttcttcagcctgcacgccgacggcacgccggacccgctcagcctccacgggagctgcccggtgatccggggcgagaagtggtcggcgcccaagtggatccacgtcaggtcgtacgaggacgaaccccaggcagtactcgtgctccccgaggaaaccgacggcgcgcgggtgcgccgataggagcgagcgctgcgcgaagtgggccgcggcgggtgagtgcgcctggaacccggcgtacatgctcggcgccggcgatgagggggcgcctgggcagtgccgcaggagctgcggagtctgcgattcgtaggcgcgtccttgccttttctttctttcttcctttctttgtttgttttgggatgcagtattcagataactagtggctgtttttctgtacttgatgatgatgtgtacatagctagtgaaagctttcttcagatgatgatgacgatgatatgagtcggcaaccaatagatataaacgctgtttgcttctcttgctgagatatggtgccggttgaactggacagcaattggaggttggagagtggagagaatactattggagtactgccttgattattgctacttgcttcattgcttgccgccagcagtgagctagggacagggagtagtggccgagatcctacaggagcagcaacggcatctcctgcttcatccccatcgccgccaacgtgttgaacttgaaccgttgaagccagccgccgccatcaggttgaaaatgagagtctgagctagggtttgcagttttgcacaagaaaaggcagagagagatacgtacgccacctgctgaaattgagcacgataatgggctgggtcggacgcgcgcaagaaaatggcccaggtttgctttagctgccgctagaagatggcccatttaacggatttcgccggctaatagcggctaatagcggtcaccaagcaatag

SEQ ID NO: 23469 - DNA, 1205 bp, Zea Mays
aaattattattttctcggtcgcgactcgcgagcggcaattggacgcatcgcatcggatctcttcctccggtcttctctgacctctgggcctctgactccgcgcccacaccgccactgcctctggcctccagccacctcccgatctggccgagctcgcctccccggaggcggcgcatggatcccgcctcgtcggtggccgccgagttttggcggccgccgtaccaccacctccgggcctcgtccgtcgtcaccgccgccgcccgctccgggggcggctccagcagccgcaggagaccgcggcgcgacgccgcggcgtcgtccgaggaggagccgtccaagctcgtttccacgtcgggcaccgccgccagcagcagcgcgggctgccaggactcggctgacccagaagcaaaacggttgaaacagatagcacctagtgaaaaaaatgacagaaggacagaagctgaaacaaattcagggaacgctagcaagtctgctgataaaaagcctgcacctaaagagccaccaaaagactacatccatgtgagggctagaagaggtcaagcaacggacagccatagcctcgcagaaagagcacgacgagagaagataagtgaacggatgaaagttcttcaagatattgtccctggatgcaacaaggttatcgggaaagcatcagtccttgatgagataataaattacatccagtctttacagcgtcaagtagagtttttgtccatgaaacttgaagcgattaatgctcatgtgagcaatgcaactgtagcttttccaaccaaagattttggtgttgcgccatataatactgctcctagcctgacgttggacccacaaacgccaagggaatacgcccagggctcgatgtcagattggcttcacatgcaggtcggcaacgcatatgaaagagtgacatgaataaaacgaggaatccataaaacaagctgaattccttgtggtagccaataaagagtaccaggatcaaccgagtccacagtaccaggtgtatgggatttgccccgaggctgctggttttcctgctgcttggtttgggaaaccgatctctcgattgtgagatacaggcaggtttgcgcacgagagtactctctcgcttgtggaccgtggttccctaattcaggacattttgttctatcttcgacgatgcggttggcatgaactgaatgccattttct

SEQ ID NO: 23470 - DNA, 1449 bp, Zea Mays
aaattattattttctcggtcgcgactcgcgagcggcaattggacgcatcgcatcggatctcttcctccggtcttctctgacctctgggcctctgactccgcgcccacaccgccactgcctctggcctccagccacctcccgatctggccgagctcgcctccccggaggcggcgcatggatcccgcctcgtcggtggccgccgagttttggcggccgccgtaccaccacctccgggcctcgtccgtcgtcaccgccgccgcccgctccgggggcggctccagcagccgcaggagaccgcggcgcgacgccgcggcgtcgtccgaggaggagccgtccaagctcgtttccacgtcgggcaccgccgccagcagcagcgcgggctgccaggactcgatagcacctagtgaaaaaaatgacagaaggacagaagctgaaacaaattcagggaacgctagcaagtctgctgataaaaagcctgcacctaaagagccaccaaaagactacatccatgtgagggctagaagaggtcaagcaacggacagccatagcctcgcagaaagagcacgacgagagaagataagtgaacggatgaaagttcttcaagatattgtccctggatgcaacaaggtgcatggtgaaccccatggattcaaagttatcgggaaagcatcagtccttgatgagataataaattacatccagtctttacagcgtcaagtagagtttttgtccatgaaacttgaagcgattaatgctcatgtgagcaatgcaactgtagcttttccaaccaaagattttggtgttgcgccatataatactgctcctagcctgacgttggacccacaaacgccaagggaatacgcccagggctcgatgtcagattggcttcacatgcaggtcggcaacgcatatgaaagagtgacatgaataaaacgaggaatccataaaacaagctgaattccttgtggtagccaataaagagtaccaggatcaaccgagtccacagtaccaggttcattttcttcttcttctcgtggtcatcgtgacgccaaagttagtttattttattcctagtttgggggcattagcgccgtagatgcgtcattccacatccatctaggagggagcactgtcgtttactgtatacggatttcgtgatgtatcccgggaaatttttgtagatcggactcgtagaagaagagattgcaattgcaatactgtgtatcactctgatgttgtccagtttgagaacttgacaggtgtatgggatttgccccgaggctgctggttttcctgctgcttggtttgggaaaccgatctctcgattgtgagatacaggcaggtttgcgcacgagagtactctctcgcttgtggaccgtggttccctaattcaggacattttgttctatcttcgacgatgcggttggcatgaactgaatgccattttct

SEQ ID NO: 23471 - DNA, 1519 bp, Zea Mays
aaattattattttctcggtcgcgactcgcgagcggcaattggacgcatcgcatcggatctcttcctccggtcttctctgacctctgggcctctgactccgcgcccacaccgccactgcctctggcctccagccacctcccgatctggccgagctcgcctccccggaggcggcgcatggatcccgcctcgtcggtggccgccgagttttggcggccgccgtaccaccacctccgggcctcgtccgtcgtcaccgccgccgcccgctccgggggcggctccagcagccgcaggagaccgcggcgcgacgccgcggcgtcgtccgaggaggagccgtccaagctcgtttccacgtcgggcaccgccgccagcagcagcgcgggctgccaggactcggctgacccagaagcaaaacggttgaaacagatagcacctagtgaaaaaaatgacagaaggacagaagctgaaacaaattcagggaacgctagcaagtctgctgataaaaagcctgcacctaaagagccaccaaaagactacatccatgtgagggctagaagaggtcaagcaacggacagccatagcctcgcagaaagagcacgacgagagaagataagtgaacggatgaaagttcttcaagatattgtccctggatgcaacaaggttatcgggaaagcatcagtccttgatgagataataaattacatccagtctttacagcgtcaagtagagtttttgtccatgaaacttgaagcgattaatgctcatgtgagcaatgcaactgtagcttttccaaccaaagattttagagaccaccgctgttgttgctgaaaattgtagattatacgaccagtacattattgaatggcattttggtgttgcgccatataatactgctcctagcctgacgttggacccacaaacgccaagggaatacgcccagggctcgatgtcagattggcttcacatgcaggtcggcaacgcatatgaaagagtgacatgaataaaacgaggaatccataaaacaagctgaattccttgtggtagccaataaagagtaccaggatcaaccgagtccacagtaccaggttcattttcttcttcttctcgtggtcatcgtgacgccaaagttagtttattttattcctagtttgggggcattagcgccgtagatgcgtcattccacatccatctaggagggagcactgtcgtttactgtatacggatttcgtgatgtatcccgggaaatttttgtagatcggactcgtagaagaagagattgcaattgcaatactgtgtatcactctgatgttgtccagtttgagaacttgacaggtgtatgggatttgccccgaggctgctggttttcctgctgcttggtttgggaaaccgatctctcgattgtgagatacaggcaggtttgcgcacgagagtactctctcgcttgtggaccgtggttccctaattcaggacattttgttctatcttcgacgatgcggttggcatgaactgaatgccattttct

SEQ ID NO: 23472 - DNA, 3134 bp, Zea Mays
ccaaacgggccaactaacaaacctgacggacacgccagccacgagagacgagaacgagacccagcccgactccaacgcctcacgttcgttgacggcttgacgccacggcctccccgggtcgccttttcccatcctgcccctctcctctcacctctacgacgcggaatcccatttttacccttctcacctcctccgctccctcccatggcttccacctccgcctcctcggcccccgtctccccctcccacccaaaccctaaccctacccccgacgcagatctcccatctgatcgccccatgcccgacgccgacggcggaagtggaggcgcctcgcccgcttccccggagaagcgggaggaggaggaggaggtgccgggggaggtggcggcggcggcggcggccgtggagcagccgaccccgcggaagacgcgccttccgcgtgcttgcaacaacaagcccaaacctcctcctccgccgccgccgcccgagcgtccgcgccgccgtgccgcggcggcgggcggcgcggacgagacgccgcaatgccgcgtggtcacgccgctcgtgtcggagcccgaggcgcccgcggagctgccccgctggcggctccgctgcatgtgggagctcggctccgtcctcaacttcctccacgtgttccggcctctgctgaacatcactggtgatttcacggctgaggagctcgaggtggcgcttatcactcccaacgagattctagatgatgtgcatatgccactgctaaagtcaattcctcctgtaactcgcatggctatgggacgtggaacctgggtgactgtcctgtgcagaaagctgaaggattggtggcattgggttgcagaaggtgatctgccaattgttgcatctcatggaactgaaattgagacgtacaaaactatagaaccagctattcgtttactaatcttgaaagcgatatgtgatatccgtgttgagcaagaggatattcggaacttcattgacagttctcttaagcatggacagaacttttctacctttcgtaaagatcggattggaggggattcccttggaatctcatactggtatgaagatgatgagattctcgggcatagattgtatcgtgaaattagacgagtagagcaggtcaagaaggagccaggaaagaggtctaggggaaaaggaggatcttcagctatttcagtcgtgtcctaccagtgggaaactgttgcgtccactttcgacgagtttgatgatgtggcagaaaaactcttttcaagtcggaacaggacagaggtttcacttggaaagaagctgaagattgaatatcttccagagatagaaaagatccataaaaagaaagagaggttgctcaaaaagcaacagagagaagctctccttcttgatagctacttgacatcagatggacttaccaccggccgttctctccgtgatagaaagcccgtgacttatacatttgatgactatgatcgctcaataaatgaagccatcaaaattacgaaaaaaagagaggagaactcagctgagcctgttgctactactgccaatagaagggtgcttcctccaagagcggaggcagcaagcaatgggaagctaaataatggtccctcaccaacaaccaacgactcggatgatggaaattcttcaaaatcagatgacgaccgagacagcgacggtgaacaagaaaatgaggcacttgatcgcagcaaccggaggaggaaaagatctcagagatacacacaggactttgttgaggctgtctcggatattgatcctaactttgacagtgacgacgatatcatgggagaagcagtgtatgatgaggaatatctgagaagtcgcaaacagaataagacatcaagcgcttctgaagaggatgaggagttccggttggaagaagatggtgaagatgatgatgaagaagaggaatattcattgagtaccagtgaagatctagaggagccgcaacggcataaaaaattggaaactcgtggccggcgaggtaccaagctgaggtcagttgatgaaatccaaacaggtctcagacgcagcaagcgttcttctcgtcctcgtattaactatcaccaatatgatttttctgactcggatacggggcctggaaaggcaaagaaatctgatgcatcagattctgaagctggctctgatgccgagaatgatatggagctctcgacatcgagtcaagagggagaggaagaagaggatgatagtcatgatgaagaaaatggtaataatgtgaatgataaaatggatgaggaccacaccgtggcagaaaataaagtagaaccagaggaggaggagcagaaggagcagccgcctatagagaagatggatgctcccagcacggaaagtagacgtgtaggaagaacattcctagatctaaacgagcttgcacctggaggtggctttgatgagagcccaagcttgacagtgaaagatgacatagacaacatttagggaataaagttttttttgatacatttgagtgctgttggtcagttttctgacttcgaagcaagggtggcagatcgatgggtttgagcttatggctgttttcattgatttgcagtaacaggacaagcgaggttccacttgaagtgactttgagcttcttcggtgcttatgtcatactcggagctgacactgagctgtccttgatggagaagatgctgcatgtattgagctgatgttgtagcctatggacatgtccattacactgactgagagtggctggcctggactggagattgctaatttgctgtatggttcataaaatccgtatcctctctgcatatttggttagtcacaaaactatgcaagataaatgatctaggtgctctgttccattaagcactgcaaaattatgtcaaatgtttggtgaatctaggtgcgcttcatgttcccagtgatgattcgtggaggctactcattactggacaaagaagcctgcttgatgactgagttgtagtgtccccaaacccaaaaccgatgatgattcgtggcggcccgtgatccatatatctccattaatatctgttatttttatatcaaaatgtattgaaaaaaaatcaaaatgtattgaaaaaatattatattcaatagatcgg

SEQ ID NO: 23473 - DNA, 3394 bp, Zea Mays
ccaaacgggccaactaacaaacctgacggacacgccagccacgagagacgagaacgagacccagcccgactccaacgcctcacgttcgttgacggcttgacgccacggcctccccgggtcgccttttcccatcctgcccctctcctctcacctctacgacgcggaatcccatttttacccttctcacctcctccgctccctcccatggcttccacctccgcctcctcggcccccgtctccccctcccacccaaaccctaaccctacccccgacgcagatctcccatctgatcgccccatgcccgacgccgacggcggaagtggaggcgcctcgcccgcttccccggagaagcgggaggaggaggaggaggtgccgggggaggtggcggcggcggcggcggccgtggagcagccgaccccgcggaagacgcgccttccgcgtgcttgcaacaacaagcccaaacctcctcctccgccgccgccgcccgagcgtccgcgccgccgtgccgcggcggcgggcggcgcggacgagacgccgcaatgccgcgtggtcacgccgctcgtgtcggagcccgaggcgcccgcggagctgccccgctggcggctccgctgcatgtgggagctcggctccgtcctcaacttcctccacgtgttccggcctctgctgaacatcactggtgatttcacggctgaggagctcgaggtggcgcttatcactcccaacgagattctagatgatgtgcatatgccactgctaaagtcaattcctcctgtaactcgcatggctatgggacgtggaacctgggtgactgtcctgtgcagaaagctgaaggattggtggcattgggttgcagaaggtgatctgccaattgttgcatctcatggaactgaaattgagacgtacaaaactatagaaccagctattcgtttactaatcttgaaagcgatatgtgatatccgtgttgagcaagaggatattcggaacttcattgacagttctcttaagcatggacagaacttttctacctttcgtaaagatcggattggaggggattcccttggaatctcatactggtatgaagatgatgagattctcgggcatagattgtatcgtgaaattagacgagtagagcaggtcaagaaggagccaggaaagaggtctaggggaaaaggaggatcttcagctatttcagtcgtgtcctaccagtgggaaactgttgcgtccactttcgacgagtttgatgatgtggcagaaaaactcttttcaagtcggaacaggacagaggtttcacttggaaagaagctgaagattgaatatcttccagagatagaaaagatccataaaaagaaagagaggttgctcaaaaagcaacagagagaagctctccttcttgatagctacttgacatcagatggacttaccaccggccgttctctccgtgatagaaagcccgtgacttatacatttgatgactatgatcgctcaataaatgaagccatcaaaattacgaaaaaaagagaggagaactcagctgagcctgttgctactactgccaatagaagggtgcttcctccaagagcggaggcagcaagcaatgggaagctaaataatggtccctcaccaacaaccaacgactcggatgatggaaattcttcaaaatcagatgacgaccgagacagcgacggtgaacaagaaaatgaggcacttgatcgcagcaaccggaggaggaaaagatctcagagatacacacaggactttgttgaggctgtctcggatattgatcctaactttgacagtgacgacgatatcatgggagaagcagtgtatgatgaggaatatctgagaagtcgcaaacagaataagacatcaagcgcttctgaagaggatgaggagttccggttggaagaagatggtgaagatgatgatgaagaagaggaatattcattgagtaccagtgaagatctagaggagccgcaacggcataaaaaattggaaactcgtggccggcgaggtaccaagctgaggtcagttgatgaaatccaaacaggtctcagacgcagcaagcgttcttctcgtcctcgtattaactatcaccaatatgatttttctgactcggatacggggcctggaaaggcaaagaaatctgatgcatcagattctgaagctggctctgatgccgagaatgatatggagctctcgacatcgagtcaagagggagaggaagaagaggatgatagtcatgatgaagaaaatggtaataatgtgaatgataaaatggatgaggaccacaccgtggcagaaaataaagtagaaccagaggaggaggagcagaaggagcagccgcctatagagaagatggatgctcccagcacggaaagtagacgtgtaggaagaacattcctagatctaaacgagcttgcacctggaggtggctttgatgagagcccaagcttgacagtgaaagatgacatagacaacatttagggaataaagttttttttgatacatttgagtgctgttggtcagttttctgacttcgaagcaagggtggcagatcgatgggtttgagcttatggctgttttcattgatttgcagtaacaggacaagcgaggttccacttgaagtgactttgagcttcttcggtgcttatgtcatactcggaggtgcttatgttatacttggaggccatgaggagggtagttttgcttttgattatgtatactacatgacggtcgcaatcgatcacagctgtattatggccaggctgatgctgcgttgaggccggtctgtaggatataaatttattgcctccacttatttagtcttaggcatggtgatgtcaatgagatcatggagggaaacctgtactccgagtgcagtgcagttcgtccgtcggcattcgcgagaccttttccacttgtagattgtaggttttgagaccgagcaggattagttctgtatctaaatctgacagtctgattttttcccccgtcacacctgtgacctgtgtagctgacactgagctgtccttgatggagaagatgctgcatgtattgagctgatgttgtagcctatggacatgtccattacactgactgagagtggctggcctggactggagattgctaatttgctgtatggttcataaaatccgtatcctctctgcatatttggtgcgcttcatgttcccagtgatgattcgtggaggctactcattactggacaaagaagcctgcttgatgactgagttgtagtgtccccaaacccaaaaccgatgatgattcgtggcggcccgtgatccatatatctccattaatatctgttatttttatatcaaaatgtattgaaaaaaaatcaaaatgtattgaaaaaatattatattcaatagatcgg

SEQ ID NO: 23474 - DNA, 1476 bp, Zea Mays
ccaaacgggccaactaacaaacctgacggacacgccagccacgagagacgagaacgagacccagcccgactccaacgcctcacgttcgttgacggcttgacgccacggcctccccgggtcgccttttcccatcctgcccctctcctctcacctctacgacgcggaatcccatttttacccttctcacctcctccgctccctcccatggcttccacctccgcctcctcggcccccgtctccccctcccacccaaaccctaaccctacccccgacgcagatctcccatctgatcgccccatgcccgacgccgacggcggaagtggaggcgcctcgcccgcttccccggagaagcgggaggaggaggaggaggtgccgggggaggtggcggcggcggcggcggccgtggagcagccgaccccgcggaagacgcgccttccgcgtgcttgcaacaacaagcccaaacctcctcctccgccgccgccgcccgagcgtccgcgccgccgtgccgcggcggcgggcggcgcggacgagacgccgcaatgccgcgtggtcacgccgctcgtgtcggagcccgaggcgcccgcggagctgccccgctggcggctccgctgcatgtgggagctcggctccgtcctcaacttcctccacgtgttccggcctctgctgaacatcactggtgatttcacggctgaggagctcgaggtggcgcttatcactcccaacgagattctagatgatgtgcatatgccactgctaaagtcaattcctcctgtaactcgcatggctatgggacgtggaacctgggtgactgtcctgtgcagaaagctgaaggattggtggcattgggttgcagaaggtgatctgccaattgttgcatctcatggaactgaaattgagacgtacaaaactatagaaccagctattcgtttactaatcttgaaagcgatatgtgatatccgtgttgagcaagaggatattcggaacttcattgacagttctcttaagcatggacagaacttttctacctttcgtaaagatcggattggaggggattcccttggaatctcatactggtatgaagatgatgagattctcgggcatagattgtatcgtgaaattagacgagtagagcaggtcaagaaggagccaggaaagaggtctaggggaaaaggaggatcttcagctatttcagtcgtgtcctaccagtgggaaactgttgcgtccactttcgacgagtttgatgatgtggcagaaaaactcttttcaagtcggaacaggacagaggtttcacttggaaagaagctgaagattgaatatcttccagagatagaaaagatccataaaaagaaagagaggttgctcaaaaagcaacagagagaagctctccttcttgatagctacttgacatcagatggacttaccaccggccgttctctccgtgatagaaagcccgtgacttatacatttgaaaaagct

SEQ ID NO: 23475 - DNA, 2544 bp, Zea Mays
ttaagtgcgtttgacattagctgattgcaagaggatattcggaacttcattgacagttctcttaagcatggacagaacttttctacctttcgtaaagatcggattggaggggattcccttggaatctcatactggtatgaagatgatgagattctcgggcatagattgtatcgtgaaattagacgagtagagcaggtcaagaaggagccaggaaagaggtctaggggaaaaggaggatcttcagctatttcagtcgtgtcctaccagtgggaaactgttgcgtccactttcgacgagtttgatgatgtggcagaaaaactcttttcaagtcggaacaggacagaggtttcacttggaaagaagctgaagattgaatatcttccagagatagaaaagatccataaaaagaaagagaggttgctcaaaaagcaacagagagaagctctccttcttgatagctacttgacatcagatggacttaccaccggccgttctctccgtgatagaaagcccgtgacttatacatttgatgactatgatcgctcaataaatgaagccatcaaaattacgaaaaaaagagaggagaactcagctgagcctgttgctactactgccaatagaagggtgcttcctccaagagcggaggcagcaagcaatgggaagctaaataatggtccctcaccaacaaccaacgactcggatgatggaaattcttcaaaatcagatgacgaccgagacagcgacggtgaacaagaaaatgaggcacttgatcgcagcaaccggaggaggaaaagatctcagagatacacacaggactttgttgaggctgtctcggatattgatcctaactttgacagtgacgacgatatcatgggagaagcagtgtatgatgaggaatatctgagaagtcgcaaacagaataagacatcaagcgcttctgaagaggatgaggagttccggttggaagaagatggtgaagatgatgatgaagaagaggaatattcattgagtaccagtgaagatctagaggagccgcaacggcataaaaaattggaaactcgtggccggcgaggtaccaagctgaggtcagttgatgaaatccaaacaggtctcagacgcagcaagcgttcttctcgtcctcgtattaactatcaccaatatgatttttctgactcggatacggggcctggaaaggcaaagaaatctgatgcatcagattctgaagctggctctgatgccgagaatgatatggagctctcgacatcgagtcaagagggagaggaagaagaggatgatagtcatgatgaagaaaatggtaataatgtgaatgataaaatggatgaggaccacaccgtggcagaaaataaagtagaaccagaggaggaggagcagaaggagcagccgcctatagagaagatggatgctcccagcacggaaagtagacgtgtaggaagaacattcctagatctaaacgagcttgcacctggaggtggctttgatgagagcccaagcttgacagtgaaagatgacatagacaacatttagggaataaagttttttttgatacatttgagtgctgttggtcagttttctgacttcgaagcaagggtggcagatcgatgggtttgagcttatggctgttttcattgatttgcagtaacaggacaagcgaggttccacttgaagtgactttgagcttcttcggtgcttatgtcatactcggaggtgcttatgttatacttggaggccatgaggagggtagttttgcttttgattatgtatactacatgacggtcgcaatcgatcacagctgtattatggccaggctgatgctgcgttgaggccggtctgtaggatataaatttattgcctccacttatttagtcttaggcatggtgatgtcaatgagatcatggagggaaacctgtactccgagtgcagtgcagttcgtccgtcggcattcgcgagaccttttccacttgtagattgtaggttttgagaccgagcaggattagttctgtatctaaatctgacagtctgattttttcccccgtcacacctgtgacctgtgtagctgacactgagctgtccttgatggagaagatgctgcatgtattgagctgatgttgtagcctatggacatgtccattacactgactgagagtggctggcctggactggagattgctaatttgctgtatggttcataaaatccgtatcctctctgcatatttggttagtcacaaaactatgcaagataaatgatctaggtgctctgttccattaagcactgcaaaattatgtcaaatgtttggtgaatctaggtgcgcttcatgttcccagtgatgattcgtggaggctactcattactggacaaagaagcctgcttgatgactgagttgtagtgtccccaaacccaaaaccgatgatgattcgtggcggcccgtgatccatatatctccattaatatctgttatttttatatcaaaatgtattgaaaaaaaatcaaaatgtattgaaaaaatattatattcaatagatcgg

SEQ ID NO: 23476 - DNA, 1316 bp, Zea Mays
cacaccagtagtcttccccacgactggtattatctgcaaatcagccatgaaacatgcagctgggagatgtcctttgctagagccatattcaagtttcaaatatctccagcttgtacagttgggccacagagcctttagtatgaaaaagatagattacaattgttttcccagtgtttaattaaactaatgcatgattttctccgattgattgaccagagactattgattctcacgctgcaaaaaaaaaaggttccatgcccaggtttccatgaattaagctgctaagtgcaatcaggcatttgctctacttgagttacccatcaagtgcccctagctccttcatatcttccaagaacgccatgtaagagtcgtcgatgcttggcggcttgggtgccgctgaaggaggccgagcgtcgcttcttatgagggtcaccgagggctttgaaatggatactgttgatagttgtggctgctgctgcacctttggttttggcttggggagagcagattctctcttgacacggactgatgcaggaacctgtagtgattcaaggcagaatgagcaatcctactacggatctctggaaaaaggaaaaaaaagatcacgcaaaaaatatgatgacagatggcataccatagccgtcagctcaggagtgtgctgtgctaatggtctcttcacaactgttggggcagccgacttcacgtatgatggctgctgaggtaactgaggccttggggcaaaggcagcaaactcatctagttgcataggaggtcctggcaaaaatggaggcctaagcatcggcggcggaccagggagcacaccatacggtggcattggcatttgagacggtggaaatcctggaggaggtggagggggcctgttaactccagccgccataagcgatggccttgaatctggtggtggcggaggtggtggaaatctcatgactccaggagctagcatatcagattgcattggaggccttggaggtaaaggtggcaaactaggtggtggaggcagcggtggtaagactctcgctgcagtatcttctttaagtccaggagtgtcctttgaagtgccagcagcctccatgtcattagattttggtggcaacccaggcggcgggggtggtggaggcaggacaactgagggctgaacagaatccgttttgctttcatttgcactagacgctgctggcggatttaaagacctctgcgatggaggtggtggcggctgaagtactgtatgaccggatacaggttctctcagaggtggaccaggaggaggaggtggtggtgggggcggtggcgggagt

SEQ ID NO: 23477 - DNA, 2324 bp, Zea Mays
aacatgtaaaagaagaagagattcatccctccgccactccccaacatgtaaaccagaccattctcctctccgaattcaataattcctccgccgcaccacgcttcctcctcctctgctccgcctcttcatccagcgagcgtcctccgattgctgacggatccctcctcgccgccgccgcgggccgaccgtggggagaggaggggaggcgggagtgatggaggccgccgaccacgggaagctctttgtcggcggcatctcgtgggagacgagcgaggaccgcctccgcgagtacttcggccgcttcggcgaggtcaccgaggccgtcatcatgcgggaccgcagcacggggcgtgcccgcgggttcggctttgtggtcttcgccgatgctgctgtcgccgagcgcgtcactacggaaaaacatatgatcgacggacgaatggtggaagcaaagaaggctgttcccagggacgaccacagtattgtgaccaagagcaacgccagcagcatagggtcacctggaccgggacgcaccaggaagatctttgttggaggcctgccctcgaacgtcacggaggctgacttcagaaggtactttgagcagtttggcgtcatcactgatgtggttgtgatgtacgaccacaacacgcagaggccgaggggctttggattcatcacctacgattcagaagacgccgtggacaaagccctgcacaagagcttccatgagctcaatggtaaaatggttgaggtcaagagggctgttccaaaggagcagtcgcctggacctgccgcacgctcacctgtgggagtggggcagaactatgctatgaacagggttcatagcttcctcaatggcttcaaccagggttacaatccgaaccccataggaggttacggcatcagggtggatggaaggtatggcttgatttcaggtgcacgaaatgggttctcttcttttggaccagggtatgggatgggcatgaatgttgaaggtgggttgggcggaacatttggtgcaagctctggtttcatcagcaactccaacgggaggcaaatgggttcgtacttcaatgcaagttcgaacagattgggtagccctattgggtaccttggccttaatgatgttccgggatcaatgttgagttccatgtctaggaatgtttggggtaatgggagtctaaactacccgagcaatcctacaaatatgagtgcttttgcttcacctaggaatgggggccaagtcagtcttcccagtgacaattggggaggtcttccttctgctcatgggatggacaacatttcaagccttgggtcagggaaccttggtcgtggaactggagataataactttggtttgccttctggtagctatggcaggaacaactcaactggtacaattggtgagcctttttctgcagcaggcaatacatatgaagtaaacaatcgagatacatatgggagcagctctatttatggtggcacagcctggagcaagtcacatgggcaactaccctgttaacaacaatcagccaagcagaggcatcagttcctagggggcggcgagtattacacttgggggtagtagaagaaagaaacacccattcagccaggcaatcccggcgcacacggctgtgaatcggtcggtgattgtcaggttaatacacaggttagtttttgtgtagctaacccagcggcgtggtttgcgaacaccgacatgctagaggtggaagctgctaggctagctagaggaaaggagcgcggatggatatacagaaacatttcgtgaaggttttgtttttgttttgttttttggtttttgcgggggtggtggtcatgttctagttttggttcgtacgcgcgtggtgaggccttttggagttttgaaatgagatgtagtagtaattgttgcggcacatattttagaagtcaagccatgttccaacagaagctggaaagagatgtccgctgtatacgggtgagcatgtataccaaccaaagggatgctgtattatacattagcctgtgtgtgtgtgtgcgtgtttttatttttgtttgatccggtttttagccatttgtcttttttttttcaatctggagattttgctgacttgctctgaattattatgcatgcagtggtgtttattttgttctcttcatgtggtgtgataatacatatgcctttttttcttcttctggtgtacataactggatccgattgtttggcatatatacgttgctgtacgtaactggatttgagttcttcacaacgtatggggaagacgaggatgatggagaggacgaccgcgtaaagagaggaagacgac

SEQ ID NO: 23478 - DNA, 2156 bp, Zea Mays
aacatgtaaaagaagaagagattcatccctccgccactccccaacatgtaaaccagaccattctcctctccgaattcaataattcctccgccgcaccacgcttcctcctcctctgctccgcctcttcatccagcgagcgtcctccgattgctgacggatccctcctcgccgccgccgcgggccgaccggtggaagcaaagaaggctgttcccagggacgaccacagtattgtgaccaagagcaacgccagcagcatagggtcacctggaccgggacgcaccaggaagatctttgttggaggcctgccctcgaacgtcacggaggctgacttcagaaggtactttgagcagtttggcgtcatcactgatgtggttgtgatgtacgaccacaacacgcagaggccgaggggctttggattcatcacctacgattcagaagacgccgtggacaaagccctgcacaagagcttccatgagctcaatggtaaaatggttgaggtcaagagggctgttccaaaggagcagtcgcctggacctgccgcacgctcacctgtgggagtggggcagaactatgctatgaacagggttcatagcttcctcaatggcttcaaccagggttacaatccgaaccccataggaggttacggcatcagggtggatggaaggtatggcttgatttcaggtgcacgaaatgggttctcttcttttggaccagggtatgggatgggcatgaatgttgaaggtgggttgggcggaacatttggtgcaagctctggtttcatcagcaactccaacgggaggcaaatgggttcgtacttcaatgcaagttcgaacagattgggtagccctattgggtaccttggccttaatgatgttccgggatcaatgttgagttccatgtctaggaatgtttggggtaatgggagtctaaactacccgagcaatcctacaaatatgagtgcttttgcttcacctaggaatgggggccaagtcagtcttcccagtgacaattggggaggtcttccttctgctcatgggatggacaacatttcaagccttgggtcagggaaccttggtcgtggaactggagataataactttggtttgccttctggtagctatggcaggaacaactcaactggtacaattggtgagcctttttctgcagcaggcaatacatatgaagtaaacaatcgagatacatatgggagcagctctatttatggtggcacagcctggaggttcgcatcatctgaggttgacatgccttcttttgttcatgatattggaaatgttgatccgactattaaatgatacatgtcagcaagtcacatgggcaactaccctgttaacaacaatcagccaagcagaggcatcagttcctagggggcggcgagtattacacttgggggtagtagaagaaagaaacacccattcagccaggcaatcccggcgcacacggctgtgaatcggtcggtgattgtcaggttaatacacaggttagtttttgtgtagctaacccagcggcgtggtttgcgaacaccgacatgctagaggtggaagctgctaggctagctagaggaaaggagcgcggatggatatacagaaacatttcgtgaaggttttgtttttgttttgttttttggtttttgcgggggtggtggtcatgttctagttttggttcgtacgcgcgtggtgaggccttttggagttttgaaatgagatgtagtagtaattgttgcggcacatattttagaagtcaagccatgttccaacagaagctggaaagagatgtccgctgtatacgggtgagcatgtataccaaccaaagggatgctgtattatacattagcctgtgtgtgtgtgtgcgtgtttttatttttgtttgatccggtttttagccatttgtcttttttttttcaatctggagattttgctgacttgctctgaattattatgcatgcagtggtgtttattttgttctcttcatgtggtgtgataatacatatgcctttttttcttcttctggtgtacataactggatccgattgtttggcatatatacgttgctgtacgtaactggatttgagttcttcacaacgtatggggaagacgaggatgatggagaggacgaccgcgtaaagagaggaagacgac

SEQ ID NO: 23479 - DNA, 1901 bp, Zea Mays
aacatgtaaaagaagaagagattcatccctccgccactccccaacatgtaaaccagaccattctcctctccgaattcaataattcctccgccgcaccacgcttcctcctcctctgctccgcctcttcatccagcgagcgtcctccgattgctgacggatccctcctcgccgccgccgcgggccgaccgtggggagaggaggggaggcgggagtgatggaggccgccgaccacgggaagctctttgtcggcggcatctcgtgggagacgagcgaggaccgcctccgcgagtacttcggccgcttcggcgaggtcaccgaggccgtcatcatgcgggaccgcagcacggggcgtgcccgcgggttcggctttgtggtcttcgccgatgctgctgtcgccgagcgcgtcactacggaaaaacatatgatcgacggacgaatggtggaagcaaagaaggctgttcccagggacgaccacagtattgtgaccaagagcaacgccagcagcatagggtcacctggaccgggacgcaccaggaagatctttgttggaggcctgccctcgaacgtcacggaggctgacttcagaaggtactttgagcagtttggcgtcatcactgatgtggttgtgatgtacgaccacaacacgcagaggccgaggggctttggattcatcacctacgattcagaagacgccgtggacaaagccctgcacaagagcttccatgagctcaatggtaaaatggttgaggtcaagagggctgttccaaaggagcagtcgcctggacctgccgcacgctcacctgtgggagtggggcagaactatgctatgaacagggttcatagcttcctcaatggcttcaaccagggttacaatccgaaccccataggaggttacggcatcagggtggatggaaggcaatacatatgaagtaaacaatcgagatacatatgggagcagctctatttatggtggcacagcctggaggttcgcatcatctgaggttgacatgccttcttttgttcatgatattggaaatgttgatccgactattaaatgatacatgtcagcaagtcacatgggcaactaccctgttaacaacaatcagccaagcagaggcatcagttcctagggggcggcgagtattacacttgggggtagtagaagaaagaaacacccattcagccaggcaatcccggcgcacacggctgtgaatcggtcggtgattgtcaggttaatacacaggttagtttttgtgtagctaacccagcggcgtggtttgcgaacaccgacatgctagaggtggaagctgctaggctagctagaggaaaggagcgcggatggatatacagaaacatttcgtgaaggttttgtttttgttttgttttttggtttttgcgggggtggtggtcatgttctagttttggttcgtacgcgcgtggtgaggccttttggagttttgaaatgagatgtagtagtaattgttgcggcacatattttagaagtcaagccatgttccaacagaagctggaaagagatgtccgctgtatacgggtgagcatgtataccaaccaaagggatgctgtattatacattagcctgtgtgtgtgtgtgcgtgtttttatttttgtttgatccggtttttagccatttgtcttttttttttcaatctggagattttgctgacttgctctgaattattatgcatgcagtggtgtttattttgttctcttcatgtggtgtgataatacatatgcctttttttcttcttctggtgtacataactggatccgattgtttggcatatatacgttgctgtacgtaactggatttgagttcttcacaacgtatggggaagacgaggatgatggagaggacgaccgcgtaaagagaggaagacgac

SEQ ID NO: 23480 - DNA, 258 bp, Zea Mays
agaatatactcaagtatcccatcaactttgggcttgcagttcattgtcggaggacgccttctccgtgcttcaacatgaaatcttgatggacaatctttgttgttcgactctcctctgacaaagtcattcaccctagaatatggaatcagcgcaagcctatccatagaatccctccagccctccaccattgaccacgagatatccgctgctgagaactccaatgatggtgggttctgaactggaagagtcaaaatttca

SEQ ID NO: 23481 - DNA, 2415 bp, Zea Mays
ctcaggctctcagcaaaccctacacccgtctgttctcgtcgtggcggccgccccccattccccatccttgtcgccgtgacgcctgacgccttctccccggaccccgatccggctccggcaatcccacgcccaggctgtccagctccaggctccaccgctccagcacgacagcaccaccagcgccgccctgcccctgtccctactccctaatcccacgcggccacacccaggtcccaggaaccagcactaggaaccagccggcgtccactccgtccagcggaaattcgaaaccagcgtccagcactagggtgaactggctgtttggacccgttctttatcttgcgtcgttcagccggcgtcctctctctctctctcgtggcgacgactgggcgacctccccgcccccgctgctctacgccaggtgcccaggtcttcgtcgggcccttcgccgaagagcagccaacagcttaggttaaaatcaaaaaaatttgtcgggcggataatacaaggcctacaccagaaggaataccctttgtgcgacaggcgaacagctgtctctctctctgcagtgttatttggtttattatatgcagttgcaggggagaaaactaaggcatgttcactgcagctagaagcacagccgcagcagatgcagcaggcttcttatacagtatttgcagcttagaagttggagtggcagctgcagctagctgcagcaaacactcctaacaataatagtggagagagactttcatgctgtttaaatttaggtgatttttgggaattaacttgcagatttattaattattatataggtaaaaagtgtagtatcagttactaggagcaagaacttgccctgatgacacagttattttggtttttctcctaatatttaaccttttgagtaagtgtgcagattaggtcttaaaaagggattgcgattaagattttattgccagagcctgagctgtagaattttccatttacacacgtgactgtacagggggtaaacttgcaggaatattacttggtgttcctataagatacacatgctgtgaaccctgatttgttttagctgcttttgttcgtttttgtctacttagccttgcacactgaggacctttattgaggtattccttgatccccatggttctagataacaaaccatgagtttacatcattatcccctctatctcaccttatattgaacatggtttttgatactattcttctttgtgcttgaaggttgccggtctgcgagttgaatcatggcggagcacttggcttcgatcttcggcactgagaaggacagggtcaactgccctttttacttcaagattggggcctgtcgtcatggggatcgctgctctcgtctgcacaacaggccaactatatcaccaactcttgtgcttgctaacatgtatcagcgccccgatatgataacccctggagttgatgctcaaggccaacctattgaccctgagaagatgcaggagcattttgaggacttctatgaggacatctatgaggagttggggaagtttggtgagattgagaatctgaatgtttgtgataaccttgctgaccacatgattgggaatgtctatgtccagttcagggaggaagagcaagcagccgcagcatacaatgctcttcaggggcgcttttactctggccgccctataattgttgagtattctcctgtgaccgacttccgtgaagcaacctgtaggcagtttgaggagaacagctgcaaccgtggtggctactgtaatttcatgcatgtgaagcaaattggcagggatctcaggaggaagctgtatgggcgttctgcttccaggaggtaccatgggagaagccgaagccgaagcccgccaccacaaaggaggggccaccgtgaccgtgatgactaccgtggtggcggcggtggtggaaggggaagaggtagcaggtatgacaggtacgatgatggagccggcagaggcggcagacatgacaggtatgatgatggaggaaggcgcaggcatggtagccccccaaggcgtgcaaggagcccagtcagggaaagcagcgaggagcgaagggccaagattgagcagtggaaccgtgaacgagagggaaaacagtgagggctactgttcgccggactctctcatccctatattctaagtatgcttgtgtggatgacattctgcctggctaagtaaaacctttttaagatcaggattcctcggttcattttatggttaaaccagacatcatttgtttccatctgtgttgtgtcggatcctttgctattatgttattttgacaattggtgtcaaatcttttgaggtgtgctattagcttatgatgatgtcagttgtggtttgtcactagatttgccatttggctttcagtcgtgtgttgcggatt

SEQ ID NO: 23482 - DNA, 1636 bp, Zea Mays
ctcaggctctcagcaaaccctacacccgtctgttctcgtcgtggcggccgccccccattccccatccttgtcgccgtgacgcctgacgccttctccccggaccccgatccggctccggcaatcccacgcccaggctgtccagctccaggctccaccgctccagcacgacagcaccaccagcgccgccctgcccctgtccctactccctaatcccacgcggccacacccaggtcccaggaaccagcactaggaaccagccggcgtccactccgtccagcggaaattcgaaaccagcgtccagcactagggtgaactggctgtttggacccgttctttatcttgcgtcgttcagccggcgtcctctctctctctctcgtggcgacgactgggcgacctccccgcccccgctgctctacgccaggtgcccaggtcttcgtcgggcccttcgccgaagagcagccaacaggttgccggtctgcgagttgaatcatggcggagcacttggcttcgatcttcggcactgagaaggacagggtcaactgccctttttacttcaagattggggcctgtcgtcatggggatcgctgctctcgtctgcacaacaggccaactatatcaccaactcttgtgcttgctaacatgtatcagcgccccgatatgataacccctggagttgatgctcaaggccaacctattgaccctgagaagatgcaggagcattttgaggacttctatgaggacatctatgaggagttggggaagtttggtgagattgagaatctgaatgtttgtgataaccttgctgaccacatgattgggaatgtctatgtccagttcagggaggaagagcaagcagccgcagcatacaatgctcttcaggggcgcttttactctggccgccctataattgttgagtattctcctgtgaccgacttccgtgaagcaacctgtaggcagtttgaggagaacagctgcaaccgtggtggctactgtaatttcatgcatgtgaagcaaattggcagggatctcaggaggaagctgtatgggcgttctgcttccaggaggtaccatgggagaagccgaagccgaagcccgccaccacaaaggaggggccaccgtgaccgtgatgactaccgtggtggcggcggtggtggaaggggaagaggtagcaggtatgacaggtacgatgatggagccggcagaggcggcagacatgacaggtatgatgatggaggaaggcgcaggcatggtagccccccaaggcgtgcaaggagcccagtcagggaaagcagcgaggagcgaagggccaagattgagcagtggaaccgtgaacgagagggaaaacagtgagggctactgttcgccggactctctcatccctatattctaagtatgcttgtgtggatgacattctgcctggctaagtaaaacctttttaagatcaggattcctcggttcattttatggttaaaccagacatcatttgtttccatctgtgttgtgtcggatcctttgctattatgttattttgacaattggtgtcaaatcttttgaggtgtgctattagcttatgatgatgtcagttgtggtttgtcactagatttgccatttggctttcagtcgtgtgttgcggatt

SEQ ID NO: 23483 - DNA, 1736 bp, Zea Mays
ccacgcgtgtagaaatcaatgcatcctttatcgatgtgatgattacaaagacttggagagttgtccaaagtgtggtgcaagtaggtacaagacgaataaagactatcgatagaaagagtgtgttgcatttgtgtataaagggaaaaagtgaaagaaaacccaaaagaagacccaacaaagttcaaaacccacaagcaaagaaaaagaagtagattattatgcgctcaaaaagatttctgctttggtgatgtggtacctccccatcgttgatcgattgaggtgtttgttagctaaccctgaggatgccaaacttatgagctggcatgcttctgatgaggacaaaaacaatggaaagcttcgacatccagccttatgtggtgccacaagcaaccatcgggacctgtcctatgtgggttctatgtgtgcgagttcatgagacaaaacagacgatacatcacaaacccttgccagtatttgtgtgaccgggcggatcctccaattccttgtgagcttgtgaggggccatcttgactatacacctcatgcttggaacattgttcctgttaaaaagaggaatggctgggtaaggatgattgttgatgcttgttaccccaccagcataaatgaagagacagatccagagtacttttgcaggtagcagcttgtgatcttatattcctatactccgtaagcagaaatcattttagcttcccttgtttccccattcttatttcctgatgtattcatatgaagtgcaccatgcttgtcctatgtcatggtcaatattgcgtttgcattgtttcagttatgctaatattgtttggcataaagaatgacctacaaaattccacaccacatatttctaaaataggcctattttaaatagataatttccaatttttagcttatatttgtttcatgtgatttcaatattattttgttatttagatacagaaggtgaacatgttgaataaaatattattatgtccacatattataaaaagaacagtattgtaaattattatatggtacgctctaccttttgttatattctatttataatatggtccatgatgctgctaacaagttggcagtcctatctttacaaaatttacctgtggttgtgtagctgttctccgtctgtacaattttcaattagaaaaattatagcagctaagaaaaatatcttctctttgtcgcagaaactgatggttaatgctggtagatactcttttaatctctactactacttatgtaactaacgtaggcgtccacagaggaaattagtgcacggttctgcctttctccacgcgctgggcttgcatccatggccgcgaatctcacccacaaagcttccatccatggctgtcgcgaccaatccatggcagccacgtcccggtccccgtaccttgggcaaatgtgtttctatgtttcctgagttgtgttggctagcccatgatataaagtgatcattgcctatctattacttagattgattaattgtctattatttactatttatttattactgatattttattgttgttattgttgtactcttgacctttgtaaatgctattgctcattcttttttaaagcagtctgcttcactaggcactaaatatgttgtaatttttagcaatggcatgctgcatcattttttgtagaaatattcaaatcgtgtccttttgattttgctctggaagacaaatggatctaggttctgggttgtgttta

SEQ ID NO: 23484 - DNA, 1389 bp, Zea Mays
agacgatacatcacaaacccttgccaggtcaatacatctcatcaaagaaagaaggaattcgggtattgtacctataggttcactgcaattaggtgtttgtaggcaccgagctgacctaatgaagtatttgtgtgaccgggcggatcctccaattccttgtgagcttgtgaggggccatcttgactatacacctcatgcttggaacattgttcctgttaaaaagaggaatggctgggtaaggatgattgttgatgcttgttaccccaccagcataaatgaagagacagatccagagtacttttgcaggtagcagcttgtgatcttatattcctatactccgtaagcagaaatcattttagcttcccttgtttccccattcttatttcctgatgtattcatatgaagtgcaccatgcttgtcctatgtcatggtcaatattgcgtttgcattgtttcagttatgctaatattgtttggcataaagaatgacctacaaaattccacaccacatatttctaaaataggcctattttaaatagataatttccaatttttagcttatatttgtttcatgtgatttcaatattattttgttatttagatacagaaggtgaacatgttgaataaaatattattatgtccacatattataaaaagaacagtattgtaaattattatatggtacgctctaccttttgttatattctatttataatatggtccatgatgctgctaacaagttggcagtcctatctttacaaaatttacctgtggttgtgtagctgttctccgtctgtacaattttcaattagaaaaattatagcagctaagaaaaatatcttctctttgtcgcagaaactgatggttaatgctggtagatactcttttaatctctactactacttatgtaactaacgtaggcgtccacagaggaaattagtgcacggttctgcctttctccacgcgctgggcttgcatccatggccgcgaatctcacccacaaagcttccatccatggctgtcgcgaccaatccatggcagccacgtcccggtccccgtaccttgggcaaatgtgtttctatgtttcctgagttgtgttggctagcccatgatataaagtgatcattgcctatctattacttagattgattaattgtctattatttactatttatttattactgatattttattgttgttattgttgtactcttgacctttgtaaatgctattgctcattcttttttaaagcagtctgcttcactaggcactaaatatgttgtaatttttagcaatggcatgctgcatcattttttgtagaaatattcaaatcgtgtccttttgattttgctctggaagacaaatggatctaggttctgggttgtgttta

SEQ ID NO: 23485 - DNA, 1523 bp, Zea Mays
ccagcaccccacgcccatgcccgaactccccaccgtgcttgggcgaggtggtggcaacaacgttgagggagatggcgacaagcaatcctagcaggggcatggcgcagagattcaaccgcctcgatcagcggagacggcaccaacccgccgtgtgctctcaggtcaatacatctcatcaaagaaagaaggaattcgggtattgtacctataggttcactgcaattaggtgtttgtaggcaccgagctgacctaatgaagtatttgtgtgaccgggcggatcctccaattccttgtgagcttgtgaggggccatcttgactatacacctcatgcttggaacattgttcctgttaaaaagaggaatggctgggtaaggatgattgttgatgcttgttaccccaccagcataaatgaagagacagatccagagtacttttgcaggtagcagcttgtgatcttatattcctatactccgtaagcagaaatcattttagcttcccttgtttccccattcttatttcctgatgtattcatatgaagtgcaccatgcttgtcctatgtcatggtcaatattgcgtttgcattgtttcagttatgctaatattgtttggcataaagaatgacctacaaaattccacaccacatatttctaaaataggcctattttaaatagataatttccaatttttagcttatatttgtttcatgtgatttcaatattattttgttatttagatacagaaggtgaacatgttgaataaaatattattatgtccacatattataaaaagaacagtattgtaaattattatatggtacgctctaccttttgttatattctatttataatatggtccatgatgctgctaacaagttggcagtcctatctttacaaaatttacctgtggttgtgtagctgttctccgtctgtacaattttcaattagaaaaattatagcagctaagaaaaatatcttctctttgtcgcagaaactgatggttaatgctggtagatactcttttaatctctactactacttatgtaactaacgtaggcgtccacagaggaaattagtgcacggttctgcctttctccacgcgctgggcttgcatccatggccgcgaatctcacccacaaagcttccatccatggctgtcgcgaccaatccatggcagccacgtcccggtccccgtaccttgggcaaatgtgtttctatgtttcctgagttgtgttggctagcccatgatataaagtgatcattgcctatctattacttagattgattaattgtctattatttactatttatttattactgatattttattgttgttattgttgtactcttgacctttgtaaatgctattgctcattcttttttaaagcagtctgcttcactaggcactaaatatgttgtaatttttagcaatggcatgctgcatcattttttgtagaaatattcaaatcgtgtccttttgattttgctctggaagacaaatggatctaggttctgggttgtgttta

SEQ ID NO: 23486 - DNA, 1420 bp, Zea Mays
ccccacgcccatgcccgaactccccaccgtgcttgggcgaggtggtggcaacaacgttgagggagatggcgacaagcaatcctagcaggggcatggcgcagagattcaaccgcctcgatcagcggagacggcaccaacccgccgtgtgctctcagtatttgtgtgaccgggcggatcctccaattccttgtgagcttgtgaggggccatcttgactatacacctcatgcttggaacattgttcctgttaaaaagaggaatggctgggtaaggatgattgttgatgcttgttaccccaccagcataaatgaagagacagatccagagtacttttgcaggtagcagcttgtgatcttatattcctatactccgtaagcagaaatcattttagcttcccttgtttccccattcttatttcctgatgtattcatatgaagtgcaccatgcttgtcctatgtcatggtcaatattgcgtttgcattgtttcagttatgctaatattgtttggcataaagaatgacctacaaaattccacaccacatatttctaaaataggcctattttaaatagataatttccaatttttagcttatatttgtttcatgtgatttcaatattattttgttatttagatacagaaggtgaacatgttgaataaaatattattatgtccacatattataaaaagaacagtattgtaaattattatatggtacgctctaccttttgttatattctatttataatatggtccatgatgctgctaacaagttggcagtcctatctttacaaaatttacctgtggttgtgtagctgttctccgtctgtacaattttcaattagaaaaattatagcagctaagaaaaatatcttctctttgtcgcagaaactgatggttaatgctggtagatactcttttaatctctactactacttatgtaactaacgtaggcgtccacagaggaaattagtgcacggttctgcctttctccacgcgctgggcttgcatccatggccgcgaatctcacccacaaagcttccatccatggctgtcgcgaccaatccatggcagccacgtcccggtccccgtaccttgggcaaatgtgtttctatgtttcctgagttgtgttggctagcccatgatataaagtgatcattgcctatctattacttagattgattaattgtctattatttactatttatttattactgatattttattgttgttattgttgtactcttgacctttgtaaatgctattgctcattcttttttaaagcagtctgcttcactaggcactaaatatgttgtaatttttagcaatggcatgctgcatcattttttgtagaaatattcaaatcgtgtccttttgattttgctctggaagacaaatggatctaggttctgggttgtgttta

SEQ ID NO: 23487 - DNA, 1181 bp, Zea Mays
catgcccgaactccccaccgtgcttgggcgaggtggtggcaacaacgttgagggagatggcgacaagcaatcctagcaggggcatggcgcagagattcaaccgcctcgatcagcggagacggcaccaacccgccgtgtgctctcaggtctgagatccctgcttttagatccccttcttcctccctttgctcccgaagcgcgtccccttcttcctccctttgcgctccctttgttctcgctttgtttgtttctactgctttggtggttgtgaccgaagcacttctcttggaagaacacgtagagcttttgttagcttgaggaaggagcagccttttgtctgtacttgttctgctgggaacttgggcaacaacaatgaagctaagcaggccaatattctttctggcacgttgattttgctggtttgtgtaataggtcaatacatctcatcaaagaaagaaggaattcgggtattgtacctataggttcactgcaattaggtgtttgtaggcaccgagctgacctaatgaagtatttgtgtgaccgggcggatcctccaattccttgtgagcttgtgaggggccatcttgactatacacctcatgcttggaacattgttcctgttaaaaagaggaatggctgggtaaggatgattgttgatgcttgttaccccaccagcataaatgaagagacagatccagagtacttttgcaggcgtccacagaggaaattagtgcacggttctgcctttctccacgcgctgggcttgcatccatggccgcgaatctcacccacaaagcttccatccatggctgtcgcgaccaatccatggcagccacgtcccggtccccgtaccttgggcaaatgtgtttctatgtttcctgagttgtgttggctagcccatgatataaagtgatcattgcctatctattacttagattgattaattgtctattatttactatttatttattactgatattttattgttgttattgttgtactcttgacctttgtaaatgctattgctcattcttttttaaagcagtctgcttcactaggcactaaatatgttgtaatttttagcaatggcatgctgcatcattttttgtagaaatattcaaatcgtgtccttttgattttgctctggaagacaaatggatctaggttctgggttgtgttta

SEQ ID NO: 23488 - DNA, 1242 bp, Zea Mays
cccgaactccccaccgtgcttgggcgaggtggtggcaacaacgttgagggagatggcgacaagcaatcctagcaggggcatggcgcagagattcaaccgcctcgatcagcggagacggcaccaacccgccgtgtgctctcaggtctgagatccctgcttttagatccccttcttcctccctttgctcccgaagcgcgtccccttcttcctccctttgcgctccctttgttctcgctttgtttgtttctactgctttggtggttgtgaccgaagcacttctcttggaagaacacgtagagcttttgttagcttgaggaaggagcagccttttgtctgtacttgttctgctgggaacttgggcaacaacaatgaagctaagcaggccaatattctttctggcacgttgattttgctggtttgtgtaataggtcaatacatctcatcaaagaaagaaggaattcgggtattgtacctataggttcactgcaattaggtgtttgtaggcaccgagctgacctaatgaagtatttgtgtgaccgggcggatcctccaattccttgtgagcttgtgaggggccatcttgactatacacctcatgcttggaacattgttcctgttaaaaagaggaatggctgggtaaggatgattgttgatgcttgttaccccaccagcataaatgaagagacagatccagagtacttttgcagaaactgatggttaatgctggtagatactcttttaatctctactactacttatgtaactaacgtaggcgtccacagaggaaattagtgcacggttctgcctttctccacgcgctgggcttgcatccatggccgcgaatctcacccacaaagcttccatccatggctgtcgcgaccaatccatggcagccacgtcccggtccccgtaccttgggcaaatgtgtttctatgtttcctgagttgtgttggctagcccatgatataaagtgatcattgcctatctattacttagattgattaattgtctattatttactatttatttattactgatattttattgttgttattgttgtactcttgacctttgtaaatgctattgctcattcttttttaaagcagtctgcttcactaggcactaaatatgttgtaatttttagcaatggcatgctgcatcattttttgtagaaatattcaaatcgtgtccttttgattttgctctggaagacaaatggatctaggttctgggttgtgttta

SEQ ID NO: 23489 - DNA, 716 bp, Zea Mays
tccccaccgtgcttgggcgaggtggtggcaacaacgttgagggagatggcgacaagcaatcctagcaggggcatggcgcagagattcaaccgcctcgatcagcggagacggcaccaacccgccgtgtgctctcaggtcaatacatctcatcaaagaaagaaggaattcggatattgcacctataggttcactgcaattaggtgtttgtaggcaccgagctgacctaatgaagtatttgtgtgaccgggcggatcctccaattccttgtgagcttgtgaggggccatcttgactatacacctcatgcttggaacattgttcctgttaaaaagaggaatggctgggtaaggatgattgttgatgcttgttaccccaccaacataaaggaagaaacagatccagagtacttttgcaggcatccacagaggaaattggtgcacggttctgcctttctgcctttctccacgcgctgggcttgcatccatggccgcgaatctccgccgtgaatctcgcccacaaagcttccatccatggctgccgcgaccaatccatggcagccgcgcctcggtccccgtaccttgggcaaatgtgtttctatgtttcctgagttgtgttggctagcccatgatataaagtgatcattgcctatctattacttagattgattaattgtccattatttactatttatttgttactgatattttattgttgtta

SEQ ID NO: 23490 - DNA, 872 bp, Zea Mays
cccaccgtgcttgggcgaggtggtggcaacaacgttgagggagatggcgacaagcaatcctagcaggggcatggcgcagagattcaaccgcctcgatcagcggagacggcaccaacccgccgtgtgctctcaggtcaatacatctcatcaaagaaagaaggaattcgggtattgtacctataggttcactgcaattaggtgtttgtaggcaccgagctgacctaatgaagtatttgtgtgaccgggcggatcctccaattccttgtgagcttgtgaggggccatcttgactatacacctcatgcttggaacattgttcctgttaaaaagaggaatggctgggtaaggatgattgttgatgcttgttaccccaccagcataaatgaagagacagatccagagtacttttgcagaggaaattagtgcacggttctgcctttctccacgcgctgggcttgcatccatggccgcgaatctcacccacaaagcttccatccatggctgtcgcgaccaatccatggcagccacgtcccggtccccgtaccttgggcaaatgtgtttctatgtttcctgagttgtgttggctagcccatgatataaagtgatcattgcctatctattacttagattgattaattgtctattatttactatttatttattactgatattttattgttgttattgttgtactcttgacctttgtaaatgctattgctcattcttttttaaagcagtctgcttcactaggcactaaatatgttgtaatttttagcaatggcatgctgcatcattttttgtagaaatattcaaatcgtgtccttttgattttgctctggaagacaaatggatctaggttctgggttgtgttta

SEQ ID NO: 23491 - DNA, 1147 bp, Zea Mays
attcaaccgcctcgatcagcggagacggcaccaacccgccgtgtgctctcagtatttgtgtgaccgggcggatcctccaattccttgtgagcttgtgaggggccatcttgactatacacctcatgcttggaacattgttcctgttaaaaagaggaatggctgggtaaggatgattgttgatgcttgttaccccaccaacataaaggaagaaacagatccagagtacttttgcaggtagcagcttgtgatcttatattcctatactccgtaagcagaaatcattttagcttcccttgtttccccattcatatttcctgttgtattcatatgaagtgcaccatgcttgtcctatgtcatggtcaatattgcgttagcattgtttcagttatgctaatattgtttggcataaagaatgacctacaaaattccacaccacatatttctaaaataggcctattttaaatagctaatttccagtttttagcttatatttgtttcatgtgatttcagtattattttgttatttagatgcagaaggtgaacatgtggaatagaatatattatatccacatattataaaaagaacagtattgtaaattattatatggtacgttctaccttttgttatattctatttataatatgttccatgatgatgctaacaagttggcagtcctatctttacaaaatttacccgtggttgtgtaggtgttctccgtctgtacaattttcatttagaaaaattatagcagctaagaaaatatcttccctttgtggcaggaacttatggttattgctggtagatactcttttaatctctactactacttatgtaactaacgtaggcatccacagaggaaattggtgcacggttctgcctttctgcctttctccacgcgctgggcttgcatccatggccgcgaatctccgccgtgaatctcgcccacaaagcttccatccatggctgccgcgaccaatccatggcagccgcgcctcggtccccgtaccttgggcaaatgtgtttctatgtttcctgagttgtgttggctagcccatgatataaagtgatcattgcctatctattacttagattgattaattgtccattatttactatttatttgttactgatattttattgttgtta

SEQ ID NO: 23492 - DNA, 871 bp, Zea Mays
tgcgtaaacccgcgtacgcgccccacaacgtgggcccgccacccagggttttccgtccatttctgaccccagtcgcttcgcctataaatgcggcgtgcgggcgccccgagcgaggggccaccaaagaaatcttgcaatccacccctcgaaagaaaacctcaatcaacaccagaagctctcgatcccaccgaggaagaagagaggaatggcgtccgaggagggagtcgtgatcgcctgccacaccaaggccgacttcgacgcccacatggccaaggccaaggaggccggcaagctggtgatcattgacttcacggcctcctggtgcggcccctgccgcttcatcgcgccactgttcgtcgagcacgccaagaagttcacccaggctgtgttcctgaaggtggacgtggacgagctgaagttgccgcggcctacgatgtcgaggcgatgccgaccttccacttcgtcaagaacggggtgacggtggagaccgtcgtcggtgccaggaaggagaacctcctggcccagatcgagaagcactgcgccgcggccgtgcctgctgcgtagagaggatggagaccagcacagcacgtggcggtggcggttgtcttgtcgttttcagtttgggcttgtcagcgctgtggctgggtggtcgattgttgtgaactggagcatgcagttctaatactttggaatttggatgtctggcttcgttctgttatgatgatgatgatggattgatggtgatggcatggcaacgctgctaatccctgcactagctagagtgctagaccatggtgacagtgggatcacattgcgctgcaaaatgaaaattttaatggctatgtcaactgctggtacatttccatctaat

SEQ ID NO: 23493 - DNA, 2781 bp, Zea Mays
ttcctgtgactcgactcgatccatcgatattgcagagaagaccaggcctcgtctgtctagctgatgtgatgaacatgcatcaaccttgctttttacagtatctcctcctcatcctcgtgcctctgctgctgtctgcctctgcttatgatagatcaggtgagttcatcttcgatggtttctctggcaacgatctaataaccatggatgctgcttctgtcaccaatggcctcttgagcctcactagcgggcagaaggaattgagaggtcacgctttctatgctttccctctcgatttcacaagtgccgccgtcccaaatagctccgccgttctgtccttctctacaacctttgtctttgccatcatcggcccatatgatgatttgagtggccatggtcttgcctttgtgctttcttccaccaatgatttgtttactgccttgcctagccagtacctaggccttctcaattcatggaatgatggtaactcatcaaatcatcttcttgcaatcgagcttgataccatacagagcacccagttcaatgacatcaacgacaaccacattgggatcgacatcaatagcctgtcctccgttgcctcacacactgcaggctactacacctccaatggagagtttcatccgctgaaacttataagtagaaaaccgatgcaggtgtgggtggactatgacagcaaccatatcatgttgaatgtcacaatagcaccttacttcatgtcgtccaccaaacccagcaggccactgctctcgactatattcaatctttcctctattttgccaaccgcaacagtatacgctgggttttcctccgcgactggcacacttaactgcaagcattacgttcttggctggagcttcaagctcaacggagaagctgcatcactcaactactccgccttatctgtcaagactatccaagaactcgcacaacaagttccaactagcgatcacccaggcagctacaaggttctgatatgcaaaattctcttaccgatcgttgcaattttcgtacttgtttctgctgttcttgttaaggtccacatgaagaggcgatcacaagaaagagctgaactagactggcagagggagtatgggcctccatctttcacctacaaagaattgttggccgccactcatggattcaaggacaagatgcttcttggtagaggaggctttgggagtgtgtacaaaggagtgatgcctatctctaagcagatagctgctattaagcgagtgtcgccggagtcaaggcaagggatgagggaattcatggccgagatcaccatcctcggtcatcttcgccaccgcaatctggtgcagctgattgggtattgcagccataagcaacatcttcttttggtctacgactacatgccaaatggaagccttgactgctatttgcatactcaagatcatggcaacaccaatctatgctgggctcaaagattccacatcatcaaaggtataggtatagcatctggtctcttctacctccacgaggactgggagcaggttgtcatccaccgggacatcaagaccagcaatgtccttctcgatagcgagatgaatgcgaggctaggtgattttggccttgcaagatcccatgatcatggtgctgatgctcacaccacgcatgtggcaggtacgtacggttacattgctcccgagttggccaggcttggcaaggcaaccaaagcaactgacatctttgccttcggcgtgttgatgatggaggtcacctgtgcaatacggccaatatgggtgaacaccaccgatggggagcctctggccctagcagactgggtgcttgctgcatggcaaggtggttccatcaccgatgccgtcgacccaagactggatagttatgtggatgaggagatagagttagtcctgaaacttggcttgctttgttcacatccctcgccaaacgcgaggccttgcatgcgcctcgtcatgcagtacctgcaaagcgacacaccactcccatcagactttcaaccgaatagtttactgagcattggtgtgattcaagatgaaatgcatgatcagcgagccatgtcatgtccatcagctgctataaccgatctttccaaagggagataacatcgctgtgttacttggcaataatcatctgcaatgtgctcttgcttagggctagtttggaagcaaggataatggaggagattgagagactacaatcccatactattcaattttaaataatgagggctagtttaggaactacatttttctaaggggtttctattttcctcagggaaaatgaaaatcccttaaaaatgaggtttacaaactaaccttgagggattctagtctccttgatcctctctattccagccattagagctagtttgaaaactcaaatctccttcgggattgaatgagattggagaggaaatcagttcatttccacctcaatcctctccaatcccaaaggggatatgaggttcccaaagtagcccttagtgttggtactgctactgcttatttgatgtgctattctatggcagagtttcgatttacttggagtaatgtgtcaaatcctatgacgttgttgtattactatgaacatctttcgtctgagattatccagctactattcataacgtcaatatactagatgcagtacccaaatgtactaaatattgtacaactgtaggtctggcctctcggaatgccgtagaattttggtttaatttcatgcttcctgattattaccatggacatctaagagcttccacgagtg

SEQ ID NO: 23494 - DNA, 359 bp, Zea Mays
tctttctaaaccctacccgactccgccgccgctcccgctccgccccagcgcatcgcccgccgccacagcgtaccgcgacctcatctatcaccttcagctttcaatcatggcggacgtcgatgtcgaaccggaggttgccgccggagctcccaagaagaggacgttccgcaagtacagctaccgcggcgtcgacctagatgcgcttctcgacatgtccactgacgacctcgtccagctcttccccgcgcgcgccaggagaaggttccagaggggtctgaagaggaagcccatggcgctcatcaagaaactgcgcaaggcgtctgctgttttgtgacctgccttgtatcaatcataccatt

SEQ ID NO: 23495 - DNA, 1580 bp, Zea Mays
actaccgtgcgcggctatataagctgagattccgacgcgaacgtctttctaaaccctacccgactccgccgccgcccgccgctccgcctcagcgcatagcccgccgcgacctcatcgatcaccttcaactttcaatcatggcggacgtcgatgtcgaaccggaggttgccgccggagctcccaagaagaggacgttccgcaagtacagctaccgcggcgtcgacctagatgcgcttctcgacatgtccacggacgacctcgtccagctcttccccgcgcgcgccaggagaagaggggtctgaagaggaagcccatggcgctcatcaagaagctgcgcaaggcggtcagtttccaaccgcttagttttcattaccactttttgttagcgtgttccgatcaagataagtgcgtggatcgttatgctgtcatgatttacccgtacgatatgaggtgtgatcttggtgtcaaaattttgatcaaatctcagcgcctattgttgtttagtgtaaatatcgtcttgaaagaagatgcaattaatcaaccagaagactgtttacttgaatgcttggcaaggttgctagtatgagtgttgcaattacaaatgtcgtagcaaggttgctagtattgactgtagcaattacaaatgttgaatcttgttatctatgtctagaaggagaatttgttgtattttgtagagctcctatatcatttgttctctcttttctctagacaaataaggttgttggtttagaaattgcttactgaatggtgcatacttctccattttctttgttatgtagtctgctgttttgtgacctgccttgtatcaatcataccattgttgtgtctgccgaatactattgggatattgataaatcaaagtttctatcctgaatgtacagtatgctagctgcagtgccttctgttctgtgccaggtagatgcggtcaatgcaagattgtgtttatcagttatcatctgtggaagtttgttttcttatacttgttactcaatttcctcacgagctatatcccactgtcctgaacagaaaaaagatgctcctgctggtgagaaaccagagccagtcaagacacatctccgtaacatgatcattgtccctgagatgattggaagcattgttggtgtctacaacggcaagaccttcaaccaggttgagatcaagcctgagatgatcggccactaccttgctgagttctccatctcctataagccggtcaagcatggcaggcccggtatcggtgccacccactcctcgcggtttattcctctgaaatgagctgttacccggctctgtagtctcccaagagtcagttggcaatgttcgttcagcttttctacttgttttgaacaagttaaatgcccaagatattttgttttgttccattccagctcaagaattcaaagctaagcattgcacaattatgctgttttgttggaagtttttgagttaatcatatctaagctgagttgctattttgggttgtttattcatgaaagtttgaagaatatacttacaattttggggtgccgcctgccgcgtgtggcttgattgaaatacta

SEQ ID NO: 23496 - DNA, 2039 bp, Zea Mays
cgtgcgcagctatatataagctgagattccgacgcgcacctccttctaaaccctacccgactccgccgccgctccgccgccgctccgcctcagcgcatcgccctccgccacagcgtaccgcgacctcatcgatcaccttcaactttcaatcatggcggacgtcgatgtcgaaccggaggttgccgccggcgctcccaagaagaggacgttccgcaagtacagctaccgcggcgtcgacctagatgcgcttctcgacatgtccacggacgacctcgtccagctcttccccgcgcgcgccaggagaaggttccagaggggtctgaagaggaagcccatggcactcatcaagaagctgcgcaaggcggtcagtttccaaccgcttagttttcattaccactttttgttagcgtgccccgatcaagataattgcgtggatctgttatggtgccattattaacgatgcttattagattcttttttttctattcttatgtctttcgtgttcagctagaagaattcgagaaaaccgaaatgtgtcttctcgaatgagtttgatgcatcttctcttaattttacccatacgatatgaggtgtgatcttggtgtcaaaattttgagcaaatctcagtgcctattgttgtatagtgtaaatatcgtcttgaaatgatatgctattaatcaaccagaaggctggttacttgaatgcttggcaaggttgctattattgagtgttgcaattacaaatgtcgtggcaatgttgctagtattgagtgtgtagcaattacaaatgttgaatcttgttatctatgtctagaagcagaagttgctgtattttgtagagcttctatatcatttgttctctcttttctctagacaaataagcttttggtttagaaggtgcaagtaaatatacttttgaaattgcttctgaatggtgcatactttttcgttttcgtatttatgtagtctgctgttttgtgacctgcctttgtttcaatcagactattgttgtgtctgcctaatactattgggatattgataaatcaatttttctatcctgaatgtacagtatgctagctgtagtgccttctgttctgtgccaggtagatgcggtcaatgcaagattgtgtttaccagtcatcatctgtggaagtttgtttacctatacttgttacacaatttcctcacgagctatatcccactgtcctcaacagaaaaaggatgctcctgctggtgagaagccagagccagtcaagacacatctccgtaacatgatcattgtccctgagatgattgggagcattgttggggtctacaacggcaagacattcaaccaggttgagatcaagcctgagatgatcggccactaccttgctgagttctccatctcctataagccggtcaagcatggcaggcccggtatcggtgccacccactcctcgcggtttattcctctgaaatgagctgttacccgtctctgtagtctcccaagagtccgttggcaatgtccattcagcttttctacttgttttgaacaagttaaatgcccaagacattttgttttgttccattccagctcaagaattcaaagctaagcattgcacatttatgctgttttgttggaggtatttgagttaatcatacctaagctgagttgcaacgttcttgtttttttccttgattttggattgtttattcctgaaagtttaaagaacatccttacaattttgtggtgccgcgtgtggctttgaaatatgacggtgccaatttattgggtggccccgttaacattgtatcttgaccagatgtagccttgttggcaagcacttgacactgacccttagttgcctctcctagtgatggatagctgctggtaatttgtagcaccaacatttcaagttttgtttggttgtgagcaatgaaaaagctgctcggagctaatatcgttcgtatttaattcgattacatccatatgcttattaggttcttgtcgtttttattctagagcaaagcgtatatgttggctcccaaaaataaaaa

SEQ ID NO: 23497 - DNA, 782 bp, Zea Mays
cgtgcgcagctatatataagctgagattccgacgcgcacctccttctaaaccctacccgactccgccgccgctccgccgccgctccgcctcagcgcatcgccctccgccacagcgtaccgcgacctcatcgatcaccttcaactttcaatcatggcggacgtcgatgtcgaaccggaggttgccgccggcgctcccaagaagaggacgttccgcaagtacagctaccgcggcgtcgacctagatgcgcttctcgacatgtccacggacgacctcgtccagctcttccccgcgcgcgccaggagaaggttccagaggggtctgaagaggaagcccatggcactcatcaagaagctgcgcaaggcgaaaaaggatgctcctgctggtgagaagccagagccagtcaagacacatctccgtaacatgatcattgtccctgagatgattgggagcattgttggggtctacaacggcaagacattcaaccaggttgagatcaagcctgagatgatcggccactaccttgctgagttctccatctcctataagccggtcaagcatggcaggcccggtatcggtgccacccactcctcgcggtttattcctctgaaatgagctgttacccgtctctgtagtctcccaagagtccgttggcaatgtccattcagcttttctacttgttttgaacaagttaaatgcccaagacattttgttttgttccattccagctcaagaattcaaagctaagcattgcacatttatgctgttttgttggaggttaacg

SEQ ID NO: 23498 - DNA, 2352 bp, Zea Mays
gactgtcttcaacggtcaccgcagccctccccctcccctaacactgtagctgatataggggctacagtgcgcccccttccccttcaccgacgtcctcctcctcctcctcctctcccttccctattctttctctcacacgctaaatggatgggcacgctacgccgtattcctcccccgcagccgcttccttcgcccacacgcccccgcgctcggaatactccgaggagggtgctcgaggcgaaccaagggcgatggttcatctcgctttcgtctcgctgcgtgcgctctctgtcactccccctctctctcctcatcagatccggccacttcctgctcgcctcgccaccggtcccgcgccccggaaccctagagctctccccgcggcagggccgccggagtccccgggcgcgtggagaaaatggaggcggcgctagaggcggcgtgtcaaggacaccaaggagcgtctggccggggtcaagcggctgcacgaggcgcttgacgccgcggcgcggcgcgcggcggccgaggtcaccacgctggtggacacctgcatggatctgacgcgggatgccaacttccgcatcgcccagggcggcctccaggcgctctccgtcgccgccgtcgtcgccgacgaccacttcaagatccacctcaacgccctcgtccccgccgccgtcgagcgcctcgacgacggcaagcaacccgtccgcgacgccgcgcgacagctcctcatcacgctcatggaggtttcttcaccaacaatcatagttgaaagagctggtagttatgcatggactcataagatttggagggtgagggacgagtttgtacgtacggtggcatctgcagttgggctatttgcttctacggagatttccttgcaacgagttttgctttcacctgtcctgcaactaatgaatgattcgaaccaaagtgttcgagatgctgctatctcttgtattgaggttagttgattccatattcgatactgtatagacctgtttcagccgacatttttcttttttcccttacacccatgatgactggtatgatctctatttctattgatcttgttcaatttcccattagttccatcccacatttacaagctggagagactgaatcattttgtatgacaacattcattgtagctccaagcccctttgcttctagttgaattgttttagtcccttgtgctcagattcatcttttctttcatctaaactattcagtgttcacagttattggctgggacacacacctgctatctaggcagcataaagtttttctagtaagccttcatttgtttttcactacaggagatgtacaagcacatgggatcacaatttcatgaagagttgcagcgccataatctgccttcatatatgctaaaagaaataaattcaaggttggataaaatagaaccaaaggttcgatcatctgatacagcaatgcagtataaggctgtagagtctagaggcaatgctgggatgtagcctgttggtagtgggacaccttcaggttctgttattgatctggaaaatgaggaatcaggttcaaaaggtaaaaggccattaggatgggactccatgaaagcatcaaggaagaaggcaatgtccagttcctcccagtctactgactaccttttaagaattcatgacattcaaatagcaagactgaagcaaagtgaagaaaaatcaggtaagaaacaacagaatattgagttcttgaaggaagttgaactgaaaaagttggaggtccaaaccaaggaactagaaatgcagcaaaccaaaatgatgattgaagaaaggatccgaaaggacgcagagctgaaggaactcctagctatggaatgttttaccagaggatgtgagacctgtatacatcgcgaggagaaaaggtttaatcgagtttttcatcaacaatcctgtctgaagagtactattgtatttcataatttgttgcgaacctagtgtcggcgtaacgtggtccggtgtgttcggacatatgtcatttcgagatttttgaacatttgcttaattgtttgagaacagtagcttggtttttgaactcgtgtcgtgtactagaagattgcgaaatttttattattaaaaaacatataattccaactatttatgactaacgtatttatattaattacgaagtttgctaattaattgtatactaagtgacggtcgcgcactgttcatagagcaaataaaaataaaataaatattggatggtagttgagttagttgatgatgaaaatataaaatattggtgtggtgggatatagagatttgatataaggggaaccgctgtagagtatggagatataggaggaaagagaac

SEQ ID NO: 23499 - DNA, 3015 bp, Zea Mays
gggctacagtgcgcccccttccccttcaccgacgtcctcctcctcctcctcctctcccttccctattctttctctcacacgctaaatggatgggcacgctacgccgtattcctcccccgcagccgcttccttcgcccacacgcccccgcgctcggaatactccgaggagggtgctcgaggcgaaccaagggcgatggttcatctcgctttcgtctcgctgcgtgcgctctctgtcactccccctctctctcctcatcagatccggccacttcctgctcgcctcgccaccggtcccgcgccccggaaccctagagctctccccgcggcagggccgccggagtccccgggcgcgtggagaaaatggaggcggcgctagaggcggcgtgtcaaggacaccaaggagcgtctggccggggtcaagcggctgcacgaggcgcttgacgccgcggcgcggcgcgcggcggccgaggtcaccacgctggtggacacctgcatggatctgacgcgggatgccaacttccgcatcgcccagggcggcctccaggcgctctccgtcgccgccgtcgtcgccgacgaccacttcaagatccacctcaacgccctcgtccccgccgccgtcgagcgcctcgacgacggcaagcaacccgtccgcgacgccgcgcgacagctcctcatcacgctcatggaggtgagctcctttcgtcggcgctctcagtggcctgtcgtctctcctgggaaatgcatgtagctggggaggtagattaagttgcgagttcgaactaagagatcgagcaggagcagattggggatttgaggcttgtttttttaggtaggtcgggtggggcacggtacattgcatagttgtgctgaagtgaggaatccaaaggtctattcggctgaccattatagattgacatgcattacatttaaatggatcaatggtctaacatttttgtaggaatcgtgtgctcttgggctcgactgtctcgctaagttgaacttctagtggcatatcttattcttctgtgattttggttctagcaaactaagataaatttgggattcaagtaaagatttggctgcttccctgtatgcattctgatatagataattcttttatcgtttttaccctttagcattagaactaggatctctttgggagccgtgatttttcataaaacgtatcagtgcttcaatctttggctgtctgcaatgaaaatgacctttaaattctgatccctttttttactagtcaatgttttatcgcagtatattaagatagtattcataaatcatgttacatatgtactttatcctttaactatcgaaacattcaagtcaatcatgtttggtgtgttccagagtttaggactgttatcttgcaatatttttgattgtccaaccctcaggtttcttcaccaacaatcatagttgaaagagctggtagttatgcatggactcataagatttggagggtgagggacgagtttgtacgtacggtggcatctgcagttgggctatttgcttctacggagatttccttgcaacgagttttgctttcacctgtcctgcaactaatgaatgattcgaaccaaagtgttcgagatgctgctatctcttgtattgaggttagttgattccatattcgatactgtatagacctgtttcagccgacatttttcttttttcccttacacccatgatgactggtatgatctctatttctattgatcttgttcaatttcccattagttccatcccacatttacaagctggagagactgaatcattttgtatgacaacattcattgtagctccaagcccctttgcttctagttgaattgttttagtcccttgtgctcagattcatcttttctttcatctaaactattcagtgttcacagttattggctgggacacacacctgctatctaggcagcataaagtttttctagtaagccttcatttgtttttcactacaggagatgtacaagcacatgggatcacaatttcatgaagagttgcagcgccataatctgccttcatatatgctaaaagaaataaattcaaggttggataaaatagaaccaaaggttcgatcatctgatacagcaatgcagtataaggctgtagagtctagaggcaatgctgggatgtagcctgttggtagtgggacaccttcaggttctgttattgatctggaaaatgaggaatcaggttcaaaaggtaaaaggccattaggatgggactccatgaaagcatcaaggaagaaggcaatgtccagttcctcccagtctactgactaccttttaagaattcatgacattcaaatagcaagactgaagcaaagtgaagaaaaatcaggtaagaaacaacagaatattgagttcttgaaggaagttgaactgaaaaagttggaggtccaaaccaaggaactagaaatgcagcaaaccaaaatgatgattgaagaaaggatccgaaaggacgcagagctgaaggaactcctagctatggaatgttttaccagaggatgtgagacctgtatacatcgcgaggagaaaaggtttaatcgagtttttcatcaacaatcctgtctgaagagtactattgtatttcataatttgttgcgaacctagtgtcggcgtaacgtggtccggtgtgttcggacatatgtcatttcgagatttttgaacatttgcttaattgtttgagaacagtagcttggtttttgaactcgtgtcgtgtactagaagattgcgaaatttttattattaaaaaacatataattccaactatttatgactaacgtatttatattaattacgaagtttgctaattaattgtatactaagtgacggtcgcgcactgttcatagagcaaataaaaataaaataaatattggatggtagttgagttagttgatgatgaaaatataaaatattggtgtggtgggatatagagatttgatataaggggaaccgctgtagagtatggagatataggaggaaagagaac

SEQ ID NO: 23500 - DNA, 3732 bp, Zea Mays
attttctttacaaaaaatggaggcctaaaactaaatttcaaacggaatccccatgacaaacgcaagaaacacgaaagcaagaaccggaaggaacagccacgccaatatacagagcgagccagcacacagtttttttttcatacggctggtctgcaattaggtgcctcgactgcttgctagccgccggattaatctttccctaccctaaggctcaggttttagtgggatatgatgaagctaaaaagtggacgacgaccgttctataaggatgttaagcttgtagactgccgttcaggctcaagtcttccacatttggctgctcaagcaaagtttgcagccatgaacatgaagactgaagatgtcaatcctcgtcgaccagttcaagtcagacgaagtagatgggctcttggtgatgtaaccgaggtgttggatcataattcgtggaggcttgggaagattacagaagtactgaagaatgactattttgtcatcaggctagtgggttgcatccaaccaagagaattccacatatcttgcttgaggattccacatgatcgcaagcagttgactgttggaggcagggaccatcaagcctatgaagaggttgatcactatgctaagaggaaagcagccaatatctgtgcttccaccggtgctagagctgtcaagagaaaactagaagcaagcaggatcccacctaatggtttagtcagaagaacaggcaaggaacagaaagtatctacacatgaatttcgccagttaaccaagaacgagttgcctccaaaggtgtctgctaggaatgccatcgacgaagatgatcattttcataggcctttaagtagcagatacaacgatctgcctgagaaacctctgcgcaccagagaagaggacgagtgctcggtggctagctgcagcgcgaattacacaagtggaacgaaaaggccttcgagcaatacggacactgcttctagtccgccaaagaagaataagaacgcaatggttaggtgcatgaagggtttgcttgatcgattagattctggcagtagcaaagacgtagatacagctacgcagattcaagaaataattgagacaaaaagaaaggagcagcaagctgcagatttcaaggagatagacctgtgtttggcactggcaaaggaatgtggggctactgaggagacagacgagttcttcgtagcttcccaactgtttgcaagctgcaaatttcaaagacatgttttcctaggactgtcttcaaatgcaggaaggatggcttggttgaagaagcactgcaagggctggactttttaaggactttagtttatgtcataggactggcttttctatttgtgtatcatgaagttaagtctatgaactgttagttatatttggtttgtgaactgttatgtacggctgtgatgcataaactttgtgatgcatgaatcttgttgtggttgtgctgcatgattttgcatgatttgtggaggttgtgcatgaatcatttgcatcttagttgtcttgtgaataatttcgaagaagttgtgttgtgacctggtaacaaaaggttttgttgtcaactacttgattttactgggttacagaggtactcatttgaaagattttgttcaaatgtttattactttctttcatgatagattattaaacatcagtatattaaatgtttgtaggatgaagaagcacaggacgcacaagacgcacaatggattacacagtacatattgaagtgtcgaaaatggaaaatgactatttgtattgctgctgcagctatgggtatgtactatcttgacaaatattggaacaaagcagattacagaatacctactgagtctggttaccaatgggtgatgagatcattgggcaataggacttactgctatcaaaattatagaatgcataggaatgtgtttgatcttttgcataatgtcctagttgagtcctatggtttgacttcaactagaagaatgtcatcagttgagaccttagcattctttctgtggatgtgtggaactccccaaggcatgaggcaggcagaggacagactatttaggtccaaggaaaccttgagtaggaagtttgagaaagttttgaattgtcttaacaaactagctgttgacaacataaggcctttagatcctgagttcactacaattcaccctaggctgcagtcacgaagattctctcattactttgataattgcataggtgctatagatggcactcatataccagttgtagttccagcaaatcaggttgtgcaacatactggtaggaaagggtacactagtcaaaatgtgttggcaatctgtgacttcaacatgagattcactttcgtcgtcgcgggttggcatggatctgtacatgatatgagagtctttaaagatgcagttgacaaatatggcaacaagtttccccatccaccccaggcaagttttatcttgtggattcgggatatcccaacaggcagggttatctggcgccgtatagaggtacaaagtaccatcttcctgagtttcagcaaggtcctatgccaagaggtaaaaaagaggttttcaattttgcacactcttcgcttaggaatgtgatcgaaagaagctttggagtcttgaagaataagtggcggattttattacatttacctagttatcctatgcctaaacaaagcaagattataattgcgtgcatggcacttcataattttattagagaaaattcaacgacagatgatgattttgatttatgtgatgatgatgagaactatgttcccattacctctgaaggaccatctacgcagggaacaaatgagttgacaaccacaacagttgatgaagacataaatatgaaccattttagagattcgatagctgatgggttgtttgctagacaatagttttttctttaagttgttgtaagagaaatagtttgtttgctgtgctcgacaattggatctgttccaggcaattgtttgttcccattagattgtgatgagaaatcagtttgcgttgtaatacaaactttgattgttgagaaaacaatttgaaataatataaaactgtttttttgaacagatatggaagaatgggtatgttggtctttttgtacagcattaattgcttcactatgtgttttagctagagtatccaaacatggtggactaaattttagcctgtgaactttagccctttggttttagctcagggtaaccaaacaggccctcagagcacagtaccagtgatgatgaccatcaatcagttggaaccggcagttgtttccctgatgatgttatgtctgcatgtgagtatgggcaggagactgaggacgcctatggctctggtttgtttcagaacgtccatgagctggagctgcgagcatatcgatcaaccgtcagagctctccatgctgcaggacccctgacgtgggagcaagagtcgctcctgacgaacctgcgcctctcgctcaacatctcgaacgaggagcacttgcttcaagatcaccgcaggcttgtagcgtgcgtaactcgagggtgtaactcgagggtgttgtatatagagaagagtccagagaaattcacctgtagctgttgtacttagccagaactttgttgctaggagtaagtcttgcatttttttagtgtttttacaatttcgaggaaatgtaaagcttcgaaatattagtcatactgataatcaaggtgggatatcagttcctttaaatgaa

SEQ ID NO: 23501 - DNA, 4747 bp, Zea Mays
caaaaaatggaggcctaaaactaaatttcaaacggaatccccatgacaaacgcaagaaacacgaaagcaagaaccggaaggaacagccacgccaatatacagagcgagccagcacacagtttttttttcatacggctggtctgcaattaggtgcctcgactgcttgctagccgccggattaatctttccctaccctaaggttggtcgcttcgttgctctaaatttcttctcatccgatttttatttctatttaggagtttgttagttgggatttttttcctccctgtttcttggctgccttgtgatccatctcagatcggtcggaagaagaacagcccaatctcgattcatccgaaataactcatttcatttttttggggagttcctagatcgacaagttgagttggttgggtacttgggttggtttgcttcagtgaaacggccgagagcatatttcttggattccttgcatgtatgtaagctgtgtccggaattcaatttgagctgctgctatctgtcttgtttcagtaattcatttagacattccagattttgtttccccaaatttaagtaaaaaaaagagagagttcttgatgtgatttgtttagtgctcacggatctccaagccccagtatttggtttgctcaaggtcataccagtttgtttttagtttcttggaatttctgtccacgttgtagtttggttggattaggattaaatcgtcctagtcagttgctacttgctacacaccttttttatcaagattcgaacaagtaacttgtttctatctctctttatttcttcttccatttgagttcctgttttgcctttccagtgtggtacatgattagatctatgtttaatatttccatccacgactccagattgagctcgtgtgttgttcttcttttgctatcaggaatcttgattgcgtgcttctgaatggttaggacttaagacatgcttttagctgaagttatgtggcatctgttttgtctaacaggttgaaagtggtttgaatttttcaagaacaaaagtttccaacctgtaagattatcttctgtttctgggatctgcccatctggggaattgctcctgcttcagcctcttagcttgaggtcagagcaggaggcgatttggctaaattggttttagttgtcttgtttgcataatttgggtcacatctaataacatgcaggggattgaatctttacttccaagcttgcttcacatataggacctgatttccttatattatgtagaaattcttacttgattcacctattttttagactcactgattttgaactattttcctacatgactttgactcccacttagcgctcaacctgaatataaataaggtcgtactctgaattttgtgactgggcttgtggagcttagacgatggctagtttgtgccgttctaatatctgggttatataagaaggttcaagttctcatttttttttctcctaggctacctttgatagtaagccaagtagttttaagaatacatctcagagtgagggacaagatcttgcttctgatgctactatgaactctaccttcatttatttgctcatccagattattggattctgcattcagctcttttctgtgttcatcatccaatttttatgcatagtgctatctttgtgtctcaataacttcctttgttgttagttatggtgtcaacaaacacctattattattcgtgcgcacgttctggagccgccttggcgtctctgtcccggacgacgcctcttcagaacgaactctgtgatcttcgaaggcgtgcacccctccaccacttcggtcctccgccagtgcaagatgaggccgccctgaggcgtatcagactgcaccgcgaggacaccgccgtggctaacctttggtgccgtgcattcaccacggcgatgctctgatcaaaccctcccccctctttgtatattacaaattttttcagctagcctacttttgatctgattaggcataacaccatacaaataagacttttggtttattctgatgactttaaatccttgactttcttctgtcaaatcatttattaacagtgaacttgtgttccacttgtacacttacctagaaatataatgcttggctcttaacaaacaatggtttcattttcttatccattcatgttttaatattcttccctgtgtgctagtgcttcttttgacttttgttcatggtccaccttttatgtgcatatacatttcaggctcaggttttagtgggatatgatgaagctaaaaagtggacgacgaccgttctataaggatgttaagcttgtagactgccgttcaggctcaagtcttccacatttggctgctcaagcaaagtttgcagccatgaacatgaagactgaagatgtcaatcctcgtcgaccagttcaagtcagacgaagtagatgggctcttggtgatgtaaccgaggtgttggatcataattcgtggaggcttgggaagattacagaagtactgaagaatgactattttgtcatcaggctagtgggttgcatccaaccaagagaattccacatatcttgcttgaggattccacatgatcgcaagcagttgactgttggaggcagggatgaagaagcacaggacgcacaagacgcacaatggattacacagtacatattgaagtgtcgaaaatggaaaatgactatttgtattgctgctgcagctatgggtatgtactatcttgacaaatattggaacaaagcagattacagaatacctactgagtctggttaccaatgggtgatgagatcattgggcaataggacttactgctatcaaaattatagaatgcataggaatgtgtttgatcttttgcataatgtcctagttgagtcctatggtttgacttcaactagaagaatgtcatcagttgagaccttagcattctttctgtggatgtgtggaactccccaaggcatgaggcaggcagaggacagactatttaggtccaaggaaaccttgagtaggaagtttgagaaagttttgaattgtcttaacaaactagctgttgacaacataaggcctttagatcctgagttcactacaattcaccctaggctgcagtcacgaagattctctcattactttgataattgcataggtgctatagatggcactcatataccagttgtagttccagcaaatcaggttgtgcaacatactggtaggaaagggtacactagtcaaaatgtgttggcaatctgtgacttcaacatgagattcactttcgtcgtcgcgggttggcatggatctgtacatgatatgagagtctttaaagatgcagttgacaaatatggcaacaagtttccccatccaccccaggcaagttttatcttgtggattcgggatatcccaacaggcagggttatctggcgccgtatagaggtacaaagtaccatcttcctgagtttcagcaaggtcctatgccaagaggtaaaaaagaggttttcaattttgcacactcttcgcttaggaatgtgatcgaaagaagctttggagtcttgaagaataagtggcggattttattacatttacctagttatcctatgcctaaacaaagcaagattataattgcgtgcatggcacttcataattttattagagaaaattcaacgacagatgatgattttgatttatgtgatgatgatgagaactatgttcccattacctctgaaggaccatctacgcagggaacaaatgagttgacaaccacaacagttgatgaagacataaatatgaaccattttagagattcgatagctgatgggttgtttgctagacaatagttttttctttaagttgttgtaagagaaatagtttgtttgctgtgctcgacaattggatctgttccaggcaattgtttgttcccattagattgtgatgagaaatcagtttgcgttgtaatacaaactttgattgttgagaaaacaatttgaaataatataaaactgtttttttgaacagatatggaagaatgggtatgttggtctttttgtacagcattaattgcttcactatgtgttttagctagagtatccaaacatggtggactaaattttagcctgtgaactttagccctttggttttagctcagggtaaccaaacaggccctcagagcacagtaccagtgatgatgaccatcaatcagttggaaccggcagttgtttccctgatgatgttatgtctgcatgtgagtatgggcaggagactgaggacgcctatggctctggtttgtttcagaacgtccatgagctggagctgcgagcatatcgatcaaccgtcagagctctccatgctgcaggacccctgacgtgggagcaagagtcgctcctgacgaacctgcgcctctcgctcaacatctcgaacgaggagcacttgcttcagttgaggcatctcctagctctttgaatttttttcaaaaatcaatatgttttttaacacctgtggattacctccaactcgcagagatcaccgcaggcttgtagcgtgcgtaactcgagggtgtaactcgagggtgttgtatatagagaagagtccagagaaattcacctgtagctgttgtacttagccagaactttgttgctaggagtaagtcttgcatttttttagtgtttttacaatttcgaggaaatgtaaagcttcgaaatattagtcatactgataatcaaggtgggatatcagttcctttaaatgaa

SEQ ID NO: 23502 - DNA, 3613 bp, Zea Mays
ctaaatttcaaacggaatccccatgacaaacgcaagaaacacgaaagcaagaaccggaaggaacagccacgccaatatacagagcgagccagcacacagtttttttttcatacggctggtctgcaattaggtgcctcgactgcttgctagccgccggattaatctttccctaccctaaggctcaggttttagtgggatatgatgaagctaaaaagtggacgacgaccgttctataaggatgttaagcttgtagactgccgttcaggctcaagtcttccacatttggctgctcaagcaaagtttgcagccatgaacatgaagactgaagatgtcaatcctcgtcgaccagttcaagtcagacgaagtagatgggctcttggtgatgtaaccgaggtgttggatcataattcgtggaggcttgggaagattacagaagtactgaagaatgactattttgtcatcaggctagtgggttgcatccaaccaagagaattccacatatcttgcttgaggattccacatgatcgcaagcagttgactgttggaggcaggatcaatgaactgaataagccgacccgatttgctgactgctcctctcaccactcaaaatttgtgatggaacaggaccatcaagcctatgaagaggttgatcactatgctaagaggaaagcagccaatatctgtgcttccaccggtgctagagctgtcaagagaaaactagaagcaagcaggatcccacctaatggtttagtcagaagaacaggcaaggaacagaaagtatctacacatgaatttcgccagttaaccaagaacgagttgcctccaaaggtgtctgctaggaatgccatcgacgaagatgatcattttcataggcctttaagtagcagatacaacgatctgcctgagaaacctctgcgcaccagagaagaggacgagtgctcggtggctagctgcagcgcgaattacacaagtggaacgaaaaggccttcgagcaatacggacactgcttctagtccgccaaagaagaataagaacgcaatggttaggtgcatgaagggtttgcttgatcgattagattctggcagtagcaaagacgtagatacagctacgcagattcaagaaataattgagacaaaaagaaaggagcagcaagctgcagatttcaaggagatagacctgtgtttggcactggcaaaggaatgtggggctactgaggagacagacgagttcttcgtagcttcccaactgtttgcaagctgcaaatttcaaagacatgttttcctaggactgtcttcaaatgcaggaaggatggcttggttgaagaagcactgcaagggctggactttttaaggactttagtttatgtcataggactggcttttctatttgtgtatcatgaagttaagtctatgaactgttagttatatttggtttgtgaactgttatgtacggctgtgatgcataaactttgtgatgcatgaatcttgttgtggttgtgctgcatgattttgcatgatttgtggaggttgtgcatgaatcatttgcatcttagttgtcttgtgaataatttcgaagaagttgtgttgtgacctggtaacaaaaggttttgttgtcaactacttgattttactgggttacagaggtactcatttgaaagattttgttcaaatgtttattactttctttcatgatagattattaaacatcagtatattaaatgtttgtaggatgaagaagcacaggacgcacaagacgcacaatggattacacagtacatattgaagtgtcgaaaatggaaaatgactatttgtattgctgctgcagctatgggtatgtactatcttgacaaatattggaacaaagcagattacagaatacctactgagtctggttaccaatgggtgatgagatcattgggcaataggacttactgctatcaaaattatagaatgcataggaatgtgtttgatcttttgcataatgtcctagttgagtcctatggtttgacttcaactagaagaatgtcatcagttgagaccttagcattctttctgtggatgtgtggaactccccaaggcatgaggcaggcagaggacagactatttaggtccaaggaaaccttgagtaggaagtttgagaaagttttgaattgtcttaacaaactagctgttgacaacataaggcctttagatcctgagttcactacaattcaccctaggctgcagtcacgaagattctctcattactttgataattgcataggtgctatagatggcactcatataccagttgtagttccagcaaatcaggttgtgcaacatactggtaggaaagggtacactagtcaaaatgtgttggcaatctgtgacttcaacatgagattcactttcgtcgtcgcgggttggcatggatctgtacatgatatgagagtctttaaagatgcagttgacaaatatggcaacaagtttccccatccaccccaggcaagttttatcttgtggattcgggatatcccaacaggcagggttatctggcgccgtatagaggtacaaagtaccatcttcctgagtttcagcaaggtcctatgccaagaggaccatctacgcagggaacaaatgagttgacaaccacaacagttgatgaagacataaatatgaaccattttagagattcgatagctgatgggttgtttgctagacaatagttttttctttaagttgttgtaagagaaatagtttgtttgctgtgctcgacaattggatctgttccaggcaattgtttgttcccattagattgtgatgagaaatcagtttgcgttgtaatacaaactttgattgttgagaaaacaatttgaaataatataaaactgtttttttgaacagatatggaagaatgggtatgttggtctttttgtacagcattaattgcttcactatgtgttttagctagagtatccaaacatggtggactaaattttagcctgtgaactttagccctttggttttagctcagggtaaccaaacaggccctcagagcacagtaccagtgatgatgaccatcaatcagttggaaccggcagttgtttccctgatgatgttatgtctgcatgtgagtatgggcaggagactgaggacgcctatggctctggtttgtttcagaacgtccatgagctggagctgcgagcatatcgatcaaccgtcagagctctccatgctgcaggacccctgacgtgggagcaagagtcgctcctgacgaacctgcgcctctcgctcaacatctcgaacgaggagcacttgcttcagttgaggcatctcctagctctttgaatttttttcaaaaatcaatatgttttttaacacctgtggattacctccaactcgcagagatcaccgcaggcttgtagcgtgcgtaactcgagggtgtaactcgagggtgttgtatatagagaagagtccagagaaattcacctgtagctgttgtacttagccagaactttgttgctaggagtaagtcttgcatttttttagtgtttttacaatttcgaggaaatgtaaagcttcgaaatattagtcatactgataatcaaggtgggatatcagttcctttaaatgaa

SEQ ID NO: 23503 - DNA, 2495 bp, Zea Mays
ctaaatttcaaacggaatccccatgacaaacgcaagaaacacgaaagcaagaaccggaaggaacagccacgccaatatacagagcgagccagcacacagtttttttttcatacggctggtctgcaattaggtgcctcgactgcttgctagccgccggattaatctttccctaccctaaggctcaggttttagtgggatatgatgaagctaaaaagtggacgacgaccgttctataaggatgttaagcttgtagactgccgttcaggctcaagtcttccacatttggctgctcaagcaaagtttgcagccatgaacatgaagactgaagatgtcaatcctcgtcgaccagttcaagtcagacgaagtagatgggctcttggtgatgtaaccgaggtgttggatcataattcgtggaggcttgggaagattacagaagtactgaagaatgactattttgtcatcaggctagtgggttgcatccaaccaagagaattccacatatcttgcttgaggattccacatgatcgcaagcagttgactgttggaggcagggatgaagaagcacaggacgcacaagacgcacaatggattacacagtacatattgaagtgtcgaaaatggaaaatgactatttgtattgctgctgcagctatgggtatgtactatcttgacaaatattggaacaaagcagattacagaatacctactgagtctggttaccaatgggtgatgagatcattgggcaataggacttactgctatcaaaattatagaatgcataggaatgtgtttgatcttttgcataatgtcctagttgagtcctatggtttgacttcaactagaagaatgtcatcagttgagaccttagcattctttctgtggatgtgtggaactccccaaggcatgaggcaggcagaggacagactatttaggtccaaggaaaccttgagtaggaagtttgagaaagttttgaattgtcttaacaaactagctgttgacaacataaggcctttagatcctgagttcactacaattcaccctaggctgcagtcacgaagattctctcattactttgataattgcataggtgctatagatggcactcatataccagttgtagttccagcaaatcaggttgtgcaacatactggtaggaaagggtacactagtcaaaatgtgttggcaatctgtgacttcaacatgagattcactttcgtcgtcgcgggttggcatggatctgtacatgatatgagagtctttaaagatgcagttgacaaatatggcaacaagtttccccatccaccccaggcaagttttatcttgtggattcgggatatcccaacaggcagggttatctggcgccgtatagaggtacaaagtaccatcttcctgagtttcagcaaggtcctatgccaagagatgatgattttgatttatgtgatgatgatgagaactatgttcccattacctctgaaggaccatctacgcagggaacaaatgagttgacaaccacaacagttgatgaagacataaatatgaaccattttagagattcgatagctgatgggttgtttgctagacaatagttttttctttaagttgttgtaagagaaatagtttgtttgctgtgctcgacaattggatctgttccaggcaattgtttgttcccattagattgtgatgagaaatcagtttgcgttgtaatacaaactttgattgttgagaaaacaatttgaaataatataaaactgtttttttgaacagatatggaagaatgggtatgttggtctttttgtacagcattaattgcttcactatgtgttttagctagagtatccaaacatggtggactaaattttagcctgtgaactttagccctttggttttagctcagggtaaccaaacaggccctcagagcacagtaccagtgatgatgaccatcaatcagttggaaccggcagttgtttccctgatgatgttatgtctgcatgtgagtatgggcaggagactgaggacgcctatggctctggtttgtttcagaacgtccatgagctggagctgcgagcatatcgatcaaccgtcagagctctccatgctgcaggacccctgacgtgggagcaagagtcgctcctgacgaacctgcgcctctcgctcaacatctcgaacgaggagcacttgcttcagttgaggcatctcctagctctttgaatttttttcaaaaatcaatatgttttttaacacctgtggattacctccaactcgcagagatcaccgcaggcttgtagcgtgcgtaactcgagggtgtaactcgagggtgttgtatatagagaagagtccagagaaattcacctgtagctgttgtacttagccagaactttgttgctaggagtaagtcttgcatttttttagtgtttttacaatttcgaggaaatgtaaagcttcgaaatattagtcatactgataatcaaggtgggatatcagttcctttaaatgaa

SEQ ID NO: 23504 - DNA, 3240 bp, Zea Mays
ctaaatttcaaacggaatccccatgacaaacgcaagaaacacgaaagcaagaaccggaaggaacagccacgccaatatacagagcgagccagcacacagtttttttttcatacggctggtctgcaattaggtgcctcgactgcttgctagccgccggattaatctttccctaccctaagttatggtgtcaacaaacacctattattattcgtgcgcacgttctggagccgccttggcgtctctgtcccggacgacgcctcttcagaacgaactctgtgatcttcgaaggcgtgcacccctccaccacttcggtcctccgccagtgcaagatgaggccgccctgaggcgtatcagactgcaccgcgaggacaccgccgtggctaacctttggtgccgtgcattcaccacggcgatgctctgatcaaaccctcccccctctttgtatattacaaattttttcagctagcctacttttgatctgattaggcataacaccatacaaataagacttttggtttattctgatgactttaaatccttgactttcttctgtcaaatcatttattaacagtgaacttgtgttccacttgtacacttacctagaaatataatgcttggctcttaacaaacaatggtttcattttcttatccattcatgttttaatattcttccctgtgtgctagtgcttcttttgacttttgttcatggtccaccttttatgtgcatatacatttcaggctcaggttttagtgggatatgatgaagctaaaaagtggacgacgaccgttctataaggatgttaagcttgtagactgccgttcaggctcaagtcttccacatttggctgctcaagcaaagtttgcagccatgaacatgaagactgaagatgtcaatcctcgtcgaccagttcaagtcagacgaagtagatgggctcttggtgatgtaaccgaggtgttggatcataattcgtggaggcttgggaagattacagaagtactgaagaatgactattttgtcatcaggctagtgggttgcatccaaccaagagaattccacatatcttgcttgaggattccacatgatcgcaagcagttgactgttggaggcagggatgaagaagcacaggacgcacaagacgcacaatggattacacagtacatattgaagtgtcgaaaatggaaaatgactatttgtattgctgctgcagctatgggtatgtactatcttgacaaatattggaacaaagcagattacagaatacctactgagtctggttaccaatgggtgatgagatcattgggcaataggacttactgctatcaaaattatagaatgcataggaatgtgtttgatcttttgcataatgtcctagttgagtcctatggtttgacttcaactagaagaatgtcatcagttgagaccttagcattctttctgtggatgtgtggaactccccaaggcatgaggcaggcagaggacagactatttaggtccaaggaaaccttgagtaggaagtttgagaaagttttgaattgtcttaacaaactagctgttgacaacataaggcctttagatcctgagttcactacaattcaccctaggctgcagtcacgaagattctctcattactttgataattgcataggtgctatagatggcactcatataccagttgtagttccagcaaatcaggttgtgcaacatactggtaggaaagggtacactagtcaaaatgtgttggcaatctgtgacttcaacatgagattcactttcgtcgtcgcgggttggcatggatctgtacatgatatgagagtctttaaagatgcagttgacaaatatggcaacaagtttccccatccaccccaggcaagttttatcttgtggattcgggatatcccaacaggcagggttatctggcgccgtatagaggtacaaagtaccatcttcctgagtttcagcaaggtcctatgccaagaggtaaaaaagaggttttcaattttgcacactcttcgcttaggaatgtgatcgaaagaagctttggagtcttgaagaataagtggcggattttattacatttacctagttatcctatgcctaaacaaagcaagattataattgcgtgcatggcacttcataattttattagagaaaattcaacgacagatgatgattttgatttatgtgatgatgatgagaactatgttcccattacctctgaaggaccatctacgcagggaacaaatgagttgacaaccacaacagttgatgaagacataaatatgaaccattttagagattcgatagctgatgggttgtttgctagacaatagttttttctttaagttgttgtaagagaaatagtttgtttgctgtgctcgacaattggatctgttccaggcaattgtttgttcccattagattgtgatgagaaatcagtttgcgttgtaatacaaactttgattgttgagaaaacaatttgaaataatataaaactgtttttttgaacagatatggaagaatgggtatgttggtctttttgtacagcattaattgcttcactatgtgttttagctagagtatccaaacatggtggactaaattttagcctgtgaactttagccctttggttttagctcagggtaaccaaacaggccctcagagcacagtaccagtgatgatgaccatcaatcagttggaaccggcagttgtttccctgatgatgttatgtctgcatgtgagtatgggcaggagactgaggacgcctatggctctggtttgtttcagaacgtccatgagctggagctgcgagcatatcgatcaaccgtcagagctctccatgctgcaggacccctgacgtgggagcaagagtcgctcctgacgaacctgcgcctctcgctcaacatctcgaacgaggagcacttgcttcagttgaggcatctcctagctctttgaatttttttcaaaaatcaatatgttttttaacacctgtggattacctccaactcgcagagatcaccgcaggcttgtagcgtgcgtaactcgagggtgtaactcgagggtgttgtatatagagaagagtccagagaaattcacctgtagctgttgtacttagccagaactttgttgctaggagtaagtcttgcatttttttagtgtttttacaatttcgaggaaatgtaaagcttcgaaatattagtcatactgataatcaaggtgggatatcagttcctttaaatgaa

SEQ ID NO: 23505 - DNA, 2769 bp, Zea Mays
cgcttcgttgctctaaatttcttctcatccgatttttatttctatttaggagtttgttagttgggatttttttcctccctgtttcttggctgccttgtgatccatctcagatcggtcggaagaagaacagcccaatctcgattcatccgaaataactcatttcatttttttggggagttcctagatcgacaagttgagttggttgggtacttgggttggtttgcttcagtgaaacggccgagagcatatttcttggattccttgcatgctcaggttttagtgggatatgatgaagctaaaaagtggacgacgaccgttctataaggatgttaagcttgtagactgccgttcaggctcaagtcttccacatttggctgctcaagcaaagtttgcagccatgaacatgaagactgaagatgtcaatcctcgtcgaccagttcaagtcagacgaagtagatgggctcttggtgatgtaaccgaggtgttggatcataattcgtggaggcttgggaagattacagaagtactgaagaatgactattttgtcatcaggctagtgggttgcatccaaccaagagaattccacatatcttgcttgaggattccacatgatcgcaagcagttgactgttggaggcagggatgaagaagcacaggacgcacaagacgcacaatggattacacagtacatattgaagtgtcgaaaatggaaaatgactatttgtattgctgctgcagctatgggtatgtactatcttgacaaatattggaacaaagcagattacagaatacctactgagtctggttaccaatgggtgatgagatcattgggcaataggacttactgctatcaaaattatagaatgcataggaatgtgtttgatcttttgcataatgtcctagttgagtcctatggtttgacttcaactagaagaatgtcatcagttgagaccttagcattctttctgtggatgtgtggaactccccaaggcatgaggcaggcagaggacagactatttaggtccaaggaaaccttgagtaggaagtttgagaaagttttgaattgtcttaacaaactagctgttgacaacataaggcctttagatcctgagttcactacaattcaccctaggctgcagtcacgaagattctctcattactttgataattgcataggtgctatagatggcactcatataccagttgtagttccagcaaatcaggttgtgcaacatactggtaggaaagggtacactagtcaaaatgtgttggcaatctgtgacttcaacatgagattcactttcgtcgtcgcgggttggcatggatctgtacatgatatgagagtctttaaagatgcagttgacaaatatggcaacaagtttccccatccaccccaggcaagttttatcttgtggattcgggatatcccaacaggcagggttatctggcgccgtatagaggtacaaagtaccatcttcctgagtttcagcaaggtcctatgccaagaggtaaaaaagaggttttcaattttgcacactcttcgcttaggaatgtgatcgaaagaagctttggagtcttgaagaataagtggcggattttattacatttacctagttatcctatgcctaaacaaagcaagattataattgcgtgcatggcacttcataattttattagagaaaattcaacgacagatgatgattttgatttatgtgatgatgatgagaactatgttcccattacctctgaaggaccatctacgcagggaacaaatgagttgacaaccacaacagttgatgaagacataaatatgaaccattttagagattcgatagctgatgggttgtttgctagacaatagttttttctttaagttgttgtaagagaaatagtttgtttgctgtgctcgacaattggatctgttccaggcaattgtttgttcccattagattgtgatgagaaatcagtttgcgttgtaatacaaactttgattgttgagaaaacaatttgaaataatataaaactgtttttttgaacagatatggaagaatgggtatgttggtctttttgtacagcattaattgcttcactatgtgttttagctagagtatccaaacatggtggactaaattttagcctgtgaactttagccctttggttttagctcagggtaaccaaacaggccctcagagcacagtaccagtgatgatgaccatcaatcagttggaaccggcagttgtttccctgatgatgttatgtctgcatgtgagtatgggcaggagactgaggacgcctatggctctggtttgtttcagaacgtccatgagctggagctgcgagcatatcgatcaaccgtcagagctctccatgctgcaggacccctgacgtgggagcaagagtcgctcctgacgaacctgcgcctctcgctcaacatctcgaacgaggagcacttgcttcagttgaggcatctcctagctctttgaatttttttcaaaaatcaatatgttttttaacacctgtggattacctccaactcgcagagatcaccgcaggcttgtagcgtgcgtaactcgagggtgtaactcgagggtgttgtatatagagaagagtccagagaaattcacctgtagctgttgtacttagccagaactttgttgctaggagtaagtcttgcatttttttagtgtttttacaatttcgaggaaatgtaaagcttcgaaatattagtcatactgataatcaaggtgggatatcagttcctttaaatgaa

SEQ ID NO: 23506 - DNA, 3701 bp, Zea Mays
atcttgattgcgtgcttctgaatggctcaggttttagtgggatatgatgaagctaaaaagtggacgacgaccgttctataaggatgttaagcttgtagactgccgttcaggctcaagtcttccacatttggctgctcaagcaaagtttgcagccatgaacatgaagactgaagatgtcaatcctcgtcgaccagttcaagtcagacgaagtagatgggctcttggtgatgtaaccgaggtgttggatcataattcgtggaggcttgggaagattacagaagtactgaagaatgactattttgtcatcaggctagtgggttgcatccaaccaagagaattccacatatcttgcttgaggattccacatgatcgcaagcagttgactgttggaggcaggatcaatgaactgaataagccgacccgatttgctgactgctcctctcaccactcaaaatttgtgatggaacaggaccatcaagcctatgaagaggttgatcactatgctaagaggaaagcagccaatatctgtgcttccaccggtgctagagctgtcaagagaaaactagaagcaagcaggatcccacctaatggtttagtcagaagaacaggcaaggaacagaaagtatctacacatgaatttcgccagttaaccaagaacgagttgcctccaaaggtgtctgctaggaatgccatcgacgaagatgatcattttcataggcctttaagtagcagatacaacgatctgcctgagaaacctctgcgcaccagagaagaggacgagtgctcggtggctagctgcagcgcgaattacacaagtggaacgaaaaggccttcgagcaatacggacactgcttctagtccgccaaagaagaataagaacgcaatggttaggtgcatgaagggtttgcttgatcgattagattctggcagtagcaaagacgtagatacagctacgcagattcaagaaataattgagacaaaaagaaaggagcagcaagctgcagatttcaaggagatagacctgtgtttggcactggcaaaggaatgtggggctactgaggagacagacgagttcttcgtagcttcccaactgtttgcaagctgcaaatttcaaagacatgttttcctaggactgtcttcaaatgcaggaaggatggcttggttgaagaagcactgcaagggctggactttttaaggactttagtttatgtcataggactggcttttctatttgtgtatcatgaagttaagtctatgaactgttagttatatttggtttgtgaactgttatgtacggctgtgatgcataaactttgtgatgcatgaatcttgttgtggttgtgctgcatgattttgcatgatttgtggaggttgtgcatgaatcatttgcatcttagttgtcttgtgaataatttcgaagaagttgtgttgtgacctggtaacaaaaggttttgttgtcaactacttgattttactgggttacagaggtactcatttgaaagattttgttcaaatgtttattactttctttcatgatagattattaaacatcagtatattaaatgtttgtaggatgaagaagcacaggacgcacaagacgcacaatggattacacagtacatattgaagtgtcgaaaatggaaaatgactatttgtattgctgctgcagctatgggtatgtactatcttgacaaatattggaacaaagcagattacagaatacctactgagtctggttaccaatgggtgatgagatcattgggcaataggacttactgctatcaaaattatagaatgcataggaatgtgtttgatcttttgcataatgtcctagttgagtcctatggtttgacttcaactagaagaatgtcatcagttgagaccttagcattctttctgtggatgtgtggaactccccaaggcatgaggcaggcagaggacagactatttaggtccaaggaaaccttgagtaggaagtttgagaaagttttgaattgtcttaacaaactagctgttgacaacataaggcctttagatcctgagttcactacaattcaccctaggctgcagtcacgaagattctctcattactttgataattgcataggtgctatagatggcactcatataccagttgtagttccagcaaatcaggttgtgcaacatactggtaggaaagggtacactagtcaaaatgtgttggcaatctgtgacttcaacatgagattcactttcgtcgtcgcgggttggcatggatctgtacatgatatgagagtctttaaagatgcagttgacaaatatggcaacaagtttccccatccaccccaggcaagttttatcttgtggattcgggatatcccaacaggcagggttatctggcgccgtatagaggtacaaagtaccatcttcctgagtttcagcaaggtcctatgccaagaggtaaaaaagaggttttcaattttgcacactcttcgcttaggaatgtgatcgaaagaagctttggagtcttgaagaataagtggcggattttattacatttacctagttatcctatgcctaaacaaagcaagattataattgcgtgcatggcacttcataattttattagagaaaattcaacgacagatgatgattttgatttatgtgatgatgatgagaactatgttcccattacctctgaaggaccatctacgcagggaacaaatgagttgacaaccacaacagttgatgaagacataaatatgaaccattttagagattcgatagctgatgggttgtttgctagacaatagttttttctttaagttgttgtaagagaaatagtttgtttgctgtgctcgacaattggatctgttccaggcaattgtttgttcccattagattgtgatgagaaatcagtttgcgttgtaatacaaactttgattgttgagaaaacaatttgaaataatataaaactgtttttttgaacagatatggaagaatgggtatgttggtctttttgtacagcattaattgcttcactatgtgttttagctagagtatccaaacatggtggactaaattttagcctgtgaactttagccctttggttttagctcagggtaaccaaacaggccctcagagcacagtaccagtgatgatgaccatcaatcagttggaaccggcagttgtttccctgatgatgttatgtctgcatgtgagtatgggcaggagactgaggacgcctatggctctggtttgtttcagaacgtccatgagctggagctgcgagcatatcgatcaaccgtcagagctctccatgctgcaggacccctgacgtgggagcaagagtcgctcctgacgaacctgcgcctctcgctcaacatctcgaacgaggagcacttgcttcagttgaggcatctcctagctctttgaatttttttcaaaaatcaatatgttttttaacacctgtggattacctccaactcgcagagatcaccgcaggcttgtagcgtgcgtaactcgagggtgtaactcgagggtgttgtatatagagaagagtccagagaaattcacctgtagctgttgtacttagccagaactttgttgctaggagtaagtcttgcatttttttagtgtttttacaatttcgaggaaatgtaaagcttcgaaatattagtcatactgataatcaaggtgggatatcagttcctttaaatgaa

SEQ ID NO: 23507 - DNA, 4386 bp, Zea Mays
ttcaagttctcatttttttttctcctaggctacctttgatagtaagccaagtagttttaagaatacatctcagagtgagggacaagatcttgcttctgatgctactatgaactctaccttcatttatttgctcatccagattattggattctgcattcagctcttttctgtgttcatcatccaatttttatgcatagtgctatctttgtgtctcaataacttcctttgttgttagttatggtgtcaacaaacacctattattattcgtgcgcacgttctggagccgccttggcgtctctgtcccggacgacgcctcttcagaacgaactctgtgatcttcgaaggcgtgcacccctccaccacttcggtcctccgccagtgcaagatgaggccgccctgaggcgtatcagactgcaccgcgaggacaccgccgtggctaacctttggtgccgtgcattcaccacggcgatgctctgatcaaaccctcccccctctttgtatattacaaattttttcagctagcctacttttgatctgattaggcataacaccatacaaataagacttttggtttattctgatgactttaaatccttgactttcttctgtcaaatcatttattaacagtgaacttgtgttccacttgtacacttacctagaaatataatgcttggctcttaacaaacaatggtttcattttcttatccattcatgttttaatattcttccctgtgtgctagtgcttcttttgacttttgttcatggtccaccttttatgtgcatatacatttcaggctcaggttttagtgggatatgatgaagctaaaaagtggacgacgaccgttctataaggatgttaagcttgtagactgccgttcaggctcaagtcttccacatttggctgctcaagcaaagtttgcagccatgaacatgaagactgaagatgtcaatcctcgtcgaccagttcaagtcagacgaagtagatgggctcttggtgatgtaaccgaggtgttggatcataattcgtggaggcttgggaagattacagaagtactgaagaatgactattttgtcatcaggctagtgggttgcatccaaccaagagaattccacatatcttgcttgaggattccacatgatcgcaagcagttgactgttggaggcaggatcaatgaactgaataagccgacccgatttgctgactgctcctctcaccactcaaaatttgtgatggaacaggaccatcaagcctatgaagaggttgatcactatgctaagaggaaagcagccaatatctgtgcttccaccggtgctagagctgtcaagagaaaactagaagcaagcaggatcccacctaatggtttagtcagaagaacaggcaaggaacagaaagtatctacacatgaatttcgccagttaaccaagaacgagttgcctccaaaggtgtctgctaggaatgccatcgacgaagatgatcattttcataggcctttaagtagcagatacaacgatctgcctgagaaacctctgcgcaccagagaagaggacgagtgctcggtggctagctgcagcgcgaattacacaagtggaacgaaaaggccttcgagcaatacggacactgcttctagtccgccaaagaagaataagaacgcaatggttaggtgcatgaagggtttgcttgatcgattagattctggcagtagcaaagacgtagatacagctacgcagattcaagaaataattgagacaaaaagaaaggagcagcaagctgcagatttcaaggagatagacctgtgtttggcactggcaaaggaatgtggggctactgaggagacagacgagttcttcgtagcttcccaactgtttgcaagctgcaaatttcaaagacatgttttcctaggactgtcttcaaatgcaggaaggatggcttggttgaagaagcactgcaagggctggactttttaaggactttagtttatgtcataggactggcttttctatttgtgtatcatgaagttaagtctatgaactgttagttatatttggtttgtgaactgttatgtacggctgtgatgcataaactttgtgatgcatgaatcttgttgtggttgtgctgcatgattttgcatgatttgtggaggttgtgcatgaatcatttgcatcttagttgtcttgtgaataatttcgaagaagttgtgttgtgacctggtaacaaaaggttttgttgtcaactacttgattttactgggttacagaggatgaagaagcacaggacgcacaagacgcacaatggattacacagtacatattgaagtgtcgaaaatggaaaatgactatttgtattgctgctgcagctatgggtatgtactatcttgacaaatattggaacaaagcagattacagaatacctactgagtctggttaccaatgggtgatgagatcattgggcaataggacttactgctatcaaaattatagaatgcataggaatgtgtttgatcttttgcataatgtcctagttgagtcctatggtttgacttcaactagaagaatgtcatcagttgagaccttagcattctttctgtggatgtgtggaactccccaaggcatgaggcaggcagaggacagactatttaggtccaaggaaaccttgagtaggaagtttgagaaagttttgaattgtcttaacaaactagctgttgacaacataaggcctttagatcctgagttcactacaattcaccctaggctgcagtcacgaagattctctcattactttgataattgcataggtgctatagatggcactcatataccagttgtagttccagcaaatcaggttgtgcaacatactggtaggaaagggtacactagtcaaaatgtgttggcaatctgtgacttcaacatgagattcactttcgtcgtcgcgggttggcatggatctgtacatgatatgagagtctttaaagatgcagttgacaaatatggcaacaagtttccccatccaccccaggcaagttttatcttgtggattcgggatatcccaacaggcagggttatctggcgccgtatagaggtacaaagtaccatcttcctgagtttcagcaaggtcctatgccaagaggtaaaaaagaggttttcaattttgcacactcttcgcttaggaatgtgatcgaaagaagctttggagtcttgaagaataagtggcggattttattacatttacctagttatcctatgcctaaacaaagcaagattataattgcgtgcatggcacttcataattttattagagaaaattcaacgacagatgatgattttgatttatgtgatgatgatgagaactatgttcccattacctctgaaggaccatctacgcagggaacaaatgagttgacaaccacaacagttgatgaagacataaatatgaaccattttagagattcgatagctgatgggttgtttgctagacaatagttttttctttaagttgttgtaagagaaatagtttgtttgctgtgctcgacaattggatctgttccaggcaattgtttgttcccattagattgtgatgagaaatcagtttgcgttgtaatacaaactttgattgttgagaaaacaatttgaaataatataaaactgtttttttgaacagatatggaagaatgggtatgttggtctttttgtacagcattaattgcttcactatgtgttttagctagagtatccaaacatggtggactaaattttagcctgtgaactttagccctttggttttagctcagggtaaccaaacaggccctcagagcacagtaccagtgatgatgaccatcaatcagttggaaccggcagttgtttccctgatgatgttatgtctgcatgtgagtatgggcaggagactgaggacgcctatggctctggtttgtttcagaacgtccatgagctggagctgcgagcatatcgatcaaccgtcagagctctccatgctgcaggacccctgacgtgggagcaagagtcgctcctgacgaacctgcgcctctcgctcaacatctcgaacgaggagcacttgcttcagttgaggcatctcctagctctttgaatttttttcaaaaatcaatatgttttttaacacctgtggattacctccaactcgcagagatcaccgcaggcttgtagcgtgcgtaactcgagggtgtaactcgagggtgttgtatatagagaagagtccagagaaattcacctgtagctgttgtacttagccagaactttgttgctaggagtaagtcttgcatttttttagtgtttttacaatttcgaggaaatgtaaagcttcgaaatattagtcatactgataatcaaggtgggatatcagttcctttaaatgaa

SEQ ID NO: 23508 - DNA, 2971 bp, Zea Mays
caagatcttgcttctgatgctactatgaactctaccttcatttatttgctcatccagattattggattctgcattcagctcttttctgtgttcatcatccaatttttatgcatagtgctatctttgtgtctcaataacttcctttgttgttagttatggtgtcaacaaacacctattattattcgtgcgcacgttctggagccgccttggcgtctctgtcccggacgacgcctcttcagaacgaactctgtgatcttcgaaggcgtgcacccctccaccacttcggtcctccgccagtgcaagatgaggccgccctgaggcgtatcagactgcaccgcgaggacaccgccgtggctaacctttggtgccgtgcattcaccacggcgatgctctgatcaaaccctcccccctctttgtatattacaaattttttcagctagcctacttttgatctgattaggcataacaccatacaaataagacttttggtttattctgatgactttaaatccttgactttcttctgtcaaatcatttattaacagtgaacttgtgttccacttgtacacttacctagaaatataatgcttggctcttaacaaacaatggtttcattttcttatccattcatgttttaatattcttccctgtgtgctagtgcttcttttgacttttgttcatggtccaccttttatgtgcatatacatttcaggctcaggttttagtgggatatgatgaagctaaaaagtggacgacgaccgttctataaggatgttaagcttgtagactgccgttcaggctcaagtcttccacatttggctgctcaagcaaagtttgcagccatgaacatgaagactgaagatgtcaatcctcgtcgaccagttcaagtcagacgaagtagatgggctcttggtgatgtaaccgaggtgttggatcataattcgtggaggcttgggaagattacagaagtactgaagaatgactattttgtcatcaggctagtgggttgcatccaaccaagagaattccacatatcttgcttgaggattccacatgatcgcaagcagttgactgttggaggcagggatgaagaagcacaggacgcacaagacgcacaatggattacacagtacatattgaagtgtcgaaaatggaaaatgactatttgtattgctgctgcagctatgggtatgtactatcttgacaaatattggaacaaagcagattacagaatacctactgagtctggttaccaatgggtgatgagatcattgggcaataggacttactgctatcaaaattatagaatgcataggaatgtgtttgatcttttgcataatgtcctagttgagtcctatggtttgacttcaactagaagaatgtcatcagttgagaccttagcattctttctgtggatgtgtggaactccccaaggcatgaggcaggcagaggacagactatttaggtccaaggaaaccttgagtaggaagtttgagaaagttttgaattgtcttaacaaactagctgttgacaacataaggcctttagatcctgagttcactacaattcaccctaggctgcagtcacgaagattctctcattactttgataattgcataggtgctatagatggcactcatataccagttgtagttccagcaaatcaggttgtgcaacatactggtaggaaagggtacactagtcaaaatgtgttggcaatctgtgacttcaacatgagattcactttcgtcgtcgcgggttggcatggatctgtacatgatatgagagtctttaaagatgcagttgacaaatatggcaacaagtttccccatccaccccaggcaagttttatcttgtggattcgggatatcccaacaggcagggttatctggcgccgtatagaggtacaaagtaccatcttcctgagtttcagcaaggtcctatgccaagaggaccatctacgcagggaacaaatgagttgacaaccacaacagttgatgaagacataaatatgaaccattttagagattcgatagctgatgggttgtttgctagacaatagttttttctttaagttgttgtaagagaaatagtttgtttgctgtgctcgacaattggatctgttccaggcaattgtttgttcccattagattgtgatgagaaatcagtttgcgttgtaatacaaactttgattgttgagaaaacaatttgaaataatataaaactgtttttttgaacagatatggaagaatgggtatgttggtctttttgtacagcattaattgcttcactatgtgttttagctagagtatccaaacatggtggactaaattttagcctgtgaactttagccctttggttttagctcagggtaaccaaacaggccctcagagcacagtaccagtgatgatgaccatcaatcagttggaaccggcagttgtttccctgatgatgttatgtctgcatgtgagtatgggcaggagactgaggacgcctatggctctggtttgtttcagaacgtccatgagctggagctgcgagcatatcgatcaaccgtcagagctctccatgctgcaggacccctgacgtgggagcaagagtcgctcctgacgaacctgcgcctctcgctcaacatctcgaacgaggagcacttgcttcagttgaggcatctcctagctctttgaatttttttcaaaaatcaatatgttttttaacacctgtggattacctccaactcgcagagatcaccgcaggcttgtagcgtgcgtaactcgagggtgtaactcgagggtgttgtatatagagaagagtccagagaaattcacctgtagctgttgtacttagccagaactttgttgctaggagtaagtcttgcatttttttagtgtttttacaatttcgaggaaatgtaaagcttcgaaatattagtcatactgataatcaaggtgggatatcagttcctttaaatgaa

SEQ ID NO: 23509 - DNA, 935 bp, Zea Mays
aacaggctgtggtcgggcaccatgtcgtgcttcctcatcgggatggagtagtagctctcggcgaacttggagaaagcccacctctgcacacacatgacacaacacaacaccaaggggttcttacttcttttcaaggggttcttttcaattcagatcatgcatgagatggatggatggatggatggaaattaccaagggagacagaagggtggccaaggcggacaggagaaggccttcgccaggcttgtggatgaggagttcagaaaagcggttgaggtagagccttgagatgtggaagccccaggcgaagtagtccggcaagacccagtgcttggtccggaccaccattgtgcaagggtgagcggtgccattcacttgcgcgcattcggcggcgatgtcgagcgccgacttcaggtagccaacgacggtgacacgcttgccccttatcgtctccttggccttgctcgagcccatcttggcgtagtccatggagtgcatcacctgcccgtcaaacacctctggaccttcgccctctgggaacgtcgtgggtacgttgggcacaccactgaacctccccacgcaaagaaccacaaagtctgctgcgtgtgtctgcagaaatcaagaacgtcgtgggtacgttgggcacaccactgatctcgctccatccaaatgcatgctagatatagcctaggcagctctgctcacctcaacgtggccgccgccgtcggcgtcggccacagacagaagccactctgttagcagcaggtagtggagatagatccgagacaggaattggaggtaggaagcaggaactagggattcaggaagatagcaagagattcataggaacagaggaagcagaggttagagacgaagaagaaggtctggtgctgtggcatgtttagtgcaatcttcattgcttgctgtcttgctgc

SEQ ID NO: 23510 - DNA, 2640 bp, Zea Mays
tcgtccactgctgcttgctggctgctcttgtccgctggtgcaaagatgtagatggcgggaggcagcgtcggcagcagtcagctccgctcgccgccggtgatgggtacgcaaacgcaagtacgtgtacgtttgcccgggtgtgtgcatcctgcacgcgcgctccgctcccgccatcccagtcccacgcacgccacactgtcactgcccgcccgctacggagtccggacgcagcgcagccagctttacccgccatctcctcccgccacgccaccgcacccgacccactgcttccttccctcgactggggccgactggctcgttgcctcccacccatccacggacccacctctttattcacccccgacacccctcctcccttcgctttcccctcctcgcctcgggggtgcgcgaatttcgactagggtttcgcggaccgagagggaagcggggagaggagagggcgggtagggtttccgcgggcgggccccgcatggcctcggcggcagcggcggcggtggcgccggccgcggaggagaagaagggcgcgggcgggccggtcacgggggacatggtcagcgcgggcttcgcggagctggagcggcagcagcggctgctcgccacctgcacgcgcctctaccagcacctgtccgaccacatcggctcgctcgagcgcgggctcgccgcgcgctccgacgcgctccgcgtccgccgcagggcattcgacgcgcgcacccaccgcgcgctcgactcgctccaccgccgcgaggcctccatcgacgcctccgtctcgcgcgcgctcgaccacctccactccatctccgccaaggggtcaccgccggctccggatccggcacacgccgccggcgccggcgcggccgagggcctgcgcgccctctgcgcgcggatggactccgccgcgttcctgggcttcgtggtggcccgccgcaaggaggccgacgcgctgcgggcggagatgccggcggctctcaagctctgcgtggatccggccaagttcgtcatggacgccgtcgccgacgtcttccccgtcgaccgccgcgaggcccggagccccgccgacctggcctgggcctgcgtgctcatcctcgaggccgccgtgcccgcgctcgccgacccggacccggacatcggccccgcgcgcccgctcgtgccgcgggcggcgcgcgagcgcgcgcggggcatggccagggagtggaaggacgccgccgagaagaaggggggcgtggagggggccaagccgcccgacgcgcacgccttcctgcagcacgtcgccacgttcgccgtcgcggagaaggaggacatgccgctgtaccgcaggattgtcgtcagcttctcctggcgccgacagatgccacgactcgccctcactctcggccttgaggaagaaatggctgatatcattgaggaactaattgctaagaggcagcagcttgatgctgtgaattttgcttacgaggctgggcttcaggagaagttccctccagttcctcttctgaagtcctacctggaggactctaagaagacgtcgaccgccgcttcagataattcaagcactagcagcagtgggcaatcagggagcaacgcgaacaagaaagagcagtctgcactgcgagctgtcatcaagtgtgtcgaggaccgtaatcttgaagccgagtttccactggagggtctccggaagcaactcgaagagctggagaaagccaagaccgagaagaagaaggcggcatcaagcgctaccagtggcggcagcagcagcggccctgcaaccaagcgcatccgcgcgagcaacggaggcccaatgcctcccgccaaggcaggtcgtctcgctaccaatgcctgcgcgtcttctttcccaggtcccaccacattcacccagtctccctcccacgcaccacacgccaatacctcctccccttcccatgcatcacacgccgccacagcctccccttcccacacatcctatgccacgccgcctccttacccggttggacatggcctgtactgcagccggagcccgccggtgatcaggggggagccatacgcttacccaccagccgaggaggtagtcggtttcaacgtcggcatcaccatgccatactccaccccacccatgagctacccccctgccccctatggcgggtacggcagcgggatggcagcttacgccaacggaatggcccctgctttccaccaggcttactaccggtaggttcagtcatgaaacaaaccaaaaacaaagtaaaacaacaaaaaaagtcgctgatgaatgacatgacaacaactgataatcgcgcaatggccctgttttgtagcgactgactacaacggtaggttgggtatgtcatcttctatgtcctttccatcaccaccactaggtttgtgtgttgtgtctagctcgtctcatcttagaccactgcctttcttttttcactggtaaggaacctggaacctgggtgtaaattatgtatggtatcagcgagactgtcgtcgcagccttgtgtaactctgttcggaactttgatctttttttttgttgttgttgaaaagatcagcatgtgatcgttaagtaccggatgtaccatgaactttaaccaaaagttttctcagtttagttgtaaaaat

SEQ ID NO: 23511 - DNA, 371 bp, Zea Mays
attgtgtttattattgactctatataacaatagtaggaagttagagccaacaaatttgctctaagtcagtcagtagtcgttctgaaccgagaaagagaatagtattttgggaagcaaactgagcatcttcggaaagcaaaagatgcgataaaagaccgagacctagagcagcccaggcttttagatgcaggcaagggaatgataccaagatgagaagttgattgagtaaactggtggcctcttaccctccaaatcgcagcacaaccatgtccgtccatccatccattccatccattcaactaaacccgtacatgcatctctgtctaggcagacgactctgtgcgatgcaaaatttgcttaggaacgcagag

SEQ ID NO: 23512 - DNA, 3437 bp, Zea Mays
gccggtccaactactaagccaccaggccggggctcatccctttcttccatggacgccccagagcgcgacgcgttaatggagggagctcctccgggtcaccttagctccgcgcacctcggagtgaaatgaatggccatctccatctcatcccctccacccctccccggctccacctcacctcactgtcccctaccttcctctccttcccgcccgcgccgtgtcctcatccgcctccccatgggccccatccccgcctacccctccgctcggtggccgtcgcggccgccgccgacccccgcgccgcgcacgcggcggcagtcaagtccggcgcgctcggcccctcctcagacgcccgcactgccaacgccgtcatgtgcgcgtaccttcgcgtgggccgcctgggcgacgcgcgggacgtgttcgactggatgcccgcgcgcgacgccgcctcctacagcgcgctcatctcgggctacgcgcgcctcgctggtggctccggctccgtcacggccaccgtcgcctccgcggagcttcttggacgcatgcgcctcgcggacgggctgctccccaccgagtacacctttgtgggcctcttcaccgcctgcgcccgcaggggcaacccgcgcctcgggacacaggtgcacgccctcgccgccaagtccggccactcctcgttgctcctcgtggccaacgcgatcctcggcatgtacgtcaagtgcggccgcttcggggacgcgatgagggcgttcgatggcatggaccgccgtgacgtctcgtcgtggaacgccgtcctggccgggctcgtcgagctggggcggcacgatgaggcgttcgagatgttcggcgagatgcgggcgagcgggaacgtccgcgccgacaggttcagtctgtcagcgctcctcacagcagcaggcgagggggttgggcagctccaaggggaggcggtgcatgctctgtcgttcaagtcggggctggagacggacctgagtgtgggcaacgcgctcatcgggttctacgcggagcatggtgcctctgttgaggacgtggtgagcgttttccagaggatgcccgtgaaggacgtgatttcgtggactggtttgctgaatgggtacatggagtttggtctcgttgacatggcactggatgtgtttgagcggatgccgcagaggaacttcgttacatacaatgcggttctcactgggttttgtcggaacaaggaaggcgtgcgcgccacttttgccaagaaggcggggctccgagggctgggtttgtttaggcaaatggtggaggatgggctggagatctcagatgtcacggtgacaggcgtgctgaatgcttgtgctattgctgcggataggaaggtgagcgagcaggttcatgcgtttgtgatcaagtgtggatgtgtgtctagtccatggagtgatgctgcgttgattgacatgtgcatcaaatgtggccgatctggagacgcgcatctgttatttgagcaatggcagcatgaggagagctttcacattgcctggaattctctactgctggcaagtgtcagaggtggtgagtatgagaaagcactttcgaccttccttcagatgtttagaagcagtggtgcagaattcattgatgagttcatgttgacttctgtccttggagtatgtggcagtctaggttttgctgaacttggaaaacaaatgcatacttttgctgcaaaatccgggcttctgagcgctcgtggagttggtaacgcaattatcagtatgtacggcaagtgtggggagttgaaagatgcaatcagtttgtttgagcggatgagttgtcgagacttggtgtcatggaatgcaatgatcactgcccatcttcttcttcatcagggggatgatatattgaagatatggtctgagatggagagatcaatggtcaggcctgattccattacctttcttctggtcatatctgcttgcagtcacacaagctcagactccacagacaaatgcagaaaactctttctttctatgccaagcacatatggcattgaaccagccatggagcactatgcagcctttgtttatgtccttggctgctggggccgttttgacgaggcagagcagcttataggtggtatgccattgcagcctggtgcattagtttggcggtctttgctagacagctgcagcaagcactccaacatggctgtgcggaggcgggccatgaagcatctgctggcattggaaccacaagacccgtccacgtacgtgctgacttcaaacctactatctgaatcagcaaggtggcgctcctctgagaacacaaggctagagatgtatgaaaagggtatgcgcaagatcccggccaggagctggacgtttcatggcaacatggtccactcatttttcgcacgggataaatcacacccacagtccagggacatatacgctggcctggatgtgctaatcctcgagtgcatcaaggccgggtacgagccagacaccacctttgttctgcacgacgtcgaggagtaccagaagaggcacttcctgatgtaccacagcatgaagctagcatcaatgtacggtcttctgatggcaggccctgggcagacaatccgcgtcgtgaagaacatccgcatgtgtggggactgtcactctttcttggagcacgcctctgctgccaccggtgcctgacgcatccacgtagatatttccagagtataagttcaacaccccggttgttttagtttcagttatcttacttttgctgttttgcttttatatcatccatcaaatcgttttgcaagattcctgtctgcacttcctctgtggcttgacttgccaaggccataggggaagcggcaatagggcgggcatttgaccaggcaggcatttccacagccgtccaggtccacaggccgggccgttggatgaaggatggctggcagagagagaactaaagcgaagacaataatgaggctagtcagagctgtcagatgctactcaatatgaaccatggccaccttgcttgtgctggagcatctgaaggagctcatgcatatctagttttggaaggcaatattgaaggttcccaacgtccatgtgctggttctagtttctttcaccttggggacatgtctgatagcatcgctgtcccctactgcatacacatatagtgtcgatctgctctcgcctttttccacatgcttggtcacctttgttctcatcctctcacactttcattctatatgggagcttaccggtacatggttggcattatacttgctcgatgtggtggcggtttccgagatgctgttggtgctgttggtctggatcaagggaaatcctgatgctaacgacacctgcactaagatgtggactagtcaatgacctgcagggcatgttcgttttaaactcaataattgaatagaattgagtgggtttaaatctatt

SEQ ID NO: 23513 - DNA, 2635 bp, Zea Mays
cagagcgcgacgcgttaatggagggagctcctccgggtcaccttagctccgcgcacctcggagtgaaatgaatggccatctccatctcatcccctccacccctccccggctccacctcacctcactgtcccctaccttcctctccttcccgcccgcgccgtgtcctcatccgcctccccatgggccccatccccgcctacccctccgctcggtggccgtcgcggccgccgccgacccccgcgccgcgcacgcggcggcagtcaagtccggcgcgctcggcccctcctcagacgcccgcactgccaacgccgtcatgtgcgcgtaccttcgcgtgggccgcctgggcgacgcgcgggacgtgttcgactggatgcccgcgcgcgacgccgcctcctacagcgcgctcatctcgggctacgcgcgcctcgctggtggctccggctccgtcacggccaccgtcgcctccgcggagcttcttggacgcatgcgcctcgcggacgggctgctccccaccgagtacacctttgtgggcctcttcaccgcctgcgcccgcaggggcaacccgcgcctcgggacacaggtgcacgccctcgccgccaagtccggccactcctcgttgctcctcgtggccaacgcgatcctcggcatgtacgtcaagtgcggccgcttcggggacgcgatgagggcgttcgatggcatggaccgccgtgacgtctcgtcgtggaacgccgtcctggccgggctcgtcgagctggggcggcacgatgaggcgttcgagatgttcggcgagatgcgggcgagcgggaacgtccgcgccgacaggttcagtctgtcagcgctcctcacagcagcaggcgagggggttgggcagctccaaggggaggcggtgcatgctctgtcgttcaagtcggggctggagacggacctgagtgtgggcaacgcgctcatcgggttctacgcggagcatggtgcctctgttgaggacgtggtgagcgttttccagaggatgcccgtgaaggacgtgatttcgtggactggtttgctgaatgggtacatggagtttggtctcgttgacatggcactggatgtgtttgagcggatgccgcagaggaacttcgttacatacaatgcggttctcactgggttttgtcggaacaaggaaggcgtgcgcgccacttttgccaagaaggcggggctccgagggctgggtttgtttaggcaaatggtggaggatgggctggagatctcagatgtcacggtgacaggcgtgctgaatgcttgtgctattgctgcggataggaaggtgagcgagcaggttcatgcgtttgtgatcaagtgtggatgtgtgtctagtccatggagtgatgctgcgttgattgacatgtgcatcaaatgtggccgatctggagacgcgcatctgttatttgagcaatggcagcatgaggagagctttcacattgcctggaattctctactgctggcaagtgtcagaggtggtgagtatgagaaagcactttcgaccttccttcagatgtttagaagcagtggtgcagaattcattgatgagttcatgttgacttctgtccttggagtatgtggcagtctaggttttgctgaacttggaaaacaaatgcatacttttgctgcaaaatccgggcttctgagcgctcgtggagttggtaacgcaattatcagtatgtacggcaagtgtggggagttgaaagatgcaatcagtttgtttgagcggatgagttgtcgagacttggtgtcatggaatgcaatgatcactgcccatcttcttcttcatcagggggatgatatattgaagatatggtctgagatggagagatcaatggtcaggcctgattccattacctttcttctggtcatatctgcttgcagtcacacaagctcagactccacagacaaatgcagaaaactctttctttctatgccaagcacatatggcattgaaccagccatggagcactatgcagcctttgtttatgtccttggctgctggggccgttttgacgaggcagagcagcttataggtggtatgccattgcagcctggtgcattagtttggcggtctttgctagacagctgcagcaagcactccaacatggctgtgcggaggcgggccatgaagcatctgctggcattggaaccacaagacccgtccacgtacgtgctgacttcaaacctactatctgaatcagcaaggtggcgctcctctgagaacacaaggctagagatgtatgaaaagggtatgcgcaagatcccggccaggagctggacgtttcatggcaacatggtccactcatttttcgcacgggataaatcacacccacagtccagggacatatacgctggcctggatgtgctaatcctcgagtgcatcaaggccgggtacgagccagacaccacctttgttctgcacgacgtcgaggagtaccagaagaggcacttcctgatgtaccacagcatgaagctagcatcaatgtacggtcttctgatggcaggccctgggcagacaatccgcgtcgtgaagaacatccgcatgtgtggggactgtcactctttcttggagcacgcctctgctgccaccgccgtccaggtccacaggccgggc

SEQ ID NO: 23514 - DNA, 3946 bp, Zea Mays
ctaaaacagccaccaatccgactctcgtccctccccgactcaccccactgcccagccgcacgcgccgccgtgtgttcgcgctctctcccactgtgtctgtgacgactgggtaggctacagccgccgcccgtcgccaggtgccgatcccttcgccgacgaagagcatccaccagagagaaatcgacttcactagatccgcacctgggctggatggtttgacgccatgtatgatgtttcgatcgtttcaggctccggccaagggcgtgatggcggctgtagggagcttgcagccgggggtggagactctacatgtgcaggattacaaggacgcgcctccagccaaggctgtggcggccgcggtagagagcttgcagccggcgatggagagcctacatgtgcaggaattcaaggacgcggctccggctaagggcgtttccgccgctgctgtagggagcttgcagccggggatggagaacctgcaggtgcaggattacaaggacgctagcatgtattatggtgcttacccggcttatccctatggagcaccctatggtggctggggggagtactccacatacttgagccatgatggagcacagacaccaactgctggcgcgtatgctgacatgtactatggccatgctgcatatggtcatatttatgggtctcagaattaccagtatccatcgacctacagcaagcaacagaattccactgccaagctgtcgtccaatggtaaaagtgagaaattggctccagctccggaaggggatgtctccactattgttgttgatgaggtgaaagtcctgaaaaatccaaacccgaccctgaaggcagacaggaatgcaccaggttccaatggttcatatggccgatctagtgtgcgttctggtaactatcagaaccagactagttggtcacactatccatattatagtagtgagatgttctctgacaagcagcaaaagtttaccagcaatcacaattcgactgctcccaatgataaaaccaaggggcagtcgaggaaccaaaacacgagacagtatcctcatctcatgggtctgcaaacaccaacttccccatcagtttactcagctaatggaatatatcggtatgatggcagctatggacctagcctttggtatggatcacacatgtatagttctgggttatatggtggatggaattcactgtatgatgggaagtacagaaccagaggaagatgtaataatggctattatgcttatggtaatggaagccttgatggctttaatgagctgaaaagagggccaagaagtgggatgtacacaaaccagctggggcttggagctactactgaagtaccagcaaaagagcaggaccttctgtctgctaatggttcacatcctgccatgaaggaccagtataatcgggctgactttgcggaaacatactcagacgcaaaattcttcattatcaaatcatacagtgaagacgatgttcacaagagcgtaaagtacaatgtgtgggctagcactccaaatggtaataagaaacttgatgctgcctatcaagaggctaaagaaaaatcaagcgaaactcctgttttccttcttttctctgtgaatgcaagtggccagtttgttgggcttgctgagatggtgggtcgtgttgattttaacaaaacagtagatcattggcaacaggacaagtggactggttgtttccctgtcaagtggcacattgtgaaggatgttccaaacagtttgctgaagcacatcattctcgagaacaatgaaaacaagccagtgacaaacagcagagatacacatgaggtgaagcttgagcaaggccttcaagtgcttaaggttttcaaggatcatgtgtgcaagacatctatactggatgactttggcttttacgataatcgtgagaagatgatgcaatataggaaagcaaagcagcagcagtcactgaaaaaggtcatcgatgtgaaggtgcctaacgccactgacgcagatacaagtctcgtaggaactggatcaacggaactcaccaatgttgaggctgatgtcttgaacaaagagctttcattagacaaagcagtagagaaaaacgaggagaaaggaaatgatgtcgccccacaggacctgaaatcatcagctgagaagtcggcaagcccaaatggctgttaatttttttttttttggttagctcggccattgacagtggtatggggcgggaacctgaggctgggggttgtttgaggaaatcctgagatcccattgagcttgtttcttgcccttgttttctatagttcatagaggattagttagttgcttgtgtgtttgggtgataggtgaggtcagtgtcctggcatggcaggtatttaggaatagaaggacgattaactggggtttacaatggtggttcatgggtttgaggttgtgtttccatctatttgcctttcccctctctatattccagttcctacctctctagattctggacaaacgtagtgcttatttaatgctggctggtttaagaacctgaaatggacaaaggaatccaatcaagtgtttacaaacttccttccctgattacattatgtgaaaaccgtctactctcaaacttgtacagctgtctgctatctgttgtgatccgaaccactatgttgagaagggcctgttgtatttgcattgcgtgaccggcttgtaaattcccatgttaatgttcacctagaacaaatgcatcactcactatgcttacaacaatttattttggaagaagcgtccttggtattttcacaaactgtcagtatgactggatctggctaatcccagcgtagtatttaatgttaaaaaaataagagaattgttctgggaaaagagaaaaggaacacagccttacagatgcaagtggaactgaagctaaaacttgagcagtaataatatgcgcactaattactggcaggtgaattcatctgcctgacccttctcttcactgactgcagcagctgtcacagctgatgaattcggatgccttttgttcataaaaggcccgtccgcccgttactggcccaactagtgcgaagtaaccctaacaaaacaggcaccgatccggctctcctccgtgactccgtcccactgcccagccgctgtgcgttcgcgctctctcccacactgtctgcgacgactgcgtgggtgggtgggtgggctaccgccgccgcccgtcgccaggtgccgatctcttcacacccttgaccctcctctcgcgtctgccgtgcgagaacgtaccgccacgacgaacgatggggaggccgagcagggggcggcagcgcatcgagatccgtcgcatcgaagaaggcggccggctgcaggtcaccttctcgaagcgcaagtccggcctgcaaaagaaggccgccgagctctccctcctctgcggctcgccggtcgccgtcgtcatcttctcccccggcaggaaggtgttcgcgctgggcaccccctcggtcgaccacgtcctccgccgccacgctcctccggtcctcggcgaaggagaggaggacgggctccttccggcgctccaggacggaaacgtcgtgatgagcagcagcgctatcgccgaccgcgcggaggtggagaacatcgtgcggcgtacggaggagaccaaggcgcgttcggtggcggagaaggcgcggatggacgccgtcgggaaggccgtgaggcaggccgcggcaaaggccggaaggaggttctggtgggaggcggactccggcgagctcggggacgctgagctgccaggattcgccaaggcgctccgtcggctcagggtcaacctgcagcgccatttggactcgctgtcggcgtctgctaataagcaactgcagtaggagcggctgtgcaaaactggctcatttcatttggtgttgcttaggcacttagggtatattactaatgtttacaacgtt

SEQ ID NO: 23515 - DNA, 3870 bp, Zea Mays
accaatccgactctcgtccctccccgactcaccccactgcccagccgcacgcgccgccgtgtgttcgcgctctctcccactgtgtctgtgacgactgggtaggctacagccgccgcccgtcgccaggtgccgatcccttcgccgacgaagagcatccaccagagagaaatcgacttcactagatccgcacctgggctggatggtttgacgccatgtatgatgtttcgatcgtttcaggctccggccaagggcgtgatggcggctgtagggagcttgcagccgggggtggagactctacatgtgcaggattacaaggacgcgcctccagccaaggctgtggcggccgcggtagagagcttgcagccggcgatggagagcctacatgtgcaggaattcaaggacgcggctccggctaagggcgtttccgccgctgctgtagggagcttgcagccggggatggagaacctgcaggtgcaggattacaaggacgctagcatgtattatggtgcttacccggcttatccctatggagcaccctatggtggctggggggagtactccacatacttgagccatgatggagcacagacaccaactgctggcgcgtatgctgacatgtactatggccatgctgcatatggtcatatttatgggtctcagaattaccagtatccatcgacctacagcaagcaacagaattccactgccaagctgtcgtccaatggtaaaagtgagaaattggctccagctccggaaggggatgtctccactattgttgttgatgaggtgaaagtcctgaaaaatccaaacccgaccctgaaggcagacaggaatgcaccaggttccaatggttcatatggccgatctagtgtgcgttctggtaactatcagaaccagactagttggtcacactatccatattatagtagtgagatgttctctgacaagcagcaaaagtttaccagcaatcacaattcgactgctcccaatgataaaaccaaggggcagtcgaggaaccaaaacacgagacagtatcctcatctcatgctatggacctagcctttggtatggatcacacatgtatagttctgggttatatggtggatggaattcactgtatgatgggaagtacagaaccagaggaagatgtaataatggctattatgcttatggtaatggaagccttgatggctttaatgagctgaaaagagggccaagaagtgggatgtacacaaaccagctggggcttggagctactactgaagtaccagcaaaagagcaggaccttctgtctgctaatggttcacatcctgccatgaaggaccagtataatcgggctgactttgcggaaacatactcagacgcaaaattcttcattatcaaatcatacagtgaagacgatgttcacaagagcgtaaagtacaatgtgtgggctagcactccaaatggtaataagaaacttgatgctgcctatcaagaggctaaagaaaaatcaagcgaaactcctgttttccttcttttctctgtgaatgcaagtggccagtttgttgggcttgctgagatggtgggtcgtgttgattttaacaaaacagtagatcattggcaacaggacaagtggactggttgtttccctgtcaagtggcacattgtgaaggatgttccaaacagtttgctgaagcacatcattctcgagaacaatgaaaacaagccagtgacaaacagcagagatacacatgaggtgaagcttgagcaaggccttcaagtgcttaaggttttcaaggatcatgtgtgcaagacatctatactggatgactttggcttttacgataatcgtgagaagatgatgcaatataggaaagcaaagcagcagcagtcactgaaaaaggtcatcgatgtgaaggtgcctaacgccactgacgcagatacaagtctcgtaggaactggatcaacggaactcaccaatgttgaggctgatgtcttgaacaaagagctttcattagacaaagcagtagagaaaaacgaggagaaaggaaatgatgtcgccccacaggacctgaaatcatcagctgagaagtcggcaagcccaaatggctgttaatttttttttttttggttagctcggccattgacagtggtatggggcgggaacctgaggctgggggttgtttgaggaaatcctgagatcccattgagcttgtttcttgcccttgttttctatagttcatagaggattagttagttgcttgtgtgtttgggtgataggtgaggtcagtgtcctggcatggcaggtatttaggaatagaaggacgattaactggggtttacaatggtggttcatgggtttgaggttgtgtttccatctatttgcctttcccctctctatattccagttcctacctctctagattctggacaaacgtagtgcttatttaatgctggctggtttaagaacctgaaatggacaaaggaatccaatcaagtgtttacaaacttccttccctgattacattatgtgaaaaccgtctactctcaaacttgtacagctgtctgctatctgttgtgatccgaaccactatgttgagaagggcctgttgtatttgcattgcgtgaccggcttgtaaattcccatgttaatgttcacctagaacaaatgcatcactcactatgcttacaacaatttattttggaagaagcgtccttggtattttcacaaactgtcagtatgactggatctggctaatcccagcgtagtatttaatgttaaaaaaataagagaattgttctgggaaaagagaaaaggaacacagccttacagatgcaagtggaactgaagctaaaacttgagcagtaataatatgcgcactaattactggcaggtgaattcatctgcctgacccttctcttcactgactgcagcagctgtcacagctgatgaattcggatgccttttgttcataaaaggcccgtccgcccgttactggcccaactagtgcgaagtaaccctaacaaaacaggcaccgatccggctctcctccgtgactccgtcccactgcccagccgctgtgcgttcgcgctctctcccacactgtctgcgacgactgcgtgggtgggtgggtgggctaccgccgccgcccgtcgccaggtgccgatctcttcacacccttgaccctcctctcgcgtctgccgtgcgagaacgtaccgccacgacgaacgatggggaggccgagcagggggcggcagcgcatcgagatccgtcgcatcgaagaaggcggccggctgcaggtcaccttctcgaagcgcaagtccggcctgcaaaagaaggccgccgagctctccctcctctgcggctcgccggtcgccgtcgtcatcttctcccccggcaggaaggtgttcgcgctgggcaccccctcggtcgaccacgtcctccgccgccacgctcctccggtcctcggcgaaggagaggaggacgggctccttccggcgctccaggacggaaacgtcgtgatgagcagcagcgctatcgccgaccgcgcggaggtggagaacatcgtgcggcgtacggaggagaccaaggcgcgttcggtggcggagaaggcgcggatggacgccgtcgggaaggccgtgaggcaggccgcggcaaaggccggaaggaggttctggtgggaggcggactccggcgagctcggggacgctgagctgccaggattcgccaaggcgctccgtcggctcagggtcaacctgcagcgccatttggactcgctgtcggcgtctgctaataagcaactgcagtaggagcggctgtgcaaaactggctcatttcatttggtgttgcttaggcacttagggtatattactaatgtttacaacgtt

SEQ ID NO: 23516 - DNA, 1588 bp, Zea Mays
ctgctgacatgaatttcacacaatgctttactgcttttctggtaggtttgaggtaaaaaaaatgcgagacgacaacgacgaaagcgagcaggcatggccgcgagcttatctctccacgtcactgccggctgcgggtccaagaagaagaagaggtacaagcaggcggggaagagcagagcagtgaccagtgagctgcttgtccaagaatcgctcccactcccggctgtcgggagagcgcagcccagctagccgcctccgcttcttggaggtcgatggccgcgaaggggttgagggaggtggggaggaggagggcggcggaggtcgggcggcgctgcttgtctggcgggagcgctgggccgccggcgccggcggcgaagcggaaggagggagggaaggcggtgaacctgttcacggccgtcaaccaggcgctccacatcgccctcgacaccgacccccgattgtcaatgaagcagctaagttcagatatcggagtggaaatgaatttaactgtggaggcttaacgattcgaactccctatggtgctgttgggcatggtggtcattaccattcacagtcaccagaggctttcttctgtcacgttcctggactcaaggttgtcataccacggagtccacgcgaggctaaggggttgctgttggccagcatccgagatccaaacccagttgtattttttgagccaaagtggctgtatcgcttggctgttgaagaagttcccgaggaggattacatgctgccattatccgaggcagaagtgattagggaaggaagtgatataacacttgttggatggggagctcagcttgcggtgctgaaagaagcctgtgaagatgctgcaaaggatggggtgtcttgcgaactcatcgatctgaaaacactcgtaccatgggacaaggaaacggtagaggcctcggtgaagaagaccgggaagctcctcgttagccacgaggctccagtcaccgggggcttcggcgcggagatcgccgcgtccattgccgagcgctgcttccagaggttagaagcacccgtggcgagagtctgcggtctcgacacccctttccctctcgtgtacgagccattttacatgcccaccaagaacaaggtcctggacgcgataaaagccactgtagatttctgaaacatgttgcttgatcgatacagagtactctagtagtctagttagatgtgcacggtttgtgctggtctgggtctgtagcctgaggatgagcgatccacaaaccggcttatttgtattcaacaatacagcgataaataaagccgcaaggtgcaaaattgtaggatgtcatgatgtatcgaagtgttcccagcgaaattcgttgtatgtaattgtcgcactgatcagtggtatgttctgtctgagcttgaagtcttgatgccactacacgcacacgaggacacgacataggccgcgccatggctgtgtgttaggagtggctgccatgtggggctattgccagggagcaagtgggtttctacaactataaaaggacatttgtataggctaagaaggacatcatcaattatcagaatacaaacacaattatcatat

SEQ ID NO: 23517 - DNA, 1791 bp, Zea Mays
ctgctgacatgaatttcacacaatgctttactgcttttctggtaggtttgaggtaaaaaaaatgcgagacgacaacgacgaaagcgagcaggcatggccgcgagcttatctctccacgtcactgccggctgcgggtccaagaagaagaagaggtacaagcaggcggggaagagcagagcagtgaccagtgagctgcttgtccaagaatcgctcccactcccggctgtcgggagagcgcagcccagctagccgcctccgcttcttggaggtcgatggccgcgaaggggttgagggaggtggggaggaggagggcggcggaggtcgggcggcgctgcttgtctggcgggagcgctgggccgccggcgccggcggcgaagcggaaggagggagggaaggcggtgaacctgttcacggccgtcaaccaggcgctccacatcgccctcgacaccgacccccgcgcctacgtcttcggagaggacgtcgggttcggcggcgtcttccgctgcacgacaggcctcgccgatcggttcggcaagagcagagtgttcaacacgccgttgtgtgagcagggtattgctggatttgccatcggcctagcagcgatgggcaatcgagctatcgcagaaatccagtttgcggactacatatttccagcctttgatcagattgtcaatgaagcagctaagttcagatatcggagtggaaatgaatttaactgtggaggcttaacgattcgaactccctatggtgctgttgggcatggtggtcattaccattcacagtcaccagaggctttcttctgtcacgttcctggactcaaggttgtcataccacggagtccacgcgaggctaaggggttgctgttggccagcatccgagatccaaacccagttgtattttttgagccaaagtggctgtatcgcttggctgttgaagaagttcccgaggaggattacatgctgccattatccgaggcagaagtgattagggaaggaagtgatataacacttgttggatggggagctcagcttgcggtgctgaaagaagcctgtgaagatgctgcaaaggatggggtgtcttgcgaactcatcgatctgaaaacactcgtaccatgggacaaggaaacggtagaggcctcggtgaagaagaccgggaagctcctcccacgaggctccagtcaccgggggcttcggcgcggagatcgccgcgtccattgccgagcgctgcttccagaggttagaagcacccgtggcgagagtctgcggtctcgacacccctttccctctcgtgtacgagccattttacatgcccaccaagaacaaggtcctggacgcgataaaagccactgtagatttctgaaacatgttgcttgatcgatacagagtactctagtagtctagttagatgtgcacggtttgtgctggtctgggtctgtagcctgaggatgagcgatccacaaaccggcttatttgtattcaacaatacagcgataaataaagccgcaaggtgcaaaattgtaggatgtcatgatgtatcgaagtgttcccagcgaaattcgttgtatgtaattgtcgcactgatcagtggtatgttctgtctgagcttgaagtcttgatgccactacacgcacacgaggacacgacataggccgcgccatggctgtgtgttaggagtggctgccatgtggggctattgccagggagcaagtgggtttctacaactataaaaggacatttgtataggctaagaaggacatcatcaattatcagaatacaaacacaattatcatat

SEQ ID NO: 23518 - DNA, 1916 bp, Zea Mays
ctgctgacatgaatttcacacaatgctttactgcttttctggtaggtttgaggtaaaaaaaatgcgagacgacaacgacgaaagcgagcaggcatggccgcgagcttatctctccacgtcactgccggctgcgggtccaagaagaagaagaggtacaagcaggcggggaagagcagagcagtgaccagtgagctgcttgtccaagaatcgctcccactcccggctgtcgggagagcgcagcccagctagccgcctccgcttcttggaggtcgatggccgcgaaggggttgagggaggtggggaggaggagggcggcggaggtcgggcggcgctgcttgtctggcgggagcgctgggccgccggcgccggcggcgaagcggaaggagggagggaaggcggtgaacctgttcacggccgtcaaccaggcgctccacatcgccctcgacaccgacccccgcgcctacgtcttcggagaggacgtcgggttcggcggcgtcttccgctgcacgacaggcctcgccgatcggttcggcaagagcagagtgttcaacacgccgttgtgtgagcagggtattgctggatttgccatcggcctagcagcgatgggcaatcgagctatcgcagaaatccagtttgcggactacatatttccagcctttgatcagattgtcaatgaagcagctaagttcagatatcggagtggaaatgaatttaactgtggaggcttaacgattcgaactccctatggtgctgttgggcatggtggtcattaccattcacagtcaccagaggctttcttctgtcacgttcctggactcaaggttgtcataccacggagtccacgcgaggctaaggggttgctgttggccagcatccgagatccaaacccagttgtattttttgagccaaagtggctgtatcgcttggctgttgaagaagttcccgaggaggattacatgctgccattatccgaggcagaacttatgtactttaggtgattagggaaggaagtgatataacacttgttggatggggagctcagcttgcggtgctgaaagaagcctgtgaagatgctgcaaaggatggggtgtcttgcgaactcatcgatctgaaaacactcgtaccatgggacaaggaaacggtagaggcctcggtgaagaagaccgggaagctcctcgtatgcagcttaattctcacctatgctcacacatctattgacatcagcttaattctcacctatgctctgcacgtctgtaccgttcctcatacaagttctgtaacaggttagccacgaggctccagtcaccgggggcttcggcgcggagatcgccgcgtccattgccgagcgctgcttccagaggttagaagcacccgtggcgagagtctgcggtctcgacacccctttccctctcgtgtacgagccattttacatgcccaccaagaacaaggtcctggacgcgataaaagccactgtagatttctgaaacatgttgcttgatcgatacagagtactctagtagtctagttagatgtgcacggtttgtgctggtctgggtctgtagcctgaggatgagcgatccacaaaccggcttatttgtattcaacaatacagcgataaataaagccgcaaggtgcaaaattgtaggatgtcatgatgtatcgaagtgttcccagcgaaattcgttgtatgtaattgtcgcactgatcagtggtatgttctgtctgagcttgaagtcttgatgccactacacgcacacgaggacacgacataggccgcgccatggctgtgtgttaggagtggctgccatgtggggctattgccagggagcaagtgggtttctacaactataaaaggacatttgtataggctaagaaggacatcatcaattatcagaatacaaacacaattatcatat

SEQ ID NO: 23519 - DNA, 1807 bp, Zea Mays
ctgctgacatgaatttcacacaatgctttactgcttttctggtaggtttgaggtaaaaaaaatgcgagacgacaacgacgaaagcgagcaggcatggccgcgagcttatctctccacgtcactgccggctgcgggtccaagaagaagaagaggtacaagcaggcggggaagagcagagcagtgaccagtgagctgcttgtccaagaatcgctcccactcccggctgtcgggagagcgcagcccagctagccgcctccgcttcttggaggtcgatggccgcgaaggggttgagggaggtggggaggaggagggcggcggaggtcgggcggcgctgcttgtctggcgggagcgctgggccgccggcgccggcggcgaagcggaaggagggagggaaggcggtgaacctgttcacggccgtcaaccaggcgctccacatcgccctcgacaccgacccccgcgcctacgtcttcggagaggacgtcgggttcggcggcgtcttccgctgcacgacaggcctcgccgatcggttcggcaagagcagagtgttcaacacgccgttgtgtgagcagggtattgctggatttgccatcggcctagcagcgatgggcaatcgagctatcgcagaaatccagtttgcggactacatatttccagcctttgatcagattgtcaatgaagcagctaagttcagatatcggagtggaaatgaatttaactgtggaggcttaacgattcgaactccctatggtgctgttgggcatggtggtcattaccattcacagtcaccagaggctttcttctgtcacgttcctggactcaaggttgtcataccacggagtccacgcgaggctaaggggttgctgttggccagcatccgagatccaaacccagttgtattttttgagccaaagtggctgtatcgcttggctgttgaagaagttcccgaggaggattacatgctgccattatccgaggcagaagtgattagggaaggaagtgatataacacttgttggatggggagctcagcttgcggtgctgaaagaagcctgtgaagatgctgcaaaggatggggtgtcttgcgaactcatcgatctgaaaacactcgtaccatgggacaaggaaacggtagaggcctcggtgaagaagaccgggaagctcctcttctgtaacaggttagccacgaggctccagtcaccgggggcttcggcgcggagatcgccgcgtccattgccgagcgctgcttccagaggttagaagcacccgtggcgagagtctgcggtctcgacacccctttccctctcgtgtacgagccattttacatgcccaccaagaacaaggtcctggacgcgataaaagccactgtagatttctgaaacatgttgcttgatcgatacagagtactctagtagtctagttagatgtgcacggtttgtgctggtctgggtctgtagcctgaggatgagcgatccacaaaccggcttatttgtattcaacaatacagcgataaataaagccgcaaggtgcaaaattgtaggatgtcatgatgtatcgaagtgttcccagcgaaattcgttgtatgtaattgtcgcactgatcagtggtatgttctgtctgagcttgaagtcttgatgccactacacgcacacgaggacacgacataggccgcgccatggctgtgtgttaggagtggctgccatgtggggctattgccagggagcaagtgggtttctacaactataaaaggacatttgtataggctaagaaggacatcatcaattatcagaatacaaacacaattatcatat

SEQ ID NO: 23520 - DNA, 1399 bp, Zea Mays
cagctttccgattcgctctcgaatcgaaacccctcggtttcggaacccccactccacctacgcctacgtcttcggagaggacgtcgggttcggcggcgtcttccgctgcacgacaggcctcgccgatcggttcggcaagagcagagtgttcaacacgccgttgtgtgagcagggtattgctggatttgccatcggcctagcagcgatgggcaatcgagctatcgcagaaatccagtttgcggactacatatttccagcctttgatcagattgtcaatgaagcagctaagttcagatatcggagtggaaatgaatttaactgtggaggcttaacgattcgaactccctatggtgctgttgggcatggtggtcattaccattcacagtcaccagaggctttcttctgtcacgttcctggactcaaggttgtcataccacggagtccacgcgaggctaaggggttgctgttggccagcatccgagatccaaacccagttgtattttttgagccaaagtggctgtatcgcttggctgttgaagaagttcccgaggaggattacatgctgccattatccgaggcagaagtgattagggaaggaagtgatataacacttgttggatggggagctcagcttgcggtgctgaaagaagcctgtgaagatgctgcaaaggatggggtgtcttgcgaactcatcgatctgaaaacactcgtaccatgggacaaggaaacggtagaggcctcggtgaagaagaccgggaagctcctcgttagccacgaggctccagtcaccgggggcttcggcgcggagatcgccgcgtccattgccgagcgctgcttccagaggttagaagcacccgtggcgagagtctgcggtctcgacacccctttccctctcgtgtacgagccattttacatgcccaccaagaacaaggtcctggacgcgataaaagccactgtagatttctgaaacatgttgcttgatcgatacagagtactctagtagtctagttagatgtgcacggtttgtgctggtctgggtctgtagcctgaggatgagcgatccacaaaccggcttatttgtattcaacaatacagcgataaataaagccgcaaggtgcaaaattgtaggatgtcatgatgtatcgaagtgttcccagcgaaattcgttgtatgtaattgtcgcactgatcagtggtatgttctgtctgagcttgaagtcttgatgccactacacgcacacgaggacacgacataggccgcgccatggctgtgtgttaggagtggctgccatgtggggctattgccagggagcaagtgggtttctacaactataaaaggacatttgtataggctaagaaggacatcatcaattatcagaatacaaacacaattatcatat

SEQ ID NO: 23521 - DNA, 1486 bp, Zea Mays
aaaggacatacgtactgcgaagtaaccctaacgcctggtgccagccgccgcgctctcgctcgctctaacgccgacgcctggtgccgactgccgaggccttcgctggttactagcaccgccccagctccttctcccttttccggcggaggtgaacaccgccaccactagagcgccacgatgaggccgatcctgatgaagggccacgagcgcccgctgacgttcctgcgctacaaccgcgacggggacctcctgttctcctgcgctaaggaccacacccccacggtctggtacgccgacaacggcgatcgcctcggcacctaccgcggccacaacggcgccgtctggacctgcgacgtctcccgcgactcggcgcgcctcattaccggatccgccgaccagaccgcaaagctatgggaggtcagcacggggaaggagctcttcagctttcgtttcgacgcgcccgccaggtccgtcgagttcgccatcggggacgcgctcgccgtcgtcaccaccgacaacttcatggaccacgttcccaccgttcaggtcaagcgcatcgccgaggacatcgacgaccagacggaggagtctgcactcgtcatcaccggcatcaagggaaggatcaacagggccgtttggggcccgctgaacaggaccattatcactgccggggaggatgccaccattcgcatctgggactcagagactggacagctgctgaaagagtctgataaagaatctggacatcagaagaccatttcatcgttgtcaaaatccttggactggtcgcattttatcactggctccttggataaatctgcaaagctatgggatacaagaacgctaaccctgatcaagacgtatgtcacagagagacctgttaatgctgttgacatctctcccactcatgatactgtggttctaggaggtggtcaggatgcaatgaatgtgactatgacagatcgccgtgctggtaaattcgaggctaaattctatcacaagattttgcaagaggaaattggtggtgttaaaggacattttgggccaattaatgctttggcatttaatcctgatgggcggagtttttcaagtggcggtgaagatggttatgtaaggctgcatcattttgattccgactacttcagcatcaagatgtagataaagaacaccagactaacccgaggtgctgctggttggccatgacgcacgcagagcaggctcagctcctctaggggtagtggcagtctgttgcttgttttaagacgatgttgctccggacaagcagctttgtcttctgcatgaggaatttgtgcacacatggcaatgaaaagatccttgaaccgctgtcttgagctgtcgttctcgatccatggtttccaatctagtttcgatttgtattctctgttcatctaattgttccaatacggtagtagacacatttcaaaacccgtgtttttttgtttgcttaaaaggcaaattttacttg

SEQ ID NO: 23522 - DNA, 1576 bp, Zea Mays
actgcgaagtaaccctaacgcctggtgccagccgccgcgctctcgctcgctctaacgccgacgcctggtgccgactgccgaggccttcgctggttactagcaccgccccagctccttctcccttttccggcggaggtgaacaccgccaccactagagcgccacgatgaggccgatcctgatgaagggccacgagcgcccgctgacgttcctgcgctacaaccgcgacggggacctcctgttctcctgcgctaaggaccacacccccacggtctggtacgccgacaacggcgatcgcctcggcacctaccgcggccacaacggcgccgtctggacctgcgacgtctcccgcgactcggcgcgcctcattaccggatccgccgaccagaccgcaaagctatgggaggtcagcacggggaaggagctcttcagctttcgtttcgacgcgcccgccaggtccgtcgagttcgccatcggggacgcgctcgccgtcgtcaccaccgacaacttcatggaccacgttcccaccgttcaggtcaagcgcatcgccgaggacatcgacgaccagacggaggagtctgcactcgtcatcaccggcatcaagggaaggatcaacagggccgtttggggcccgctgaacaggaccattatcactgccggggaggatgccaccattcgcatctgggactcagagactggacagctgctgaaagagtctgataaagaatctggacatcagaagaccatttcatcgttgtcaaaatccttggactggtcgcattttatcactggctccttggataaatctgcaaaggtggttctaggaggtggtcaggatgcaatgaatgtgactatgacagatcgccgtgctggtaaattcgaggctaaattctatcacaagattttgcaagaggaaattggtggtgttaaaggacattttgggccaattaatgctttggcatttaatcctgatgggcggagtttttcaagtggcggtgaagatggttatgtaaggctgcatcattttgattccgactacttcagcatcaagatgtagataaagaacaccagactaacccgagctgcatcactggtctgttgcaacaaatggcaacgctgaagtatcctaagaaatccatttcttgcattcgctgttcaaaatacagctgcgatggttgttttgacctccaccgtttcattccttttcaggctgtttgaggcccaactcctccagtttcttggttcaggtgctgttttagtttttttttggttcaggtgctgctggttggccatgacgcacgcagagcaggctcagctcctctaggggtagtggcagtctgttgcttgttttaagacgatgttgctccggacaagcagctttgtcttctgcatgaggaatttgtgcacacatggcaatgaaaagatccttgaaccgctgtcttgagctgtcgttctcgatccatggtttccaatctagtttcgatttgtattctctgttcatctaattgttccaatacggtagtagacacatttcaaaacccgtgtttttttgtttgcttaaaaggcaaattttacttg

SEQ ID NO: 23523 - DNA, 1254 bp, Zea Mays
ggccacaccttccgtctcccggcctccgctcgcctgtccctgtctctctctctcctcgctgagtcgccgccagccatgaacaacctcctcacggattcctttgagctcccccggcgggactcctcaagagatgcagacattgaaatgggaatgcatcaagctgatgcttcagacaacttaaaagatttcttgaagaaggtcgatacaattgagagtttaattgcaaagctgacaaatctattgaataagctacagactgcaaatgaggaatccaaagcagttacaaaagcaagttccatgaaagcaattaagcagcggatggagaaagatattgatgaagtggggaaaattgctcgtcaggcgaagacaaaagttgatgaattggaaaaagacaacttatcaaataggcaaaaacctggatgtggaaaaggttctgccgtggaccgatcaagagagcaaactactggtgaaaaagaaattgaaggagcggatggatgactttcagaccttgagagaagcaatcaggcaagagtatcgggaggttgttgaaagaagggtttttactgtaactggtaatcgtcctgatgaagagacaattgatgacttgatagagaccggaaaaagtgagcaaatattcaaagatgctatccaacatcagggaagaggccagatactagacactgttgctgaaatacaggagcgacatgatgctgtaagggatctagagaggaagcttctggagttgcaacagatattcatggacatggcagttcttgttgaggcgcaaggagacatgatcaacaacatcgagacccatgtctcgaacgccaccaaccacatacagcaaggtgtgagcgcgctccagaacgcgaagaaactgcagaggaattcgaggaagtggatgtgctacgccatcatcatactgctggtgatagtcgtggtcattgtcgtcgcagtcatccagccatggaagaagggcacctagcgtggtggtgccttttttcctgtttgtgtaatatgtgtgcagttttttttgtgggtgattcgtgatttgttgttgtacctatagtcgacgcaacaggagctctggcatttcgattcattctgtctagtgaaaggacactgccatcatatgccgataaaaataacgcttcgtatccgtcggtgaaaagattgatctctccacttggtctgggtgtgcagtgtgctgccgccccttgccgtcgtggacatgggatggcgccaggtgttcac

SEQ ID NO: 23524 - DNA, 278 bp, Zea Mays
ccttcacgttccccgtcgagaaggttcgaccttctctgatctccatcctgcccctggcaagctcgtcactgccattcctagcatgggcgctggggcttgactcctgcgtcgtactcatcttcctcaacacctcacctacgcccaccaggtgttcgacagagtgccatctgtccgtcttgcaggctggacatggacatcggccaccatgtgaatggcctgcgtaagcacccatccaacgaggaaatggaaggaaatagtggatgattgggtgaggctgc

SEQ ID NO: 23525 - DNA, 4086 bp, Zea Mays
ggaagcctccgcagtccgcacgaggcctggaactttccacgggtccaaaacccctctctctctatcgctcctctccctttctctctccgccccccatcccctcgcgatttccacctcctcccccacccccacctccgtaacccacttccaggtgggccccccacatcgccgccggtgacacgcacctccctccctgcctcccccgctaccgaccaccacgtccacgcccccggtcatgacgacctcgccgccgcccgccgagcaggaacagcaggaggaagaggaggtgctggtgccgcatggcccgcaccaggagctgcccaatggagcgcagccaatggaagttgtgcctgctgagccagctgctaccgtggagaaccaacagatagaggatccaccaatctcgagatttacttggaccattgagaatttatcaagagttagcacaaagaagctctactctgaaatttttgttgttggaggctacaagtggcgaattttgattttccctcgggggaataatgttgaattcttatctatgtatttggatgtagctgattctggagtcttgccctatggatggactagatacgcacaattcagcctctctgtggttaatcagattcacaacaagttcacaataagaaaagaaacacaacatcagttctctgctcgagaaagtgattggggtttcacttcatttatgccgctgggtgaactctacaacccaagtaggggttatcttgtaaatgatacttgtatagtggaagctgaagttgctgtgtgtaaagttgttgagtattggagttatgactctaaaaaggaaactggctatgttggtcttaaaaatcagggtgctacctgctatatgaattctcttcttcagacactctaccacattccgtatttcagaaaggctgtttatcacatgcccaccaccgagaacgatatgccctcaggaagcatcccactagctctacagtcactcttttataagttgcagtataatgacagcagtgtctctacaaaggagctcacaaaatcgtttgggtgggatatgcatgattcatttatgcaacatgatgtacaagaattgaacagagttctttccgagaagttggaagataagatgaagggaactgttgtggagggaacgatacaacaattgtttgaagggcaccacatgaactacattgagtgtatcaatgtggatttcaaatcaacaagaaaggaatccttctatgatctccagcttgatgtcaaaggttgtcaggatgtctatgcttcatttgataagtacgtagaagtggagcgtctggaaggtgacaacaagtatcatgccgacaaacatggcctgcaggatgcaaaaaaaggagttctttttatcgacttccctcctgttttgcaacttcagctaaaacgttttgagtatgatttcatgcgtgacacgatggtgaagataaacgatcgttatgaatttccactccaattggatcttgatagagataatggaaaatatttatctcctgatgctgacaggaatgtgcgtaatctttatacccttcacagtgttcttgtccatagtggtggtgttcatggtggacattactatgctttcatacgacctacactttctgatcaatggttcaagtttgatgatgagcgtgtgacaaaagaagatgcaaagagggcactagaagagcaatatggtggtgaggaggagctacctcagacaaatcctggcttaaacaacaccccattcaagtttactaaatattcaaatgcatacatgcttgtgtacattcgtgaaagtgacaaggacaaaattatatgtaatgtggatgagaaagatatagcggagcatcttcggattagattagaaaatgaccgtgaagagaaggaacgtcggaagaaggaaaaagcggaggcacacctctatactataatcaaggttgcaagggatgatgacttaaaagctcagatagggaaagacatatattttgatcttgttgatcatgataaagtcccaagcttccgtatccagaaacagatgacctttgctcaattcaaggaggaggtagcaaaagagtttggtattcctacacagtttcaacgattttggctgtgggccaagcgacaaaaccatacctaccgacctaacaggccattgtgtcctcaagacgaagcacatactgttgggcagctaaaggaactggtgaacaaggcccacaacgcagaactgaaactgttcttggaagttgaacttggactggaccttaaacctcttcctcttcccgacaagactagagaagatatatttcttttcttcaaactctatgaacctgaaaaggaacagctgcggtatgttggtaggctttttgtaaaggcttcaggaagaccacaggacattctgctgaagttaaggatgttggcaggtttttcacaggatgatgatattgaactttatgaggaaattaagttcgagcccaatgtgatgtgtgaatacattgacaacaggcttctgtttcgatcttgccagcttgaagacggggatataatttgttttcaaaagccttcaaaaccagatagtgcagaccgatatcgatttcctgacgtcccatcctttttgacgtatatacgtaaccggcaggtggtgcacttccgttcattggagaagcccaaggacgacgaattttgccttgagatgtcaaagattttcacatatgatcaagtcgtggaaaaagtagctgaaaaacttggcgtggatgacccatcgaaaattcgtcttacatcacataattgttattcgcaacagcctaagcctcaaccaataaagtacagaggcgttgaacgtctactggatatgctgattcattataaccagacttctgatattctgtactatgaagtattggacataccacttccagaattacaagcgctgaagacattaaaagttacctaccatcatgccacaaaagatgaggtgtcagttcacagtataagattaccaaaaaacagcactgttggcgatgtgctgaatgatatcaaaacgaaggttgagttgtctcataccaatgctgagctaagattacttgaggtcttttatcacaagatatacaaggtatttgcaccaaatgaaaagattgaaaacatcaatgatcagtactggacactgcgtgcagaggaggttccagaggaggagaaaaatcttggccccttcgatcgtttgattcatgtatatcattttacaaaagacactcaaaaccaaacgcaagttcagaactttggagaacctttttttatggttattcgtgaggatgagaccctatcttctatcaaagaacgtatacagaaaaagcttaaggttccagatgaggatttctcaaagtggaagtttgcatacatttcactcggtcgtcctgactattttgaagattcagatactgtagccctaaaattccagagaaacatgtatggagcttgggagcagtatcttggactggaacatccggacacggctcctaggaaggcacacacggctaatcagaaccggcattcattcgagagacctgtaaaaatttataactaggcatgttagaaattgagcgatgagctgccgctcaataccaagccaggctgaagttgctggcttgaaatagagagcatgttgctcaggtttttcgatggagctgtggaactagttcagaggagactgatcgggcgacttgtcatctttcctgtttgttttgctgccccggatatataaagttgtacagagatgaccccaccagacaattgtctttagtagataagataactttttacagtcgagtggccgatgttttagtcgatcactctgttctgcagttggtggtggtgctaggtggccttgagctgttgagggtacttgtctttcgactctttctgtatattattgacgcggcggatgtttgtaattccaatgatacatttcttacttgctggtttccggtgctttccttgctgcatcattctaatttggcattataatttagaattgagcgatgttcatcaccacttccatgatctattcgcagctgttct

SEQ ID NO: 23526 - DNA, 4100 bp, Zea Mays
ggaagcctccgcagtccgcacgaggcctggaactttccacgggtccaaaacccctctctctctatcgctcctctccctttctctctccgccccccatcccctcgcgatttccacctcctcccccacccccacctccgtaacccacttccaggtgggccccccacatcgccgccggtgacacgcacctccctccctgcctcccccgctaccgaccaccacgtccacgcccccggtcatgacgacctcgccgccgcccgccgagcaggaacagcaggaggaagaggaggtgctggtgccgcatggcccgcaccaggagctgcccaatggagcgcagccaatggaagttgtgcctgctgagccagctgctaccgtggagaaccaacagatagaggatccaccaatctcgagatttacttggaccattgagaatttatcaagagttagcacaaagaagctctactctgaaatttttgttgttggaggctacaagtggcgaattttgattttccctcgggggaataatgttgaattcttatctatgtatttggatgtagctgattctggagtcttgccctatggatggactagatacgcacaattcagcctctctgtggttaatcagattcacaacaagttcacaataagaaaagaaacacaacatcagttctctgctcgagaaagtgattggggtttcacttcatttatgccgctgggtgaactctacaacccaagtaggggttatcttgtaaatgatacttgtatagtggaagctgaagttgctgtgtgtaaagttgttgagtattggagttatgactctaaaaaggaaactggctatgttggtcttaaaaatcagggtgctacctgctatatgaattctcttcttcagacactctaccacattccgtatttcagaaagatatctcttgccaggctgtttatcacatgcccaccaccgagaacgatatgccctcaggaagcatcccactagctctacagtcactcttttataagttgcagtataatgacagcagtgtctctacaaaggagctcacaaaatcgtttgggtgggatatgcatgattcatttatgcaacatgatgtacaagaattgaacagagttctttccgagaagttggaagataagatgaagggaactgttgtggagggaacgatacaacaattgtttgaagggcaccacatgaactacattgagtgtatcaatgtggatttcaaatcaacaagaaaggaatccttctatgatctccagcttgatgtcaaaggttgtcaggatgtctatgcttcatttgataagtacgtagaagtggagcgtctggaaggtgacaacaagtatcatgccgacaaacatggcctgcaggatgcaaaaaaaggagttctttttatcgacttccctcctgttttgcaacttcagctaaaacgttttgagtatgatttcatgcgtgacacgatggtgaagataaacgatcgttatgaatttccactccaattggatcttgatagagataatggaaaatatttatctcctgatgctgacaggaatgtgcgtaatctttatacccttcacagtgttcttgtccatagtggtggtgttcatggtggacattactatgctttcatacgacctacactttctgatcaatggttcaagtttgatgatgagcgtgtgacaaaagaagatgcaaagagggcactagaagagcaatatggtggtgaggaggagctacctcagacaaatcctggcttaaacaacaccccattcaagtttactaaatattcaaatgcatacatgcttgtgtacattcgtgaaagtgacaaggacaaaattatatgtaatgtggatgagaaagatatagcggagcatcttcggattagattagaaaatgaccgtgaagagaaggaacgtcggaagaaggaaaaagcggaggcacacctctatactataatcaaggttgcaagggatgatgacttaaaagctcagatagggaaagacatatattttgatcttgttgatcatgataaagtcccaagcttccgtatccagaaacagatgacctttgctcaattcaaggaggaggtagcaaaagagtttggtattcctacacagtttcaacgattttggctgtgggccaagcgacaaaaccatacctaccgacctaacaggccattgtgtcctcaagacgaagcacatactgttgggcagctaaaggaactggtgaacaaggcccacaacgcagaactgaaactgttcttggaagttgaacttggactggaccttaaacctcttcctcttcccgacaagactagagaagatatatttcttttcttcaaactctatgaacctgaaaaggaacagctgcggtatgttggtaggctttttgtaaaggcttcaggaagaccacaggacattctgctgaagttaaggatgttggcaggtttttcacaggatgatgatattgaactttatgaggaaattaagttcgagcccaatgtgatgtgtgaatacattgacaacaggcttctgtttcgatcttgccagcttgaagacggggatataatttgttttcaaaagccttcaaaaccagatagtgcagaccgatatcgatttcctgacgtcccatcctttttgacgtatatacgtaaccggcaggtggtgcacttccgttcattggagaagcccaaggacgacgaattttgccttgagatgtcaaagattttcacatatgatcaagtcgtggaaaaagtagctgaaaaacttggcgtggatgacccatcgaaaattcgtcttacatcacataattgttattcgcaacagcctaagcctcaaccaataaagtacagaggcgttgaacgtctactggatatgctgattcattataaccagacttctgatattctgtactatgaagtattggacataccacttccagaattacaagcgctgaagacattaaaagttacctaccatcatgccacaaaagatgaggtgtcagttcacagtataagattaccaaaaaacagcactgttggcgatgtgctgaatgatatcaaaacgaaggttgagttgtctcataccaatgctgagctaagattacttgaggtcttttatcacaagatatacaaggtatttgcaccaaatgaaaagattgaaaacatcaatgatcagtactggacactgcgtgcagaggaggttccagaggaggagaaaaatcttggccccttcgatcgtttgattcatgtatatcattttacaaaagacactcaaaaccaaacgcaagttcagaactttggagaacctttttttatggttattcgtgaggatgagaccctatcttctatcaaagaacgtatacagaaaaagcttaaggttccagatgaggatttctcaaagtggaagtttgcatacatttcactcggtcgtcctgactattttgaagattcagatactgtagccctaaaattccagagaaacatgtatggagcttgggagcagtatcttggactggaacatccggacacggctcctaggaaggcacacacggctaatcagaaccggcattcattcgagagacctgtaaaaatttataactaggcatgttagaaattgagcgatgagctgccgctcaataccaagccaggctgaagttgctggcttgaaatagagagcatgttgctcaggtttttcgatggagctgtggaactagttcagaggagactgatcgggcgacttgtcatctttcctgtttgttttgctgccccggatatataaagttgtacagagatgaccccaccagacaattgtctttagtagataagataactttttacagtcgagtggccgatgttttagtcgatcactctgttctgcagttggtggtggtgctaggtggccttgagctgttgagggtacttgtctttcgactctttctgtatattattgacgcggcggatgtttgtaattccaatgatacatttcttacttgctggtttccggtgctttccttgctgcatcattctaatttggcattataatttagaattgagcgatgttcatcaccacttccatgatctattcgcagctgttct

SEQ ID NO: 23527 - DNA, 4116 bp, Zea Mays
ggaagcctccgcagtccgcacgaggcctggaactttccacgggtccaaaacccctctctctctatcgctcctctccctttctctctccgccccccatcccctcgcgatttccacctcctcccccacccccacctccgtaacccacttccaggtgggccccccacatcgccgccggtgacacgcacctccctccctgcctcccccgctaccgaccaccacgtccacgcccccggtcatgacgacctcgccgccgcccgccgagcaggaacagcaggaggaagaggaggtgctggtgccgcatggcccgcaccaggagctgcccaatggagcgcagccaatggaagttgtgcctgctgagccagctgctaccgtggagaaccaacagatagaggatccaccaatctcgagatttacttggaccattgagaatttatcaagagttagcacaaagaagctctactctgaaatttttgttgttggaggctacaagtggcgaattttgattttccctcgggggaataatgttgaattcttatctatgtatttggatgtagctgattctggagtcttgccctatggatggactagatacgcacaattcagcctctctgtggttaatcagattcacaacaagttcacaataagaaaagaaacacaacatcagttctctgctcgagaaagtgattggggtttcacttcatttatgccgctgggtgaactctacaacccaagtaggggttatcttgtaaatgatacttgtatagtggaagctgaagttgctgtgtgtaaagttgttgagtattggagttatgactctaaaaaggaaactggctatgttggtcttaaaaatcagggtgctacctgctatatgaattctcttcttcagacactctaccacattccgtatttcagaaagatacagctaactacagatatctcttgccaggctgtttatcacatgcccaccaccgagaacgatatgccctcaggaagcatcccactagctctacagtcactcttttataagttgcagtataatgacagcagtgtctctacaaaggagctcacaaaatcgtttgggtgggatatgcatgattcatttatgcaacatgatgtacaagaattgaacagagttctttccgagaagttggaagataagatgaagggaactgttgtggagggaacgatacaacaattgtttgaagggcaccacatgaactacattgagtgtatcaatgtggatttcaaatcaacaagaaaggaatccttctatgatctccagcttgatgtcaaaggttgtcaggatgtctatgcttcatttgataagtacgtagaagtggagcgtctggaaggtgacaacaagtatcatgccgacaaacatggcctgcaggatgcaaaaaaaggagttctttttatcgacttccctcctgttttgcaacttcagctaaaacgttttgagtatgatttcatgcgtgacacgatggtgaagataaacgatcgttatgaatttccactccaattggatcttgatagagataatggaaaatatttatctcctgatgctgacaggaatgtgcgtaatctttatacccttcacagtgttcttgtccatagtggtggtgttcatggtggacattactatgctttcatacgacctacactttctgatcaatggttcaagtttgatgatgagcgtgtgacaaaagaagatgcaaagagggcactagaagagcaatatggtggtgaggaggagctacctcagacaaatcctggcttaaacaacaccccattcaagtttactaaatattcaaatgcatacatgcttgtgtacattcgtgaaagtgacaaggacaaaattatatgtaatgtggatgagaaagatatagcggagcatcttcggattagattagaaaatgaccgtgaagagaaggaacgtcggaagaaggaaaaagcggaggcacacctctatactataatcaaggttgcaagggatgatgacttaaaagctcagatagggaaagacatatattttgatcttgttgatcatgataaagtcccaagcttccgtatccagaaacagatgacctttgctcaattcaaggaggaggtagcaaaagagtttggtattcctacacagtttcaacgattttggctgtgggccaagcgacaaaaccatacctaccgacctaacaggccattgtgtcctcaagacgaagcacatactgttgggcagctaaaggaactggtgaacaaggcccacaacgcagaactgaaactgttcttggaagttgaacttggactggaccttaaacctcttcctcttcccgacaagactagagaagatatatttcttttcttcaaactctatgaacctgaaaaggaacagctgcggtatgttggtaggctttttgtaaaggcttcaggaagaccacaggacattctgctgaagttaaggatgttggcaggtttttcacaggatgatgatattgaactttatgaggaaattaagttcgagcccaatgtgatgtgtgaatacattgacaacaggcttctgtttcgatcttgccagcttgaagacggggatataatttgttttcaaaagccttcaaaaccagatagtgcagaccgatatcgatttcctgacgtcccatcctttttgacgtatatacgtaaccggcaggtggtgcacttccgttcattggagaagcccaaggacgacgaattttgccttgagatgtcaaagattttcacatatgatcaagtcgtggaaaaagtagctgaaaaacttggcgtggatgacccatcgaaaattcgtcttacatcacataattgttattcgcaacagcctaagcctcaaccaataaagtacagaggcgttgaacgtctactggatatgctgattcattataaccagacttctgatattctgtactatgaagtattggacataccacttccagaattacaagcgctgaagacattaaaagttacctaccatcatgccacaaaagatgaggtgtcagttcacagtataagattaccaaaaaacagcactgttggcgatgtgctgaatgatatcaaaacgaaggttgagttgtctcataccaatgctgagctaagattacttgaggtcttttatcacaagatatacaaggtatttgcaccaaatgaaaagattgaaaacatcaatgatcagtactggacactgcgtgcagaggaggttccagaggaggagaaaaatcttggccccttcgatcgtttgattcatgtatatcattttacaaaagacactcaaaaccaaacgcaagttcagaactttggagaacctttttttatggttattcgtgaggatgagaccctatcttctatcaaagaacgtatacagaaaaagcttaaggttccagatgaggatttctcaaagtggaagtttgcatacatttcactcggtcgtcctgactattttgaagattcagatactgtagccctaaaattccagagaaacatgtatggagcttgggagcagtatcttggactggaacatccggacacggctcctaggaaggcacacacggctaatcagaaccggcattcattcgagagacctgtaaaaatttataactaggcatgttagaaattgagcgatgagctgccgctcaataccaagccaggctgaagttgctggcttgaaatagagagcatgttgctcaggtttttcgatggagctgtggaactagttcagaggagactgatcgggcgacttgtcatctttcctgtttgttttgctgccccggatatataaagttgtacagagatgaccccaccagacaattgtctttagtagataagataactttttacagtcgagtggccgatgttttagtcgatcactctgttctgcagttggtggtggtgctaggtggccttgagctgttgagggtacttgtctttcgactctttctgtatattattgacgcggcggatgtttgtaattccaatgatacatttcttacttgctggtttccggtgctttccttgctgcatcattctaatttggcattataatttagaattgagcgatgttcatcaccacttccatgatctattcgcagctgttct

SEQ ID NO: 23528 - DNA, 3909 bp, Zea Mays
ccctctctctctatcgctcctctccctttctctctccgccccccatcccctcgcgatttccacctcctcccccacccccacctccgtaacccacttccaggtgggccccccacatcgccgccggtgacacgcacctccctccctgcctcccccgctaccgaccaccacgtccacgcccccggtcatgacgacctcgccgccgcccgccgagcaggaacagcaggaggaagaggaggtgctggtgccgcatggcccgcaccaggagctgcccaatggagcgcagccaatggaagttgtgcctgctgagccagctgctaccgtggagaaccaacagatagaggatccaccaatctcgagatttacttggaccattgagaatttatcaagagttagcacaaagaagctctactctgaaatttttgttgttggaggctacaagtggcgaattttgattttccctcgggggaataatgttgaattcttatctatgtatttggatgtagctgattctggagtcttgccctatggatggactagatacgcacaattcagcctctctgtggttaatcagattcacaacaagttcacaataagaaaagaaacacaacatcagttctctgctcgagaaagtgattggggtttcacttcatttatgccgctgggtgaactctacaacccaagtaggggttatcttgtaaatgatacttgtatagtggaagctgaagttgctgtgtgtaaagttgttgagtattggagttatgactctaaaaaggaaactggctatgttggtcttaaaaatcagggtgctacctgctatatgaattctcttcttcagacactctaccacattccgtatttcagaaaggtagaaacgagaaatcacatgccactgcccatgtgctcaacctgttctgatagatacagctaactacagatatctcttgccaggctgtttatcacatgcccaccaccgagaacgatatgccctcaggaagcatcccactagctctacagtcactcttttataagttgcagtataatgacagcagtgtctctacaaaggagctcacaaaatcgtttgggtgggatatgcatgattcatttatgcaacatgatgtacaagaattgaacagagttctttccgagaagttggaagataagatgaaggtttgacatctggaactgttgtggagggaacgatacaacaattgtttgaagggcaccacatgaactacattgagtgtatcaatgtggatttcaaatcaacaagaaaggaatccttctatgatctccagcttgatgtcaaaggttgtcaggatgtctatgcttcatttgataagtacgtagaagtggagcgtctggaaggtgacaacaagtatcatgccgacaaacatggcctgcagataaacgatcgttatgaatttccactccaattggatcttgatagagataatggaaaatatttatctcctgatgctgacaggaatgtgcgtaatctttatacccttcacagtgttcttgtccatagtggtggtgttcatggtggacattactatgctttcatacgacctacactttctgatcaatggttcaagtttgatgatgagcgtgtgacaaaagaagatgcaaagagggcactagaagagcaatatggtggtgaggaggaggctctaatgcctaaatctgctctcagattagattagaaaatgaccgtgaagagaaggaacgtcggaagaaggaaaaagcggaggcacacctctatactataatcaaggttgcaagggatgatgacttaaaagctcagatagggaaagacatatattttgatcttgttgatcatgataaagtcccaagcttccgtatccagaaacagatgacctttgctcaattcaaggaggaggtagcaaaagagtttggtattcctacacagtttcaacgattttggctgtgggccaagcgacaaaaccatacctaccgacctaacaggccattgtgtcctcaagacgaagcacatactgttgggcagctaaaggaactggtgaacaaggcccacaacgcagaactgaaactgttcttggaagttgaacttggactggaccttaaacctcttcctcttcccgacaagactagagaagatatatttcttttcttcaaactctatgaacctgaaaaggaacagctgcggtatgttggtaggctttttgtaaaggcttcaggaagaccacaggacattctgctgaagttaaggatgttggcaggtttttcacaggatgatgatattgaactttatgaggaaattaagttcgagcccaatgtgatgtgtgaatacattgacaacaggcttctgtttcgatcttgccagcttgaagacggggatataatttgttttcaaaagccttcaaaaccagatagtgcagaccgatatcgatttcctgacgtcccatcctttttgacgtatatacgtaaccggcaggtggtgcacttccgttcattggagaagcccaaggacgacgaattttgccttgagatgtcaaagattttcacatatgatcaagtcgtggaaaaagtagctgaaaaacttggcgtggatgacccatcgaaaattcgtcttacatcacataattgttattcgcaacagcctaagcctcaaccaataaagtacagaggcgttgaacgtctactggatatgctgattcattataaccagacttctgatattctgtactatgaagtattggacataccacttccagaattacaagcgctgaagacattaaaagttacctaccatcatgccacaaaagatgaggtgtcagttcacagtataagattaccaaaaaacagcactgttggcgatgtgctgaatgatatcaaaacgaaggttgagttgtctcataccaatgctgagctaagattacttgaggtcttttatcacaagatatacaaggtatttgcaccaaatgaaaagattgaaaacatcaatgatcagtactggacactgcgtgcagaggaggttccagaggaggagaaaaatcttggccccttcgatcgtttgattcatgtatatcattttacaaaagacactcaaaaccaaacgcaagttcagaactttggagaacctttttttatggttattcgtgaggatgagaccctatcttctatcaaagaacgtatacagaaaaagcttaaggttccagatgaggatttctcaaagtggaagtttgcatacatttcactcggtcgtcctgactattttgaagattcagatactgtagccctaaaattccagagaaacatgtatggagcttgggagcagtatcttggactggaacatccggacacggctcctaggaaggcacacacggctaatcagaaccggcattcattcgagagacctgtaaaaatttataactaggcatgttagaaattgagcgatgagctgccgctcaataccaagccaggctgaagttgctggcttgaaatagagagcatgttgctcaggtttttcgatggagctgtggaactagttcagaggagactgatcgggcgacttgtcatctttcctgtttgttttgctgccccggatatataaagttgtacagagatgaccccaccagacaattgtctttagtagataagataactttttacagtcgagtggccgatgttttagtcgatcactctgttctgcagttggtggtggtgctaggtggccttgagctgttgagggtacttgtctttcgactctttctgtatattattgacgcggcggatgtttgtaattccaatgatacatttcttacttgctggtttccggtgctttccttgctgcatcattctaatttggcattataatttagaattgagcgatgttcatcaccacttccatgatctattcgcagctgttct

SEQ ID NO: 23529 - DNA, 3982 bp, Zea Mays
ctctatcgctcctctccctttctctctccgccccccatcccctcgcgatttccacctcctcccccacccccacctccgtaacccacttccaggtgggccccccacatcgccgccggtgacacgcacctccctccctgcctcccccgctaccgaccaccacgtccacgcccccggtcatgacgacctcgccgccgcccgccgagcaggaacagcaggaggaagaggaggtgctggtgccgcatggcccgcaccaggagctgcccaatggagcgcagccaatggaagttgtgcctgctgagccagctgctaccgtggagaaccaacagatagaggatccaccaatctcgagatttacttggaccattgagaatttatcaagagttagcacaaagaagctctactctgaaatttttgttgttggaggctacaagtggcgaattttgattttccctcgggggaataatgttgaattcttatctatgtatttggatgtagctgattctggagtcttgccctatggatggactagatacgcacaattcagcctctctgtggttaatcagattcacaacaagttcacaataagaaaagaaacacaacatcagttctctgctcgagaaagtgattggggtttcacttcatttatgccgctgggtgaactctacaacccaagtaggggttatcttgtaaatgatacttgtatagtggaagctgaagttgctgtgtgtaaagttgttgagtattggagttatgactctaaaaaggaaactggctatgttggtcttaaaaatcagggtgctacctgctatatgaattctcttcttcagacactctaccacattccgtatttcagaaaggctgtttatcacatgcccaccaccgagaacgatatgccctcaggaagcatcccactagctctacagtcactcttttataagttgcagtataatgacagcagtgtctctacaaaggagctcacaaaatcgtttgggtgggatatgcatgattcatttatgcaacatgatgtacaagaattgaacagagttctttccgagaagttggaagataagatgaagggaactgttgtggagggaacgatacaacaattgtttgaagggcaccacatgaactacattgagtatctccagcttgatgtcaaaggttgtcaggatgtctatgcttcatttgataagtacgtagaagtggagcgtctggaaggtgacaacaagtatcatgccgacaaacatggcctgcaggatgcaaaaaaaggagttctttttatcgacttccctcctgttttgcaacttcagctaaaacgttttgagtatgatttcatgcgtgacacgatggtgaagataaacgatcgttatgaatttccactccaattggatcttgatagagataatggaaaatatttatctcctgatgctgacaggaatgtgcgtaatctttatacccttcacagtgttcttgtccatagtggtggtgttcatggtggacattactatgctttcatacgacctacactttctgatcaatggttcaagtttgatgatgagcgtgtgacaaaagaagatgcaaagagggcactagaagagcaatatggtggtgaggaggagctacctcagacaaatcctggcttaaacaacaccccattcaagtttactaaatattcaaatgcatacatgcttgtgtacattcgtgaaagtgacaaggacaaaattatatgtaatgtggatgagaaagatatagcggagcatcttcggattagattagaaaatgaccgtgaagagaaggaacgtcggaagaaggaaaaagcggaggcacacctctatactataatcaaggttgcaagggatgatgacttaaaagctcagatagggaaagacatatattttgatcttgttgatcatgataaagtcccaagcttccgtatccagaaacagatgacctttgctcaattcaaggaggaggtagcaaaagagtttggtattcctacacagtttcaacgattttggctgtgggccaagcgacaaaaccatacctaccgacctaacaggccattgtgtcctcaagacgaagcacatactgttgggcagctaaaggaactggtgaacaaggcccacaacgcagaactgaaactgttcttggaagttgaacttggactggaccttaaacctcttcctcttcccgacaagactagagaagatatatttcttttcttcaaactctatgaacctgaaaaggaacagctgcggtatgttggtaggctttttgtaaaggcttcaggaagaccacaggacattctgctgaagttaaggatgttggcaggtttttcacaggatgatgatattgaactttatgaggaaattaagttcgagcccaatgtgatgtgtgaatacattgacaacaggcttctgtttcgatcttgccagcttgaagacggggatataatttgttttcaaaagccttcaaaaccagatagtgcagaccgatatcgatttcctgacgtcccatcctttttgacgtatatacgtaaccggcaggtggtgcacttccgttcattggagaagcccaaggacgacgaattttgccttgagatgtcaaagattttcacatatgatcaagtcgtggaaaaagtagctgaaaaacttggcgtggatgacccatcgaaaattcgtcttacatcacataattgttattcgcaacagcctaagcctcaaccaataaagtacagaggcgttgaacgtctactggatatgctgattcattataaccagacttctgatattctgtactatgaagtattggacataccacttccagaattacaagcgctgaagacattaaaagttacctaccatcatgccacaaaagatgaggtgtcagttcacagtataagattaccaaaaaacagcactgttggcgatgtgctgaatgatatcaaaacgaaggttgagttgtctcataccaatgctgagctaagattacttgaggtcttttatcacaagatatacaaggtatttgcaccaaatgaaaagattgaaaacatcaatgatcagtactggacactgcgtgcagaggaggttccagaggaggagaaaaatcttggccccttcgatcgtttgattcatgtatatcattttacaaaagacactcaaaaccaaacgcaagttcagaactttggagaacctttttttatggttattcgtgaggatgagaccctatcttctatcaaagaacgtatacagaaaaagcttaaggttccagatgaggatttctcaaagtggaagtttgcatacatttcactcggtcgtcctgactattttgaagattcagatactgtagccctaaaattccagagaaacatgtatggagcttgggagcagtatcttggactggaacatccggacacggctcctaggaaggcacacacggctaatcagaaccggcattcattcgagagacctgtaaaaatttataactaggcatgttagaaattgagcgatgagctgccgctcaataccaagccaggctgaagttgctggcttgaaatagagagcatgttgctcaggtttttcgatggagctgtggaactagttcagaggagactgatcgggcgacttgtcatctttcctgtttgttttgctgccccggatatataaagttgtacagagatgaccccaccagacaattgtctttagtagataagataactttttacagtcgagtggccgatgttttagtcgatcactctgttctgcagttggtggtggtgctaggtggccttgagctgttgagggtacttgtctttcgactctttctgtatattattgacgcggcggatgtttgtaattccaatgatacatttcttacttgctggtttccggtgctttccttgctgcatcattctaatttggcattataatttagaattgagcgatgttcatcaccacttccatgatctattcgcagctgttct

SEQ ID NO: 23530 - DNA, 3864 bp, Zea Mays
ctctccgccccccatcccctcgcgatttccacctcctcccccacccccacctccgtaacccacttccaggtgggccccccacatcgccgccggtgacacgcacctccctccctgcctcccccgctaccgaccaccacgtccacgcccccggtcatgacgacctcgccgccgcccgccgaggaacagcaggaggaagaggaggtgctggtgccgcatggcccgcaccaggagctgcccaatggagcgcagccaatggaagttgtgcctgctgagccagctgctaccgtggagaaccaacagatagaggatccaccaatctcgagatttacttggaccattgagaatttatcaagagttagcacaaagaagctctactctgaaatttttgttgttggaggctacaagtggcgaattttgattttccctcgggggaataatgttgaattcttatctatgtatttggatgtagctgattctggagtcttgccctatggatggactagatacgcacaattcagcctctctgtggttaatcagattcacaacaagttcacaataagaaaagaaacacaacatcagttctctgctcgagaaagtgattggggtttcacttcatttatgccgctgggtgaactctacaacccaaggtgctacctgctatatgaattctcttcttcagacactctaccacattccgtatttcagaaaggctgtttatcacatgcccaccaccgagaacgatatgccctcaggaagcatcccactagctctacagtcactcttttataagttgcagtataatgacagcagtgtctctacaaaggagctcacaaaatcgtttgggtgggatatgcatgattcatttatgcaacatgatgtacaagaattgaacagagttctttccgagaagttggaagataagatgaagggaactgttgtggagggaacgatacaacaattgtttgaagggcaccacatgaactacattgagtgtatcaatgtggatttcaaatcaacaagaaaggaatccttctatgatctccagcttgatgtcaaaggttgtcaggatgtctatgcttcatttgataagtacgtagaagtggagcgtctggaaggtgacaacaagtatcatgccgacaaacatggcctgcaggatgcaaaaaaaggagttctttttatcgacttccctcctgttttgcaacttcagctaaaacgttttgagtatgatttcatgcgtgacacgatggtgaagataaacgatcgttatgaatttccactccaattggatcttgatagagataatggaaaatatttatctcctgatgctgacaggaatgtgcgtaatctttatacccttcacagtggtggtgttcatggtggacattactatgctttcatacgacctacactttctgatcaatggttcaagtttgatgatgagcgtgtgacaaaagaagatgcaaagagggcactagaagagcaatatggtggtgaggaggagctacctcagacaaatcctggcttaaacaacaccccattcaagtttactaaatattcaaatgcatacatgcttgtgtacattcgtgaaagtgacaaggacaaaattatatgtaatgtggatgagaaagatatagcggagcatcttcggattagattagaaaatgaccgtgaagagaaggaacgtcggaagaaggaaaaagcggaggcacacctctatactataatcaaggttgcaagggatgatgacttaaaagctcagatagggaaagacatatattttgatcttgttgatcatgataaagtcccaagcttccgtatccagaaacagatgacctttgctcaattcaaggaggaggtagcaaaagagtttggtattcctacacagtttcaacgattttggctgtgggccaagcgacaaaaccatacctaccgacctaacaggccattgtgtcctcaagacgaagcacatactgttgggcagctaaaggaactggtgaacaaggcccacaacgcagaactgaaactgttcttggaagttgaacttggactggaccttaaacctcttcctcttcccgacaagactagagaagatatatttcttttcttcaaactctatgaacctgaaaaggaacagctgcggtatgttggtaggctttttgtaaaggcttcaggaagaccacaggacattctgctgaagttaaggatgttggcaggtttttcacaggatgatgatattgaactttatgaggaaattaagttcgagcccaatgtgatgtgtgaatacattgacaacaggcttctgtttcgatcttgccagcttgaagacggggatataatttgttttcaaaagccttcaaaaccagatagtgcagaccgatatcgatttcctgacgtcccatcctttttgacgtatatacgtaaccggcaggtggtgcacttccgttcattggagaagcccaaggacgacgaattttgccttgagatgtcaaagattttcacatatgatcaagtcgtggaaaaagtagctgaaaaacttggcgtggatgacccatcgaaaattcgtcttacatcacataattgttattcgcaacagcctaagcctcaaccaataaagtacagaggcgttgaacgtctactggatatgctgattcattataaccagacttctgatattctgtactatgaagtattggacataccacttccagaattacaagcgctgaagacattaaaagttacctaccatcatgccacaaaagatgaggtgtcagttcacagtataagattaccaaaaaacagcactgttggcgatgtgctgaatgatatcaaaacgaaggttgagttgtctcataccaatgctgagctaagattacttgaggtcttttatcacaagatatacaaggtatttgcaccaaatgaaaagattgaaaacatcaatgatcagtactggacactgcgtgcagaggaggttccagaggaggagaaaaatcttggccccttcgatcgtttgattcatgtatatcattttacaaaagacactcaaaaccaaacgcaagttcagaactttggagaacctttttttatggttattcgtgaggatgagaccctatcttctatcaaagaacgtatacagaaaaagcttaaggttccagatgaggatttctcaaagtggaagtttgcatacatttcactcggtcgtcctgactattttgaagattcagatactgtagccctaaaattccagagaaacatgtatggagcttgggagcagtatcttggactggaacatccggacacggctcctaggaaggcacacacggctaatcagaaccggcattcattcgagagacctgtaaaaatttataactaggcatgttagaaattgagcgatgagctgccgctcaataccaagccaggctgaagttgctggcttgaaatagagagcatgttgctcaggtttttcgatggagctgtggaactagttcagaggagactgatcgggcgacttgtcatctttcctgtttgttttgctgccccggatatataaagttgtacagagatgaccccaccagacaattgtctttagtagataagataactttttacagtcgagtggccgatgttttagtcgatcactctgttctgcagttggtggtggtgctaggtggccttgagctgttgagggtacttgtctttcgactctttctgtatattattgacgcggcggatgtttgtaattccaatgatacatttcttacttgctggtttccggtgctttccttgctgcatcattctaatttggcattataatttagaattgagcgatgttcatcaccacttccatgatctattcgcagctgttct

SEQ ID NO: 23531 - DNA, 4100 bp, Zea Mays
ctctccgccccccatcccctcgcgatttccacctcctcccccacccccacctccgtaacccacttccaggtgggccccccacatcgccgccggtgacacgcacctccctccctgcctcccccgctaccgaccaccacgtccacgcccccggtcatgacgacctcgccgccgcccgccgagcaggaacagcaggaggaagaggaggtgctggtgccgcatggcccgcaccaggagctgcccaatggagcgcagccaatggaagttgtgcctgctgagccagctgctaccgtggagaaccaacagatagaggatccaccaatctcgagatttacttggaccattgagaatttatcaagagttagcacaaagaagctctactctgaaatttttgttgttggaggctacaagtggcgaattttgattttccctcgggggaataatgttgaattcttatctatgtatttggatgtagctgattctggagtcttgccctatggatggactagatacgcacaattcagcctctctgtggttaatcagattcacaacaagttcacaataagaaaagaaacacaacatcagttctctgctcgagaaagtgattggggtttcacttcatttatgccgctgggtgaactctacaacccaagtaggggttatcttgtaaatgatacttgtatagtggaagctgaagttgctgtgtgtaaagttgttgagtattggagttatgactctaaaaaggaaactggctatgttggtcttaaaaatcagggtgctacctgctatatgaattctcttcttcagacactctaccacattccgtatttcagaaaggctgtttatcacatgcccaccaccgagaacgatatgccctcaggaagcatcccactagctctacagtcactcttttataagttgcagtataatgacagcagtgtctctacaaaggagctcacaaaatcgtttgggtgggatatgcatgattcatttatgcaacatgatgtacaagaattgaacagagttctttccgagaagttggaagataagatgaagggaactgttgtggagggaacgatacaacaattgtttgaagggcaccacatgaactacattgagtgtatcaatgtggatttcaaatcaacaagaaaggaatccttctatgatctccagcttgatgtcaaaggttgtcaggatgtctatgcttcatttgataagtacgtagaagtggagcgtctggaaggtgacaacaagtatcatgccgacaaacatggcctgcaggatgcaaaaaaaggagttctttttatcgacttccctcctgttttgcaacttcagctaaaacgttttgagtatgatttcatgcgtgacacgatggtgaagataaacgatcgttatgaatttccactccaattggatcttgatagagataatggaaaatatttatctcctgatgctgacaggaatgtgcgtaatctttatacccttcacagcttgttagatgttgatgatattttagctattaaagctataagatgtgtagttgttgatctgatagacagccatgctcataacgattactcttacagtgttcttgtccatagtggtggtgttcatggtggacattactatgctttcatacgacctacactttctgatcaatggttcaagtttgatgatgagcgtgtgacaaaagaagatgcaaagagggcactagaagagcaatatggtggtgaggaggagctacctcagacaaatcctggcttaaacaacaccccattcaagtttactaaatattcaaatgcatacatgcttgtgtacattcgtgaaagtgacaaggacaaaattatatgtaatgtggatgagaaagatatagcggagcatcttcggattagattagaaaatgaccgtgaagagaaggaacgtcggaagaaggaaaaagcggaggcacacctctatactataatcaaggttgcaagggatgatgacttaaaagctcagatagggaaagacatatattttgatcttgttgatcatgataaagtcccaagcttccgtatccagaaacagatgacctttgctcaattcaaggaggaggtagcaaaagagtttggtattcctacacagtttcaacgattttggctgtgggccaagcgacaaaaccatacctaccgacctaacaggccattgtgtcctcaagacgaagcacatactgttgggcagctaaaggaactggtgaacaaggcccacaacgcagaactgaaactgttcttggaagttgaacttggactggaccttaaacctcttcctcttcccgacaagactagagaagatatatttcttttcttcaaactctatgaacctgaaaaggaacagctgcggtatgttggtaggctttttgtaaaggcttcaggaagaccacaggacattctgctgaagttaaggatgttggcaggtttttcacaggatgatgatattgaactttatgaggaaattaagttcgagcccaatgtgatgtgtgaatacattgacaacaggcttctgtttcgatcttgccagcttgaagacggggatataatttgttttcaaaagccttcaaaaccagatagtgcagaccgatatcgatttcctgacgtcccatcctttttgacgtatatacgtaaccggcaggtggtgcacttccgttcattggagaagcccaaggacgacgaattttgccttgagatgtcaaagattttcacatatgatcaagtcgtggaaaaagtagctgaaaaacttggcgtggatgacccatcgaaaattcgtcttacatcacataattgttattcgcaacagcctaagcctcaaccaataaagtacagaggcgttgaacgtctactggatatgctgattcattataaccagacttctgatattctgtactatgaagtattggacataccacttccagaattacaagcgctgaagacattaaaagttacctaccatcatgccacaaaagatgaggtgtcagttcacagtataagattaccaaaaaacagcactgttggcgatgtgctgaatgatatcaaaacgaaggttgagttgtctcataccaatgctgagctaagattacttgaggtcttttatcacaagatatacaaggtatttgcaccaaatgaaaagattgaaaacatcaatgatcagtactggacactgcgtgcagaggaggttccagaggaggagaaaaatcttggccccttcgatcgtttgattcatgtatatcattttacaaaagacactcaaaaccaaacgcaagttcagaactttggagaacctttttttatggttattcgtgaggatgagaccctatcttctatcaaagaacgtatacagaaaaagcttaaggttccagatgaggatttctcaaagtggaagtttgcatacatttcactcggtcgtcctgactattttgaagattcagatactgtagccctaaaattccagagaaacatgtatggagcttgggagcagtatcttggactggaacatccggacacggctcctaggaaggcacacacggctaatcagaaccggcattcattcgagagacctgtaaaaatttataactaggcatgttagaaattgagcgatgagctgccgctcaataccaagccaggctgaagttgctggcttgaaatagagagcatgttgctcaggtttttcgatggagctgtggaactagttcagaggagactgatcgggcgacttgtcatctttcctgtttgttttgctgccccggatatataaagttgtacagagatgaccccaccagacaattgtctttagtagataagataactttttacagtcgagtggccgatgttttagtcgatcactctgttctgcagttggtggtggtgctaggtggccttgagctgttgagggtacttgtctttcgactctttctgtatattattgacgcggcggatgtttgtaattccaatgatacatttcttacttgctggtttccggtgctttccttgctgcatcattctaatttggcattataatttagaattgagcgatgttcatcaccacttccatgatctattcgcagctgttct

SEQ ID NO: 23532 - DNA, 4042 bp, Zea Mays
ccatcccctcgcgatttccacctcctcccccacccccacctccgtaacccacttccaggtgggccccccacatcgccgccggtgacacgcacctccctccctgcctcccccgctaccgaccaccacgtccacgcccccggtcatgacgacctcgccgccgcccgccgagcaggaacagcaggaggaagaggaggtgctggtgccgcatggcccgcaccaggagctgcccaatggagcgcagccaatggaagttgtgcctgctgagccagctgctaccgtggagaaccaacagatagaggatccaccaatctcgagatttacttggaccattgagaatttatcaagagttagcacaaagaagctctactctgaaatttttgttgttggaggctacaagtggcgaattttgattttccctcgggggaataatgttgaattcttatctatgtatttggatgtagctgattctggagtcttgccctatggatggactagatacgcacaattcagcctctctgtggttaatcagattcacaacaagttcacaataagaaaagaaacacaacatcagttctctgctcgagaaagtgattggggtttcacttcatttatgccgctgggtgaactctacaacccaagtaggggttatcttgtaaatgatacttgtatagtggaagctgaagttgctgtgtgtaaagttgttgagtattggagttatgactctaaaaaggaaactggctatgttggtcttaaaaatcagggtgctacctgctatatgaattctcttcttcagacactctaccacattccgtatttcagaaaggtagaaacgagaaatcacatgccactgcccatgtgctcaacctgttctgatagatacagctaactacagatatctcttgccaggctgtttatcacatgcccaccaccgagaacgatatgccctcaggaagcatcccactagctctacagtcactcttttataagttgcagtataatgacagcagtgtctctacaaaggagctcacaaaatcgtttgggtgggatatgcatgattcatttatgcaacatgatgtacaagaattgaacagagttctttccgagaagttggaagataagatgaaggtttgacatctggaactgttgtggagggaacgatacaacaattgtttgaagggcaccacatgaactacattgagtatctccagcttgatgtcaaaggttgtcaggatgtctatgcttcatttgataagtacgtagaagtggagcgtctggaaggtgacaacaagtatcatgccgacaaacatggcctgcaggatgcaaaaaaaggagttctttttatcgacttccctcctgttttgcaacttcagctaaaacgttttgagtatgatttcatgcgtgacacgatggtgaagataaacgatcgttatgaatttccactccaattggatcttgatagagataatggaaaatatttatctcctgatgctgacaggaatgtgcgtaatctttatacccttcacagtgttcttgtccatagtggtggtgttcatggtggacattactatgctttcatacgacctacactttctgatcaatggttcaagtttgatgatgagcgtgtgacaaaagaagatgcaaagagggcactagaagagcaatatggtggtgaggaggagctacctcagacaaatcctggcttaaacaacaccccattcaagtttactaaatattcaaatgcatacatgcttgtgtacattcgtgaaagtgacaaggacaaaattatatgtaatgtggatgagaaagatatagcggagcatcttcggattagattagaaaatgaccgtgaagagaaggaacgtcggaagaaggaaaaagcggaggcacacctctatactataatcaaggttgcaagggatgatgacttaaaagctcagatagggaaagacatatattttgatcttgttgatcatgataaagtcccaagcttccgtatccagaaacagatgacctttgctcaattcaaggaggaggtagcaaaagagtttggtattcctacacagtttcaacgattttggctgtgggccaagcgacaaaaccatacctaccgacctaacaggccattgtgtcctcaagacgaagcacatactgttgggcagctaaaggaactggtgaacaaggcccacaacgcagaactgaaactgttcttggaagttgaacttggactggaccttaaacctcttcctcttcccgacaagactagagaagatatatttcttttcttcaaactctatgaacctgaaaaggaacagctgcggtatgttggtaggctttttgtaaaggcttcaggaagaccacaggacattctgctgaagttaaggatgttggcaggtttttcacaggatgatgatattgaactttatgaggaaattaagttcgagcccaatgtgatgtgtgaatacattgacaacaggcttctgtttcgatcttgccagcttgaagacggggatataatttgttttcaaaagccttcaaaaccagatagtgcagaccgatatcgatttcctgacgtcccatcctttttgacgtatatacgtaaccggcaggtggtgcacttccgttcattggagaagcccaaggacgacgaattttgccttgagatgtcaaagattttcacatatgatcaagtcgtggaaaaagtagctgaaaaacttggcgtggatgacccatcgaaaattcgtcttacatcacataattgttattcgcaacagcctaagcctcaaccaataaagtacagaggcgttgaacgtctactggatatgctgattcattataaccagacttctgatattctgtactatgaagtattggacataccacttccagaattacaagcgctgaagacattaaaagttacctaccatcatgccacaaaagatgaggtgtcagttcacagtataagattaccaaaaaacagcactgttggcgatgtgctgaatgatatcaaaacgaaggttgagttgtctcataccaatgctgagctaagattacttgaggtcttttatcacaagatatacaaggtatttgcaccaaatgaaaagattgaaaacatcaatgatcagtactggacactgcgtgcagaggaggttccagaggaggagaaaaatcttggccccttcgatcgtttgattcatgtatatcattttacaaaagacactcaaaaccaaacgcaagttcagaactttggagaacctttttttatggttattcgtgaggatgagaccctatcttctatcaaagaacgtatacagaaaaagcttaaggttccagatgaggatttctcaaagtggaagtttgcatacatttcactcggtcgtcctgactattttgaagattcagatactgtagccctaaaattccagagaaacatgtatggagcttgggagcagtatcttggactggaacatccggacacggctcctaggaaggcacacacggctaatcagaaccggcattcattcgagagacctgtaaaaatttataactaggcatgttagaaattgagcgatgagctgccgctcaataccaagccaggctgaagttgctggcttgaaatagagagcatgttgctcaggtttttcgatggagctgtggaactagttcagaggagactgatcgggcgacttgtcatctttcctgtttgttttgctgccccggatatataaagttgtacagagatgaccccaccagacaattgtctttagtagataagataactttttacagtcgagtggccgatgttttagtcgatcactctgttctgcagttggtggtggtgctaggtggccttgagctgttgagggtacttgtctttcgactctttctgtatattattgacgcggcggatgtttgtaattccaatgatacatttcttacttgctggtttccggtgctttccttgctgcatcattctaatttggcattataatttagaattgagcgatgttcatcaccacttccatgatctattcgcagctgttct

SEQ ID NO: 23533 - DNA, 2379 bp, Zea Mays
ccatcccctcgcgatttccacctcctcccccacccccacctccgtaacccacttccaggtgggccccccacatcgccgccggtgacacgcacctccctccctgcctcccccgctaccgaccaccacgtccacgcccccggtcatgacgacctcgccgccgcccgccgagcaggaacagcaggaggaagaggaggaacgtcggaagaaggaaaaagcggaggcacacctctatactataatcaaggttgcaagggatgatgacttaaaagctcagatagggaaagacatatattttgatcttgttgatcatgataaagtcccaagcttccgtatccagaaacagatgacctttgctcaattcaaggaggaggtagcaaaagagtttggtattcctacacagtttcaacgattttggctgtgggccaagcgacaaaaccatacctaccgacctaacaggccattgtgtcctcaagacgaagcacatactgttgggcagctaaaggaactggtgaacaaggcccacaacgcagaactgaaactgttcttggaagttgaacttggactggaccttaaacctcttcctcttcccgacaagactagagaagatatatttcttttcttcaaactctatgaacctgaaaaggaacagctgcggtatgttggtaggctttttgtaaaggcttcaggaagaccacaggacattctgctgaagttaaggatgttggcaggtttttcacaggatgatgatattgaactttatgaggaaattaagttcgagcccaatgtgatgtgtgaatacattgacaacaggcttctgtttcgatcttgccagcttgaagacggggatataatttgttttcaaaagccttcaaaaccagatagtgcagaccgatatcgatttcctgacgtcccatcctttttgacgtatatacgtaaccggcaggtggtgcacttccgttcattggagaagcccaaggacgacgaattttgccttgagatgtcaaagattttcacatatgatcaagtcgtggaaaaagtagctgaaaaacttggcgtggatgacccatcgaaaattcgtcttacatcacataattgttattcgcaacagcctaagcctcaaccaataaagtacagaggcgttgaacgtctactggatatgctgattcattataaccagacttctgatattctgtactatgaagtattggacataccacttccagaattacaagcgctgaagacattaaaagttacctaccatcatgccacaaaagatgaggtgtcagttcacagtataagattaccaaaaaacagcactgttggcgatgtgctgaatgatatcaaaacgaaggttgagttgtctcataccaatgctgagctaagattacttgaggtcttttatcacaagatatacaaggtatttgcaccaaatgaaaagattgaaaacatcaatgatcagtactggacactgcgtgcagaggaggttccagaggaggagaaaaatcttggccccttcgatcgtttgattcatgtatatcattttacaaaagacactcaaaaccaaacgcaagttcagaactttggagaacctttttttatggttattcgtgaggatgagaccctatcttctatcaaagaacgtatacagaaaaagcttaaggttccagatgaggatttctcaaagtggaagtttgcatacatttcactcggtcgtcctgactattttgaagattcagatactgtagccctaaaattccagagaaacatgtatggagcttgggagcagtatcttggactggaacatccggacacggctcctaggaaggcacacacggctaatcagaaccggcattcattcgagagacctgtaaaaatttataactaggcatgttagaaattgagcgatgagctgccgctcaataccaagccaggctgaagttgctggcttgaaatagagagcatgttgctcaggtttttcgatggagctgtggaactagttcagaggagactgatcgggcgacttgtcatctttcctgtttgttttgctgccccggatatataaagttgtacagagatgaccccaccagacaattgtctttagtagataagataactttttacagtcgagtggccgatgttttagtcgatcactctgttctgcagttggtggtggtgctaggtggccttgagctgttgagggtacttgtctttcgactctttctgtatattattgacgcggcggatgtttgtaattccaatgatacatttcttacttgctggtttccggtgctttccttgctgcatcattctaatttggcattataatttagaattgagcgatgttcatcaccacttccatgatctattcgcagctgttct

SEQ ID NO: 23534 - DNA, 4131 bp, Zea Mays
atcccctcgcgatttccacctcctcccccacccccacctccgtaacccacttccaggtgggccccccacatcgccgccggtgacacgcacctccctccctgcctcccccgctaccgaccaccacgtccacgcccccggtcatgacgacctcgccgccgcccgccgagcaggaacagcaggaggaagaggaggtgctggtgccgcatggcccgcaccaggagctgcccaatggagcgcagccaatggaagttgtgcctgctgagccagctgctaccgtggagaaccaacagatagaggatccaccaatctcgagatttacttggaccattgagaatttatcaagagttagcacaaagaagctctactctgaaatttttgttgttggaggctacaagtggcgaattttgattttccctcgggggaataatgttgaattcttatctatgtatttggatgtagctgattctggagtcttgccctatggatggactagatacgcacaattcagcctctctgtggttaatcagattcacaacaagttcacaataagaaaagaaacacaacatcagttctctgctcgagaaagtgattggggtttcacttcatttatgccgctgggtgaactctacaacccaagtaggggttatcttgtaaatgatacttgtatagtggaagctgaagttgctgtgtgtaaagttgttgagtattggagttatgactctaaaaaggaaactggctatgttggtcttaaaaatcagggtgctacctgctatatgaattctcttcttcagacactctaccacattccgtatttcagaaaggtagaaacgagaaatcacatgccactgcccatgtgctcaacctgttctgatagatacagctaactacagatatctcttgccaggctgtttatcacatgcccaccaccgagaacgatatgccctcaggaagcatcccactagctctacagtcactcttttataagttgcagtataatgacagcagtgtctctacaaaggagctcacaaaatcgtttgggtgggatatgcatgattcatttatgcaacatgatgtacaagaattgaacagagttctttccgagaagttggaagataagatgaagggaactgttgtggagggaacgatacaacaattgtttgaagggcaccacatgaactacattgagtatctccagcttgatgtcaaaggttgtcaggatgtctatgcttcatttgataagtacgtagaagtggagcgtctggaaggtgacaacaagtatcatgccgacaaacatggcctgcaggtcctagagccctctgaggcgtctatggaccacaatgggaggcaacatgctcatcgctactggatgtcttcaattccttgtaggtgtgttaaggatgcaaaaaaaggagttctttttatcgacttccctcctgttttgcaacttcagctaaaacgttttgagtatgatttcatgcgtgacacgatggtgaagataaacgatcgttatgaatttccactccaattggatcttgatagagataatggaaaatatttatctcctgatgctgacaggaatgtgcgtaatctttatacccttcacagtgttcttgtccatagtggtggtgttcatggtggacattactatgctttcatacgacctacactttctgatcaatggttcaagtttgatgatgagcgtgtgacaaaagaagatgcaaagagggcactagaagagcaatatggtggtgaggaggagctacctcagacaaatcctggcttaaacaacaccccattcaagtttactaaatattcaaatgcatacatgcttgtgtacattcgtgaaagtgacaaggacaaaattatatgtaatgtggatgagaaagatatagcggagcatcttcggattagattagaaaatgaccgtgaagagaaggaacgtcggaagaaggaaaaagcggaggcacacctctatactataatcaaggttgcaagggatgatgacttaaaagctcagatagggaaagacatatattttgatcttgttgatcatgataaagtcccaagcttccgtatccagaaacagatgacctttgctcaattcaaggaggaggtagcaaaagagtttggtattcctacacagtttcaacgattttggctgtgggccaagcgacaaaaccatacctaccgacctaacaggccattgtgtcctcaagacgaagcacatactgttgggcagctaaaggaactggtgaacaaggcccacaacgcagaactgaaactgttcttggaagttgaacttggactggaccttaaacctcttcctcttcccgacaagactagagaagatatatttcttttcttcaaactctatgaacctgaaaaggaacagctgcggtatgttggtaggctttttgtaaaggcttcaggaagaccacaggacattctgctgaagttaaggatgttggcaggtttttcacaggatgatgatattgaactttatgaggaaattaagttcgagcccaatgtgatgtgtgaatacattgacaacaggcttctgtttcgatcttgccagcttgaagacggggatataatttgttttcaaaagccttcaaaaccagatagtgcagaccgatatcgatttcctgacgtcccatcctttttgacgtatatacgtaaccggcaggtggtgcacttccgttcattggagaagcccaaggacgacgaattttgccttgagatgtcaaagattttcacatatgatcaagtcgtggaaaaagtagctgaaaaacttggcgtggatgacccatcgaaaattcgtcttacatcacataattgttattcgcaacagcctaagcctcaaccaataaagtacagaggcgttgaacgtctactggatatgctgattcattataaccagacttctgatattctgtactatgaagtattggacataccacttccagaattacaagcgctgaagacattaaaagttacctaccatcatgccacaaaagatgaggtgtcagttcacagtataagattaccaaaaaacagcactgttggcgatgtgctgaatgatatcaaaacgaaggttgagttgtctcataccaatgctgagctaagattacttgaggtcttttatcacaagatatacaagttcctttaggtatttgcaccaaatgaaaagattgaaaacatcaatgatcagtactggacactgcgtgcagaggaggttccagaggaggagaaaaatcttggccccttcgatcgtttgattcatgtatatcattttacaaaagacactcaaaaccaaacgcaagttcagaactttggagaacctttttttatggttattcgtgaggatgagaccctatcttctatcaaagaacgtatacagaaaaagcttaaggttccagatgaggatttctcaaagtggaagtttgcatacatttcactcggtcgtcctgactattttgaagattcagatactgtagccctaaaattccagagaaacatgtatggagcttgggagcagtatcttggactggaacatccggacacggctcctaggaaggcacacacggctaatcagaaccggcattcattcgagagacctgtaaaaatttataactaggcatgttagaaattgagcgatgagctgccgctcaataccaagccaggctgaagttgctggcttgaaatagagagcatgttgctcaggtttttcgatggagctgtggaactagttcagaggagactgatcgggcgacttgtcatctttcctgtttgttttgctgccccggatatataaagttgtacagagatgaccccaccagacaattgtctttagtagataagataactttttacagtcgagtggccgatgttttagtcgatcactctgttctgcagttggtggtggtgctaggtggccttgagctgttgagggtacttgtctttcgactctttctgtatattattgacgcggcggatgtttgtaattccaatgatacatttcttacttgctggtttccggtgctttccttgctgcatcattctaatttggcattataatttagaattgagcgatgttcatcaccacttccatgatctattcgcagctgttct

SEQ ID NO: 23535 - DNA, 3921 bp, Zea Mays
tcccctcgcgatttccacctcctcccccacccccacctccgtaacccacttccaggtgggccccccacatcgccgccggtgacacgcacctccctccctgcctcccccgctaccgaccaccacgtccacgcccccggtcatgacgacctcgccgccgcccgccgagcaggaacagcaggaggaagaggaggtgctggtgccgcatggcccgcaccaggagctgcccaatggagcgcagccaatggaagttgtgcctgctgagccagctgctaccgtggagaaccaacagatagaggatccaccaatctcgagatttacttggaccattgagaatttatcaagagttagcacaaagaagctctactctgaaatttttgttgttggaggctacaagtggcgaattttgattttccctcgggggaataatgttgaattcttatctatgtatttggatgtagctgattctggagtcttgccctatggatggactagatacgcacaattcagcctctctgtggttaatcagattcacaacaagttcacaataagaaaagaaacacaacatcagttctctgctcgagaaagtgattggggtttcacttcatttatgccgctgggtgaactctacaacccaagtaggggttatcttgtaaatgatacttgtatagtggaagctgaagttgctgtgtgtaaagttgttgagtattggagttatgactctaaaaaggaaactggctatgttggtcttaaaaatcagggtgctacctgctatatgaattctcttcttcagacactctaccacattccgtatttcagaaaggctgtttatcacatgcccaccaccgagaacgatatgccctcaggaagcatcccactagctctacagtcactcttttataagttgcagtataatgacagcagtgtctctacaaaggagctcacaaaatcgtttgggtgggatatgcatgattcatttatgcaacatgatgtacaagaattgaacagagttctttccgagaagttggaagataagatgaagggaactgttgtggagggaacgatacaacaattgtttgaagggcaccacatgaactacattgagtatctccagcttgatgtcaaaggttgtcaggatgtctatgcttcatttgataagtacgtagaagtggagcgtctggaaggtgacaacaagtatcatgccgacaaacatggcctgcaggtcctagagccctctgaggcgtctatggaccacaatgggaggcaacatgctcatcgctactggatgtcttcaattccttgtaggtgtgttaaggatgcaaaaaaaggagttctttttatcgacttccctcctgttttgcaacttcagctaaaacgttttgagtatgatttcatgcgtgacacgatggtgaagataaacgatcgttatgaatttccactccaattggatcttgatagagataatggaaaatatttatctcctgatgctgacaggaatgtgcgtaatctttatacccttcacagtgttcttgtccatagtggtggtgttcatggtggacattactatgctttcatacgacctacactttctgatcaatggttcaagtttgatgatgagcgtgtgacaaaagaagatgcaaagagggcactagaagagcaatatggtggtgaggaggagctacctcagacaaatcctggcttaaacaacaccccattcaagtttactaaatattcaaatgcatacatgcttgtgtacattcgtgaaagtgacaaggacaaaattatatgtaatgtggatgagaaagatatagcggagcatcttcggattagattagaaaatgaccgtgaagagaaggaacgtcggaagaaggaaaaagcggaggcacacctctatactataatcaaggttgcaagggatgatgacttaaaagctcagatagggaaagacatatattttgatcttgttgatcatgataaagtcccaagcttccgtatccagaaacagatgacctttgctcaattcaaggaggaggtagcaaaagagtttggtattcctacacagtttcaacgattttggctgtgggccaagcgacaaaaccatacctaccgacctaacaggccattgtgtcctcaagacgaagcacatactgttgggcagctaaaggaactggtgaacaaggcccacaacgcagaactgaaactgttcttggaagttgaacttggactggaccttaaacctcttcctcttcccgacaagactagagaagatatatttcttttcttcaaactctatgaacctgaaaaggaacagctgcggtatgttggtaggctttttgtaaaggcttcaggaagaccacaggacattctgctgaagttaaggatgttggcaggtttttcacaggatgatgatattgaactttatgaggaaattaagttcgagcccaatgtgatgtgtgaatacattgacaacaggcttctgtttcgatcttgccagcttgaagacggggatataatttgttttcaaaagccttcaaaaccagatagtgcagaccgatatcgatttcctgacgtcccatcctttttgacgtatatacgtaaccggcaggtggtgcacttccgttcattggagaagcccaaggacgacgaattttgccttgagatgtcaaagattttcacatatgatcaagtcgtggaaaaagtagctgaaaaacttggcgtggatgacccatcgaaaattcgtcttacatcacataattgttattcgcaacagcctaagcctcaaccaataaagtacagaggcgttgaacgtctactggatatgctgattcattataaccagacttctgatattctgtactatgaagtattggacataccacttccagaattacaagcgctgaagacattaaaagttacctaccatcatgccacaaaagatgaggtgtcagttcacagtataagattaccaaaaaacagcactgttggcgatgtgctgaatgatatcaaaacgaaggttgagttgtctcataccaatgctgagctaagattacttgaggtcttttatcacaagatatacaaggtatttgcaccaaatgaaaagattgaaaacatcaatgatcagtactggacactgcgtgcagaggaggttccagaggaggagaaaaatcttggccccttcgatcgtttgattcatgtatatcattttacaaaagacactcaaaaccaaacgtggaagtttgcatacatttcactcggtcgtcctgactattttgaagattcagatactgtagccctaaaattccagagaaacatgtatggagcttgggagcagtatcttggactggaacatccggacacggctcctaggaaggcacacacggctaatcagaaccggcattcattcgagagacctgtaaaaatttataactaggcatgttagaaattgagcgatgagctgccgctcaataccaagccaggctgaagttgctggcttgaaatagagagcatgttgctcaggtttttcgatggagctgtggaactagttcagaggagactgatcgggcgacttgtcatctttcctgtttgttttgctgccccggatatataaagttgtacagagatgaccccaccagacaattgtctttagtagataagataactttttacagtcgagtggccgatgttttagtcgatcactctgttctgcagttggtggtggtgctaggtggccttgagctgttgagggtacttgtctttcgactctttctgtatattattgacgcggcggatgtttgtaattccaatgatacatttcttacttgctggtttccggtgctttccttgctgcatcattctaatttggcattataatttagaattgagcgatgttcatcaccacttccatgatctattcgcagctgttct

SEQ ID NO: 23536 - DNA, 4146 bp, Zea Mays
tcccctcgcgatttccacctcctcccccacccccacctccgtaacccacttccaggtgggccccccacatcgccgccggtgacacgcacctccctccctgcctcccccgctaccgaccaccacgtccacgcccccggtcatgacgacctcgccgccgcccgccgagcaggaacagcaggaggaagaggaggtgctggtgccgcatggcccgcaccaggagctgcccaatggagcgcagccaatggaagttgtgcctgctgagccagctgctaccgtggagaaccaacagatagaggatccaccaatctcgagatttacttggaccattgagaatttatcaagagttagcacaaagaagctctactctgaaatttttgttgttggaggctacaagtggcgaattttgattttccctcgggggaataatgttgaattcttatctatgtatttggatgtagctgattctggagtcttgccctatggatggactagatacgcacaattcagcctctctgtggttaatcagattcacaacaagttcacaataagaaaagaaacacaacatcagttctctgctcgagaaagtgattggggtttcacttcatttatgccgctgggtgaactctacaacccaagtaggggttatcttgtaaatgatacttgtatagtggaagctgaagttgctgtgtgtaaagttgttgagtattggagttatgactctaaaaaggaaactggctatgttggtcttaaaaatcagggtgctacctgctatatgaattctcttcttcagacactctaccacattccgtatttcagaaagatacagctaactacagatatctcttgccaggctgtttatcacatgcccaccaccgagaacgatatgccctcaggaagcatcccactagctctacagtcactcttttataagttgcagtataatgacagcagtgtctctacaaaggagctcacaaaatcgtttgggtgggatatgcatgattcatttatgcaacatgatgtacaagaattgaacagagttctttccgagaagttggaagataagatgaagggaactgttgtggagggaacgatacaacaattgtttgaagggcaccacatgaactacattgagtatctccagcttgatgtcaaaggttgtcaggatgtctatgcttcatttgataagtacgtagaagtggagcgtctggaaggtgacaacaagtatcatgccgacaaacatggcctgcaggcgtctatggaccacaatgggaggcaacatgctcatcgctactggatgtcttcaattccttgtaggtgtgttaaggatgcaaaaaaaggagttctttttatcgacttccctcctgttttgcaacttcagctaaaacgttttgagtatgatttcatgcgtgacacgatggtgaagataaacgatcgttatgaatttccactccaattggatcttgatagagataatggaaaatatttatctcctgatgctgacaggaatgtgcgtaatctttatacccttcacagcttgttagatgttgatgatattttagctattaaagctataagatgtgtagttgttgatctgatagacagccatgctcataacgattactcttacagtgttcttgtccatagtggtggtgttcatggtggacattactatgctttcatacgacctacactttctgatcaatggttcaagtttgatgatgagcgtgtgacaaaagaagatgcaaagagggcactagaagagcaatatggtggtgaggaggagctacctcagacaaatcctggcttaaacaacaccccattcaagtttactaaatattcaaatgcatacatgcttgtgtacattcgtgaaagtgacaaggacaaaattatatgtaatgtggatgagaaagatatagcggagcatcttcggattagattagaaaatgaccgtgaagagaaggaacgtcggaagaaggaaaaagcggaggcacacctctatactataatcaaggttgcaagggatgatgacttaaaagctcagatagggaaagacatatattttgatcttgttgatcatgataaagtcccaagcttccgtatccagaaacagatgacctttgctcaattcaaggaggaggtagcaaaagagtttggtattcctacacagtttcaacgattttggctgtgggccaagcgacaaaaccatacctaccgacctaacaggccattgtgtcctcaagacgaagcacatactgttgggcagctaaaggaactggtgaacaaggcccacaacgcagaactgaaactgttcttggaagttgaacttggactggaccttaaacctcttcctcttcccgacaagactagagaagatatatttcttttcttcaaactctatgaacctgaaaaggaacagctgcggtatgttggtaggctttttgtaaaggcttcaggaagaccacaggacattctgctgaagttaaggatgttggcaggtttttcacaggatgatgatattgaactttatgaggaaattaagttcgagcccaatgtgatgtgtgaatacattgacaacaggcttctgtttcgatcttgccagcttgaagacggggatataatttgttttcaaaagccttcaaaaccagatagtgcagaccgatatcgatttcctgacgtcccatcctttttgacgtatatacgtaaccggcaggtggtgcacttccgttcattggagaagcccaaggacgacgaattttgccttgagatgtcaaagattttcacatatgatcaagtcgtggaaaaagtagctgaaaaacttggcgtggatgacccatcgaaaattcgtcttacatcacataattgttattcgcaacagcctaagcctcaaccaataaagtacagaggcgttgaacgtctactggatatgctgattcattataaccagacttctgatattctgtactatgaagtattggacataccacttccagaattacaagcgctgaagacattaaaagttacctaccatcatgccacaaaagatgaggtgtcagttcacagtataagattaccaaaaaacagcactgttggcgatgtgctgaatgatatcaaaacgaaggttgagttgtctcataccaatgctgagctaagattacttgaggtcttttatcacaagatatacaaggtatttgcaccaaatgaaaagattgaaaacatcaatgatcagtactggacactgcgtgcagaggaggttccagaggaggagaaaaatcttggccccttcgatcgtttgattcatgtatatcattttacaaaagacactcaaaaccaaacgcaagttcagaactttggagaacctttttttatggttattcgtgaggatgagaccctatcttctatcaaagaacgtatacagaaaaagcttaaggttccagatgaggatttctcaaagtggaagtttgcatacatttcactcggtcgtcctgactattttgaagattcagatactgtagccctaaaattccagagaaacatgtatggagcttgggagcagtatcttggactggaacatccggacacggctcctaggaaggcacacacggctaatcagaaccggcattcattcgagagacctgtaaaaatttataactaggcatgttagaaattgagcgatgagctgccgctcaataccaagccaggctgaagttgctggcttgaaatagagagcatgttgctcaggtttttcgatggagctgtggaactagttcagaggagactgatcgggcgacttgtcatctttcctgtttgttttgctgccccggatatataaagttgtacagagatgaccccaccagacaattgtctttagtagataagataactttttacagtcgagtggccgatgttttagtcgatcactctgttctgcagttggtggtggtgctaggtggccttgagctgttgagggtacttgtctttcgactctttctgtatattattgacgcggcggatgtttgtaattccaatgatacatttcttacttgctggtttccggtgctttccttgctgcatcattctaatttggcattataatttagaattgagcgatgttcatcaccacttccatgatctattcgcagctgttct

SEQ ID NO: 23537 - DNA, 3975 bp, Zea Mays
tcccctcgcgatttccacctcctcccccacccccacctccgtaacccacttccaggtgggccccccacatcgccgccggtgacacgcacctccctccctgcctcccccgctaccgaccaccacgtccacgcccccggtcatgacgacctcgccgccgcccgccgagcaggaacagcaggaggaagaggaggtgctggtgccgcatggcccgcaccaggagctgcccaatggagcgcagccaatggaagttgtgcctgctgagccagctgctaccgtggagaaccaacagatagaggatccaccaatctcgagatttacttggaccattgagaatttatcaagagttagcacaaagaagctctactctgaaatttttgttgttggaggctacaagtggcgaattttgattttccctcgggggaataatgttgaattcttatctatgtatttggatgtagctgattctggagtcttgccctatggatggactagatacgcacaattcagcctctctgtggttaatcagattcacaacaagttcacaataagaaaagaaacacaacatcagttctctgctcgagaaagtgattggggtttcacttcatttatgccgctgggtgaactctacaacccaagtaggggttatcttgtaaatgatacttgtatagtggaagctgaagttgctgtgtgtaaagttgttgagtattggagttatgactctaaaaaggaaactggctatgttggtcttaaaaatcagggtgctacctgctatatgaattctcttcttcagacactctaccacattccgtatttcagaaaggctgtttatcacatgcccaccaccgagaacgatatgccctcaggaagcatcccactagctctacagtcactcttttataagttgcagtataatgacagcagtgtctctacaaaggagctcacaaaatcgtttgggtgggatatgcatgattcatttatgcaacatgatgtacaagaattgaacagagttctttccgagaagttggaagataagatgaagggaactgttgtggagggaacgatacaacaattgtttgaagggcaccacatgaactacattgagtgtatcaatgtggatttcaaatcaacaagaaaggaatccttctatgatctccagcttgatgtcaaaggttgtcaggatgtctatgcttcatttgataagtacgtagaagtggagcgtctggaaggtgacaacaagtatcatgccgacaaacatggcctgcaggatgcaaaaaaaggagttctttttatcgacttccctcctgttttgcaacttcagctaaaacgttttgagtatgatttcatgcgtgacacgatggtgaagataaacgatcgttatgaatttccactccaattggatcttgatagagataatggaaaatatttatctcctgatgctgacaggaatgtgcgtaatctttatacccttcacagtggtggtgttcatggtggacattactatgctttcatacgacctacactttctgatcaatggttcaagtttgatgatgagcgtgtgacaaaagaagatgcaaagagggcactagaagagcaatatggtggtgaggaggagctacctcagacaaatcctggcttaaacaacaccccattcaagtttactaaatattcaaatgcatacatgcttgtgtacattcgtgaaagtgacaaggacaaaattatatgtaatgtggatgagaaagatatagcggagcatcttcggattagattagaaaatgaccgtgaagagaaggaacgtcggaagaaggaaaaagcggaggcacacctctatactataatcaaggttgcaagggatgatgacttaaaagctcagatagggaaagacatatattttgatcttgttgatcatgataaagtcccaagcttccgtatccagaaacagatgacctttgctcaattcaaggaggaggtagcaaaagagtttggtattcctacacagtttcaacgattttggctgtgggccaagcgacaaaaccatacctaccgacctaacaggccattgtgtcctcaagacgaagcacatactgttgggcagctaaaggaactggtgaacaaggcccacaacgcagaactgaaactgttcttggaagttgaacttggactggaccttaaacctcttcctcttcccgacaagactagagaagatatatttcttttcttcaaactctatgaacctgaaaaggaacagctgcggtatgttggtaggctttttgtaaaggcttcaggaagaccacaggacattctgctgaagttaaggatgttggcaggtttttcacaggatgatgatattgaactttatgaggaaattaagttcgagcccaatgtgatgtgtgaatacattgacaacaggcttctgtttcgatcttgccagcttgaagacggggatataatttgttttcaaaagccttcaaaaccagatagtgcagaccgatatcgatttcctgacgtcccatcctttttgacgtatatacgtaaccggcaggtggtgcacttccgttcattggagaagcccaaggacgacgaattttgccttgagatgtcaaagattttcacatatgatcaagtcgtggaaaaagtagctgaaaaacttggcgtggatgacccatcgaaaattcgtcttacatcacataattgttattcgcaacagcctaagcctcaaccaataaagtacagaggcgttgaacgtctactggatatgctgattcattataaccagacttctgatattctgtactatgaagtattggacataccacttccagaattacaagcgctgaagacattaaaagttacctaccatcatgccacaaaagatgaggtgtcagttcacagtataagattaccaaaaaacagcactgttggcgatgtgctgaatgatatcaaaacgaaggttgagttgtctcataccaatgctgagctaagattacttgaggtcttttatcacaagatatacaaggtatttgcaccaaatgaaaagattgaaaacatcaatgatcagtactggacactgcgtgcagaggaggttccagaggaggagaaaaatcttggccccttcgatcgtttgattcatgtatatcattttacaaaagacactcaaaaccaaacgcaagttcagaactttggagaacctttttttatggttattcgtgaggatgagaccctatcttctatcaaagaacgtatacagaaaaagcttaaggttccagatgaggatttctcaaagtggaagtttgcatacatttcactcggtcgtcctgactattttgaagattcagatactgtagccctaaaattccagagaaacatgtatggagcttgggagcagtatcttggactggaacatccggacacggctcctaggaaggcacacacggctaatcagaaccggcattcattcgagagacctgtaaaaatttataactaggcatgttagaaattgagcgatgagctgccgctcaataccaagccaggctgaagttgctggcttgaaatagagagcatgttgctcaggtttttcgatggagctgtggaactagttcagaggagactgatcgggcgacttgtcatctttcctgtttgttttgctgccccggatatataaagttgtacagagatgaccccaccagacaattgtctttagtagataagataactttttacagtcgagtggccgatgttttagtcgatcactctgttctgcagttggtggtggtgctaggtggccttgagctgttgagggtacttgtctttcgactctttctgtatattattgacgcggcggatgtttgtaattccaatgatacatttcttacttgctggtttccggtgctttccttgctgcatcattctaatttggcattataatttagaattgagcgatgttcatcaccacttccatgatctattcgcagctgttct

SEQ ID NO: 23538 - DNA, 4079 bp, Zea Mays
tcccctcgcgatttccacctcctcccccacccccacctccgtaacccacttccaggtgggccccccacatcgccgccggtgacacgcacctccctccctgcctcccccgctaccgaccaccacgtccacgcccccggtcatgacgacctcgccgccgcccgccgagcaggaacagcaggaggaagaggaggtgctggtgccgcatggcccgcaccaggagctgcccaatggagcgcagccaatggaagttgtgcctgctgagccagctgctaccgtggagaaccaacagatagaggatccaccaatctcgagatttacttggaccattgagaatttatcaagagttagcacaaagaagctctactctgaaatttttgttgttggaggctacaagtggcgaattttgattttccctcgggggaataatgttgaattcttatctatgtatttggatgtagctgattctggagtcttgccctatggatggactagatacgcacaattcagcctctctgtggttaatcagattcacaacaagttcacaataagaaaagaaacacaacatcagttctctgctcgagaaagtgattggggtttcacttcatttatgccgctgggtgaactctacaacccaagtaggggttatcttgtaaatgatacttgtatagtggaagctgaagttgctgtgtgtaaagttgttgagtattggagttatgactctaaaaaggaaactggctatgttggtcttaaaaatcagggtgctacctgctatatgaattctcttcttcagacactctaccacattccgtatttcagaaagatacagctaactacagatatctcttgccaggctgtttatcacatgcccaccaccgagaacgatatgccctcaggaagcatcccactagctctacagtcactcttttataagttgcagtataatgacagcagtgtctctacaaaggagctcacaaaatcgtttgggtgggatatgcatgattcatttatgcaacatgatgtacaagaattgaacagagttctttccgagaagttggaagataagatgaaggtttgacatctggaactgttgtggagggaacgatacaacaattgtttgaagggcaccacatgaactacattgagtatctccagcttgatgtcaaaggttgtcaggatgtctatgcttcatttgataagtacgtagaagtggagcgtctggaaggtgacaacaagtatcatgccgacaaacatggcctgcaggtcctagagccctctgaggcgtctatggaccacaatgggaggcaacatgctcatcgctactggatgtcttcaattccttgtaggtgtgttaaggatgcaaaaaaaggagttctttttatcgacttccctcctgttttgcaacttcagctaaaacgttttgagtatgatttcatgcgtgacacgatggtgaagataaacgatcgttatgaatttccactccaattggatcttgatagagataatggaaaatatttatctcctgatgctgacaggaatgtgcgtaatctttatacccttcacagtgttcttgtccatagtggtggtgttcatggtggacattactatgctttcatacgacctacactttctgatcaatggttcaagtttgatgatgagcgtgtgacaaaagaagatgcaaagagggcactagaagagcaatatggtggtgaggaggagctacctcagacaaatcctggcttaaacaacaccccattcaagtttactaaatattcaaatgcatacatgcttgtgtacattcgtgaaagtgacaaggacaaaattatatgtaatgtggatgagaaagatatagcggagcatcttcggattagattagaaaatgaccgtgaagagaaggaacgtcggaagaaggaaaaagcggaggcacacctctatactataatcaaggttgcaagggatgatgacttaaaagctcagatagggaaagacatatattttgatcttgttgatcatgataaagtcccaagcttccgtatccagaaacagatgacctttgctcaattcaaggaggaggtagcaaaagagtttggtattcctacacagtttcaacgattttggctgtgggccaagcgacaaaaccatacctaccgacctaacaggccattgtgtcctcaagacgaagcacatactgttgggcagctaaaggaactggtgaacaaggcccacaacgcagaactgaaactgttcttggaagttgaacttggactggaccttaaacctcttcctcttcccgacaagactagagaagatatatttcttttcttcaaactctatgaacctgaaaaggaacagctgcggtatgttggtaggctttttgtaaaggcttcaggaagaccacaggacattctgctgaagttaaggatgttggcaggtttttcacaggatgatgatattgaactttatgaggaaattaagttcgagcccaatgtgatgtgtgaatacattgacaacaggcttctgtttcgatcttgccagcttgaagacggggatataatttgttttcaaaagccttcaaaaccagatagtgcagaccgatatcgatttcctgacgtcccatcctttttgacgtatatacgtaaccggcaggtggtgcacttccgttcattggagaagcccaaggacgacgaattttgccttgagatgtcaaagattttcacatatgatcaagtcgtggaaaaagtagctgaaaaacttggcgtggatgacccatcgaaaattcgtcttacatcacataattgttattcgcaacagcctaagcctcaaccaataaagtacagaggcgttgaacgtctactggatatgctgattcattataaccagacttctgatattctgtactatgaagtattggacataccacttccagaattacaagcgctgaagacattaaaagttacctaccatcatgccacaaaagatgaggtgtcagttcacagtataagattaccaaaaaacagcactgttggcgatgtgctgaatgatatcaaaacgaaggttgagttgtctcataccaatgctgagctaagattacttgaggtcttttatcacaagatatacaaggtatttgcaccaaatgaaaagattgaaaacatcaatgatcagtactggacactgcgtgcagaggaggttccagaggaggagaaaaatcttggccccttcgatcgtttgattcatgtatatcattttacaaaagacactcaaaaccaaacgcaagttcagaactttggagaacctttttttatggttattcgtgaggatgagaccctatcttctatcaaagaacgtatacagaaaaagcttaaggttccagatgaggatttctcaaagtggaagtttgcatacatttcactcggtcgtcctgactattttgaagattcagatactgtagccctaaaattccagagaaacatgtatggagcttgggagcagtatcttggactggaacatccggacacggctcctaggaaggcacacacggctaatcagaaccggcattcattcgagagacctgtaaaaatttataactaggcatgttagaaattgagcgatgagctgccgctcaataccaagccaggctgaagttgctggcttgaaatagagagcatgttgctcaggtttttcgatggagctgtggaactagttcagaggagactgatcgggcgacttgtcatctttcctgtttgttttgctgccccggatatataaagttgtacagagatgaccccaccagacaattgtctttagtagataagataactttttacagtcgagtggccgatgttttagtcgatcactctgttctgcagttggtggtggtgctaggtggccttgagctgttgagggtacttgtctttcgactctttctgtatattattgacgcggcggatgtttgtaattccaatgatacatttcttacttgctggtttccggtgctttccttgctgcatcattctaatttggcattataatttagaattgagcgatgttcatcaccacttccatgatctattcgcagctgttct

SEQ ID NO: 23539 - DNA, 3991 bp, Zea Mays
tcccctcgcgatttccacctcctcccccacccccacctccgtaacccacttccaggtgggccccccacatcgccgccggtgacacgcacctccctccctgcctcccccgctaccgaccaccacgtccacgcccccggtcatgacgacctcgccgccgcccgccgagcaggaacagcaggaggaagaggaggtgctggtgccgcatggcccgcaccaggagctgcccaatggagcgcagccaatggaagttgtgcctgctgagccagctgctaccgtggagaaccaacagatagaggatccaccaatctcgagatttacttggaccattgagaatttatcaagagttagcacaaagaagctctactctgaaatttttgttgttggaggctacaagtggcgaattttgattttccctcgggggaataatgttgaattcttatctatgtatttggatgtagctgattctggagtcttgccctatggatggactagatacgcacaattcagcctctctgtggttaatcagattcacaacaagttcacaataagaaaagaaacacaacatcagttctctgctcgagaaagtgattggggtttcacttcatttatgccgctgggtgaactctacaacccaagtaggggttatcttgtaaatgatacttgtatagtggaagctgaagttgctgtgtgtaaagttgttgagtattggagttatgactctaaaaaggaaactggctatgttggtcttaaaaatcagggtgctacctgctatatgaattctcttcttcagacactctaccacattccgtatttcagaaaggctgtttatcacatgcccaccaccgagaacgatatgccctcaggaagcatcccactagctctacagtcactcttttataagttgcagtataatgacagcagtgtctctacaaaggagctcacaaaatcgtttgggtgggatatgcatgattcatttatgcaacatgatgtacaagaattgaacagagttctttccgagaagttggaagataagatgaagggaactgttgtggagggaacgatacaacaattgtttgaagggcaccacatgaactacattgagtgtatcaatgtggatttcaaatcaacaagaaaggaatccttctatgatctccagcttgatgtcaaaggttgtcaggatgtctatgcttcatttgataagtacgtagaagtggagcgtctggaaggtgacaacaagtatcatgccgacaaacatggcctgcaggatgcaaaaaaaggagttctttttatcgacttccctcctgttttgcaacttcagctaaaacgttttgagtatgatttcatgcgtgacacgatggtgaagataaacgatcgttatgaatttccactccaattggatcttgatagagataatggaaaatatttatctcctgatgctgacaggaatgtgcgtaatctttatacccttcacaggtgttcttgtccatagtggtggtgttcatggtggacattactatgctttcatacgacctacactttctgatcaatggttcaagtttgatgatgagcgtgtgacaaaagaagatgcaaagagggcactagaagagcaatatggtggtgaggaggagctacctcagacaaatcctggcttaaacaacaccccattcaagtttactaaatattcaaatgcatacatgcttgtgtacattcgtgaaagtgacaaggacaaaattatatgtaatgtggatgagaaagatatagcggagcatcttcggattagattagaaaatgaccgtgaagagaaggaacgtcggaagaaggaaaaagcggaggcacacctctatactataatcaaggttgcaagggatgatgacttaaaagctcagatagggaaagacatatattttgatcttgttgatcatgataaagtcccaagcttccgtatccagaaacagatgacctttgctcaattcaaggaggaggtagcaaaagagtttggtattcctacacagtttcaacgattttggctgtgggccaagcgacaaaaccatacctaccgacctaacaggccattgtgtcctcaagacgaagcacatactgttgggcagctaaaggaactggtgaacaaggcccacaacgcagaactgaaactgttcttggaagttgaacttggactggaccttaaacctcttcctcttcccgacaagactagagaagatatatttcttttcttcaaactctatgaacctgaaaaggaacagctgcggtatgttggtaggctttttgtaaaggcttcaggaagaccacaggacattctgctgaagttaaggatgttggcaggtttttcacaggatgatgatattgaactttatgaggaaattaagttcgagcccaatgtgatgtgtgaatacattgacaacaggcttctgtttcgatcttgccagcttgaagacggggatataatttgttttcaaaagccttcaaaaccagatagtgcagaccgatatcgatttcctgacgtcccatcctttttgacgtatatacgtaaccggcaggtggtgcacttccgttcattggagaagcccaaggacgacgaattttgccttgagatgtcaaagattttcacatatgatcaagtcgtggaaaaagtagctgaaaaacttggcgtggatgacccatcgaaaattcgtcttacatcacataattgttattcgcaacagcctaagcctcaaccaataaagtacagaggcgttgaacgtctactggatatgctgattcattataaccagacttctgatattctgtactatgaagtattggacataccacttccagaattacaagcgctgaagacattaaaagttacctaccatcatgccacaaaagatgaggtgtcagttcacagtataagattaccaaaaaacagcactgttggcgatgtgctgaatgatatcaaaacgaaggttgagttgtctcataccaatgctgagctaagattacttgaggtcttttatcacaagatatacaaggtatttgcaccaaatgaaaagattgaaaacatcaatgatcagtactggacactgcgtgcagaggaggttccagaggaggagaaaaatcttggccccttcgatcgtttgattcatgtatatcattttacaaaagacactcaaaaccaaacgcaagttcagaactttggagaacctttttttatggttattcgtgaggatgagaccctatcttctatcaaagaacgtatacagaaaaagcttaaggttccagatgaggatttctcaaagtggaagtttgcatacatttcactcggtcgtcctgactattttgaagattcagatactgtagccctaaaattccagagaaacatgtatggagcttgggagcagtatcttggactggaacatccggacacggctcctaggaaggcacacacggctaatcagaaccggcattcattcgagagacctgtaaaaatttataactaggcatgttagaaattgagcgatgagctgccgctcaataccaagccaggctgaagttgctggcttgaaatagagagcatgttgctcaggtttttcgatggagctgtggaactagttcagaggagactgatcgggcgacttgtcatctttcctgtttgttttgctgccccggatatataaagttgtacagagatgaccccaccagacaattgtctttagtagataagataactttttacagtcgagtggccgatgttttagtcgatcactctgttctgcagttggtggtggtgctaggtggccttgagctgttgagggtacttgtctttcgactctttctgtatattattgacgcggcggatgtttgtaattccaatgatacatttcttacttgctggtttccggtgctttccttgctgcatcattctaatttggcattataatttagaattgagcgatgttcatcaccacttccatgatctattcgcagctgttct

SEQ ID NO: 23540 - DNA, 4077 bp, Zea Mays
tcccctcgcgatttccacctcctcccccacccccacctccgtaacccacttccaggtgggccccccacatcgccgccggtgacacgcacctccctccctgcctcccccgctaccgaccaccacgtccacgcccccggtcatgacgacctcgccgccgcccgccgagcaggaacagcaggaggaagaggaggtgctggtgccgcatggcccgcaccaggagctgcccaatggagcgcagccaatggaagttgtgcctgctgagccagctgctaccgtggagaaccaacagatagaggatccaccaatctcgagatttacttggaccattgagaatttatcaagagttagcacaaagaagctctactctgaaatttttgttgttggaggctacaagtggcgaattttgattttccctcgggggaataatgttgaattcttatctatgtatttggatgtagctgattctggagtcttgccctatggatggactagatacgcacaattcagcctctctgtggttaatcagattcacaacaagttcacaataagaaaagaaacacaacatcagttctctgctcgagaaagtgattggggtttcacttcatttatgccgctgggtgaactctacaacccaagtaggggttatcttgtaaatgatacttgtatagtggaagctgaagttgctgtgtgtaaagttgttgagtattggagttatgactctaaaaaggaaactggctatgttggtcttaaaaatcagggtgctacctgctatatgaattctcttcttcagacactctaccacattccgtatttcagaaaggctgtttatcacatgcccaccaccgagaacgatatgccctcaggaagcatcccactagctctacagtcactcttttataagttgcagtataatgacagcagtgtctctacaaaggagctcacaaaatcgtttgggtgggatatgcatgattcatttatgcaacatgatgtacaagaattgaacagagttctttccgagaagttggaagataagatgaagggaactgttgtggagggaacgatacaacaattgtttgaagggcaccacatgaactacattgagtgtatcaatgtggatttcaaatcaacaagaaaggaatccttctatgatctccagcttgatgtcaaaggttgtcaggatgtctatgcttcatttgataagtacgtagaagtggagcgtctggaaggtgacaacaagtatcatgccgacaaacatggcctgcaggtcctagagccctctgaggcgtctatggaccacaatgggaggcaacatgctcatcgctactggatgtcttcaattccttgtaggtgtgttaaggatgcaaaaaaaggagttctttttatcgacttccctcctgttttgcaacttcagctaaaacgttttgagtatgatttcatgcgtgacacgatggtgaagataaacgatcgttatgaatttccactccaattggatcttgatagagataatggaaaatatttatctcctgatgctgacaggaatgtgcgtaatctttatacccttcacagtggtggtgttcatggtggacattactatgctttcatacgacctacactttctgatcaatggttcaagtttgatgatgagcgtgtgacaaaagaagatgcaaagagggcactagaagagcaatatggtggtgaggaggagctacctcagacaaatcctggcttaaacaacaccccattcaagtttactaaatattcaaatgcatacatgcttgtgtacattcgtgaaagtgacaaggacaaaattatatgtaatgtggatgagaaagatatagcggagcatcttcggattagattagaaaatgaccgtgaagagaaggaacgtcggaagaaggaaaaagcggaggcacacctctatactataatcaaggttgcaagggatgatgacttaaaagctcagatagggaaagacatatattttgatcttgttgatcatgataaagtcccaagcttccgtatccagaaacagatgacctttgctcaattcaaggaggaggtagcaaaagagtttggtattcctacacagtttcaacgattttggctgtgggccaagcgacaaaaccatacctaccgacctaacaggccattgtgtcctcaagacgaagcacatactgttgggcagctaaaggaactggtgaacaaggcccacaacgcagaactgaaactgttcttggaagttgaacttggactggaccttaaacctcttcctcttcccgacaagactagagaagatatatttcttttcttcaaactctatgaacctgaaaaggaacagctgcggtatgttggtaggctttttgtaaaggcttcaggaagaccacaggacattctgctgaagttaaggatgttggcaggtttttcacaggatgatgatattgaactttatgaggaaattaagttcgagcccaatgtgatgtgtgaatacattgacaacaggcttctgtttcgatcttgccagcttgaagacggggatataatttgttttcaaaagccttcaaaaccagatagtgcagaccgatatcgatttcctgacgtcccatcctttttgacgtatatacgtaaccggcaggtggtgcacttccgttcattggagaagcccaaggacgacgaattttgccttgagatgtcaaagattttcacatatgatcaagtcgtggaaaaagtagctgaaaaacttggcgtggatgacccatcgaaaattcgtcttacatcacataattgttattcgcaacagcctaagcctcaaccaataaagtacagaggcgttgaacgtctactggatatgctgattcattataaccagacttctgatattctgtactatgaagtattggacataccacttccagaattacaagcgctgaagacattaaaagttacctaccatcatgccacaaaagatgaggtgtcagttcacagtataagattaccaaaaaacagcactgttggcgatgtgctgaatgatatcaaaacgaaggttgagttgtctcataccaatgctgagctaagattacttgaggtcttttatcacaagatatacaagttcctttaggtatttgcaccaaatgaaaagattgaaaacatcaatgatcagtactggacactgcgtgcagaggaggttccagaggaggagaaaaatcttggccccttcgatcgtttgattcatgtatatcattttacaaaagacactcaaaaccaaacgcaagttcagaactttggagaacctttttttatggttattcgtgaggatgagaccctatcttctatcaaagaacgtatacagaaaaagcttaaggttccagatgaggatttctcaaagtggaagtttgcatacatttcactcggtcgtcctgactattttgaagattcagatactgtagccctaaaattccagagaaacatgtatggagcttgggagcagtatcttggactggaacatccggacacggctcctaggaaggcacacacggctaatcagaaccggcattcattcgagagacctgtaaaaatttataactaggcatgttagaaattgagcgatgagctgccgctcaataccaagccaggctgaagttgctggcttgaaatagagagcatgttgctcaggtttttcgatggagctgtggaactagttcagaggagactgatcgggcgacttgtcatctttcctgtttgttttgctgccccggatatataaagttgtacagagatgaccccaccagacaattgtctttagtagataagataactttttacagtcgagtggccgatgttttagtcgatcactctgttctgcagttggtggtggtgctaggtggccttgagctgttgagggtacttgtctttcgactctttctgtatattattgacgcggcggatgtttgtaattccaatgatacatttcttacttgctggtttccggtgctttccttgctgcatcattctaatttggcattataatttagaattgagcgatgttcatcaccacttccatgatctattcgcagctgttct

SEQ ID NO: 23541 - DNA, 4059 bp, Zea Mays
tcccctcgcgatttccacctcctcccccacccccacctccgtaacccacttccaggtgggccccccacatcgccgccggtgacacgcacctccctccctgcctcccccgctaccgaccaccacgtccacgcccccggtcatgacgacctcgccgccgcccgccgagcaggaacagcaggaggaagaggaggtgctggtgccgcatggcccgcaccaggagctgcccaatggagcgcagccaatggaagttgtgcctgctgagccagctgctaccgtggagaaccaacagatagaggatccaccaatctcgagatttacttggaccattgagaatttatcaagagttagcacaaagaagctctactctgaaatttttgttgttggaggctacaagtggcgaattttgattttccctcgggggaataatgttgaattcttatctatgtatttggatgtagctgattctggagtcttgccctatggatggactagatacgcacaattcagcctctctgtggttaatcagattcacaacaagttcacaataagaaaagaaacacaacatcagttctctgctcgagaaagtgattggggtttcacttcatttatgccgctgggtgaactctacaacccaagtaggggttatcttgtaaatgatacttgtatagtggaagctgaagttgctgtgtgtaaagttgttgagtattggagttatgactctaaaaaggaaactggctatgttggtcttaaaaatcagggtgctacctgctatatgaattctcttcttcagacactctaccacattccgtatttcagaaaggctgtttatcacatgcccaccaccgagaacgatatgccctcaggaagcatcccactagctctacagtcactcttttataagttgcagtataatgacagcagtgtctctacaaaggagctcacaaaatcgtttgggtgggatatgcatgattcatttatgcaacatgatgtacaagaattgaacagagttctttccgagaagttggaagataagatgaagggaactgttgtggagggaacgatacaacaattgtttgaagggcaccacatgaactacattgagtgtatcaatgtggatttcaaatcaacaagaaaggaatccttctatggcaagtgatgatgatgtttccacacgagtagcgaagttctaactggactgttgttttaccttgttgtatattctaatgcagatctccagcttgatgtcaaaggttgtcaggatgtctatgcttcatttgataagtacgtagaagtggagcgtctggaaggtgacaacaagtatcatgccgacaaacatggcctgcaggatgcaaaaaaaggagttctttttatcgacttccctcctgttttgcaacttcagctaaaacgttttgagtatgatttcatgcgtgacacgatggtgaagataaacgatcgttatgaatttccactccaattggatcttgatagagataatggaaaatatttatctcctgatgctgacaggaatgtgcgtaatctttatacccttcacagtagtggtggtgttcatggtggacattactatgctttcatacgacctacactttctgatcaatggttcaagtttgatgatgagcgtgtgacaaaagaagatgcaaagagggcactagaagagcaatatggtggtgaggaggagctacctcagacaaatcctggcttaaacaacaccccattcaagtttactaaatattcaaatgcatacatgcttgtgtacattcgtgaaagtgacaaggacaaaattatatgtaatgtggatgagaaagatatagcggagcatcttcggattagattagaaaatgaccgtgaagagaaggaacgtcggaagaaggaaaaagcggaggcacacctctatactataatcaaggttgcaagggatgatgacttaaaagctcagatagggaaagacatatattttgatcttgttgatcatgataaagtcccaagcttccgtatccagaaacagatgacctttgctcaattcaaggaggaggtagcaaaagagtttggtattcctacacagtttcaacgattttggctgtgggccaagcgacaaaaccatacctaccgacctaacaggccattgtgtcctcaagacgaagcacatactgttgggcagctaaaggaactggtgaacaaggcccacaacgcagaactgaaactgttcttggaagttgaacttggactggaccttaaacctcttcctcttcccgacaagactagagaagatatatttcttttcttcaaactctatgaacctgaaaaggaacagctgcggtatgttggtaggctttttgtaaaggcttcaggaagaccacaggacattctgctgaagttaaggatgttggcaggtttttcacaggatgatgatattgaactttatgaggaaattaagttcgagcccaatgtgatgtgtgaatacattgacaacaggcttctgtttcgatcttgccagcttgaagacggggatataatttgttttcaaaagccttcaaaaccagatagtgcagaccgatatcgatttcctgacgtcccatcctttttgacgtatatacgtaaccggcaggtggtgcacttccgttcattggagaagcccaaggacgacgaattttgccttgagatgtcaaagattttcacatatgatcaagtcgtggaaaaagtagctgaaaaacttggcgtggatgacccatcgaaaattcgtcttacatcacataattgttattcgcaacagcctaagcctcaaccaataaagtacagaggcgttgaacgtctactggatatgctgattcattataaccagacttctgatattctgtactatgaagtattggacataccacttccagaattacaagcgctgaagacattaaaagttacctaccatcatgccacaaaagatgaggtgtcagttcacagtataagattaccaaaaaacagcactgttggcgatgtgctgaatgatatcaaaacgaaggttgagttgtctcataccaatgctgagctaagattacttgaggtcttttatcacaagatatacaaggtatttgcaccaaatgaaaagattgaaaacatcaatgatcagtactggacactgcgtgcagaggaggttccagaggaggagaaaaatcttggccccttcgatcgtttgattcatgtatatcattttacaaaagacactcaaaaccaaacgcaagttcagaactttggagaacctttttttatggttattcgtgaggatgagaccctatcttctatcaaagaacgtatacagaaaaagcttaaggttccagatgaggatttctcaaagtggaagtttgcatacatttcactcggtcgtcctgactattttgaagattcagatactgtagccctaaaattccagagaaacatgtatggagcttgggagcagtatcttggactggaacatccggacacggctcctaggaaggcacacacggctaatcagaaccggcattcattcgagagacctgtaaaaatttataactaggcatgttagaaattgagcgatgagctgccgctcaataccaagccaggctgaagttgctggcttgaaatagagagcatgttgctcaggtttttcgatggagctgtggaactagttcagaggagactgatcgggcgacttgtcatctttcctgtttgttttgctgccccggatatataaagttgtacagagatgaccccaccagacaattgtctttagtagataagataactttttacagtcgagtggccgatgttttagtcgatcactctgttctgcagttggtggtggtgctaggtggccttgagctgttgagggtacttgtctttcgactctttctgtatattattgacgcggcggatgtttgtaattccaatgatacatttcttacttgctggtttccggtgctttccttgctgcatcattctaatttggcattataatttagaattgagcgatgttcatcaccacttccatgatctattcgcagctgttct

SEQ ID NO: 23542 - DNA, 4083 bp, Zea Mays
tcccctcgcgatttccacctcctcccccacccccacctccgtaacccacttccaggtgggccccccacatcgccgccggtgacacgcacctccctccctgcctcccccgctaccgaccaccacgtccacgcccccggtcatgacgacctcgccgccgcccgccgagcaggaacagcaggaggaagaggaggtgctggtgccgcatggcccgcaccaggagctgcccaatggagcgcagccaatggaagttgtgcctgctgagccagctgctaccgtggagaaccaacagatagaggatccaccaatctcgagatttacttggaccattgagaatttatcaagagttagcacaaagaagctctactctgaaatttttgttgttggaggctacaagtggcgaattttgattttccctcgggggaataatgttgaattcttatctatgtatttggatgtagctgattctggagtcttgccctatggatggactagatacgcacaattcagcctctctgtggttaatcagattcacaacaagttcacaataagaaaagaaacacaacatcagttctctgctcgagaaagtgattggggtttcacttcatttatgccgctgggtgaactctacaacccaagtaggggttatcttgtaaatgatacttgtatagtggaagctgaagttgctgtgtgtaaagttgttgagtattggagttatgactctaaaaaggaaactggctatgttggtcttaaaaatcagggtgctacctgctatatgaattctcttcttcagacactctaccacattccgtatttcagaaaggctgtttatcacatgcccaccaccgagaacgatatgccctcaggaagcatcccactagctctacagtcactcttttataagttgcagtataatgacagcagtgtctctacaaaggagctcacaaaatcgtttgggtgggatatgcatgattcatttatgcaacatgatgtacaagaattgaacagagttctttccgagaagttggaagataagatgaagggaactgttgtggagggaacgatacaacaattgtttgaagggcaccacatgaactacattgagtgtatcaatgtggatttcaaatcaacaagaaaggaatccttctatgatctccagcttgatgtcaaaggttgtcaggatgtctatgcttcatttgataagtacgtagaagtggagcgtctggaaggtgacaacaagtatcatgccgacaaacatggcctgcaggtcctagagccctctgaggcgtctatggaccacaatgggaggcaacatgctcatcgctactggatgtcttcaattccttgtaggtgtgttaaggatgcaaaaaaaggagttctttttatcgacttccctcctgttttgcaacttcagctaaaacgttttgagtatgatttcatgcgtgacacgatggtgaagataaacgatcgttatgaatttccactccaattggatcttgatagagataatggaaaatatttatctcctgatgctgacaggaatgtgcgtaatctttatacccttcacagtgttcttgtccatagtggtggtgttcatggtggacattactatgctttcatacgacctacactttctgatcaatggttcaagtttgatgatgagcgtgtgacaaaagaagatgcaaagagggcactagaagagcaatatggtggtgaggaggagctacctcagacaaatcctggcttaaacaacaccccattcaagtttactaaatattcaaatgcatacatgcttgtgtacattcgtgaaagtgacaaggacaaaattatatgtaatgtggatgagaaagatatagcggagcatcttcggattagattagaaaatgaccgtgaagagaaggaacgtcggaagaaggaaaaagcggaggcacacctctatactataatcaaggttgcaagggatgatgacttaaaagctcagatagggaaagacatatattttgatcttgttgatcatgataaagtcccaagcttccgtatccagaaacagatgacctttgctcaattcaaggaggaggtagcaaaagagtttggtattcctacacagtttcaacgattttggctgtgggccaagcgacaaaaccatacctaccgacctaacaggccattgtgtcctcaagacgaagcacatactgttgggcagctaaaggaactggtgaacaaggcccacaacgcagaactgaaactgttcttggaagttgaacttggactggaccttaaacctcttcctcttcccgacaagactagagaagatatatttcttttcttcaaactctatgaacctgaaaaggaacagctgcggtatgttggtaggctttttgtaaaggcttcaggaagaccacaggacattctgctgaagttaaggatgttggcaggtttttcacaggatgatgatattgaactttatgaggaaattaagttcgagcccaatgtgatgtgtgaatacattgacaacaggcttctgtttcgatcttgccagcttgaagacggggatataatttgttttcaaaagccttcaaaaccagatagtgcagaccgatatcgatttcctgacgtcccatcctttttgacgtatatacgtaaccggcaggtggtgcacttccgttcattggagaagcccaaggacgacgaattttgccttgagatgtcaaagattttcacatatgatcaagtcgtggaaaaagtagctgaaaaacttggcgtggatgacccatcgaaaattcgtcttacatcacataattgttattcgcaacagcctaagcctcaaccaataaagtacagaggcgttgaacgtctactggatatgctgattcattataaccagacttctgatattctgtactatgaagtattggacataccacttccagaattacaagcgctgaagacattaaaagttacctaccatcatgccacaaaagatgaggtgtcagttcacagtataagattaccaaaaaacagcactgttggcgatgtgctgaatgatatcaaaacgaaggttgagttgtctcataccaatgctgagctaagattacttgaggtcttttatcacaagatatacaaggtatttgcaccaaatgaaaagattgaaaacatcaatgatcagtactggacactgcgtgcagaggaggttccagaggaggagaaaaatcttggccccttcgatcgtttgattcatgtatatcattttacaaaagacactcaaaaccaaacgcaagttcagaactttggagaacctttttttatggttattcgtgaggatgagaccctatcttctatcaaagaacgtatacagaaaaagcttaaggttccagatgaggatttctcaaagtggaagtttgcatacatttcactcggtcgtcctgactattttgaagattcagatactgtagccctaaaattccagagaaacatgtatggagcttgggagcagtatcttggactggaacatccggacacggctcctaggaaggcacacacggctaatcagaaccggcattcattcgagagacctgtaaaaatttataactaggcatgttagaaattgagcgatgagctgccgctcaataccaagccaggctgaagttgctggcttgaaatagagagcatgttgctcaggtttttcgatggagctgtggaactagttcagaggagactgatcgggcgacttgtcatctttcctgtttgttttgctgccccggatatataaagttgtacagagatgaccccaccagacaattgtctttagtagataagataactttttacagtcgagtggccgatgttttagtcgatcactctgttctgcagttggtggtggtgctaggtggccttgagctgttgagggtacttgtctttcgactctttctgtatattattgacgcggcggatgtttgtaattccaatgatacatttcttacttgctggtttccggtgctttccttgctgcatcattctaatttggcattataatttagaattgagcgatgttcatcaccacttccatgatctattcgcagctgttct

SEQ ID NO: 23543 - DNA, 3994 bp, Zea Mays
tcccctcgcgatttccacctcctcccccacccccacctccgtaacccacttccaggtgggccccccacatcgccgccggtgacacgcacctccctccctgcctcccccgctaccgaccaccacgtccacgcccccggtcatgacgacctcgccgccgcccgccgagcaggaacagcaggaggaagaggaggtgctggtgccgcatggcccgcaccaggagctgcccaatggagcgcagccaatggaagttgtgcctgctgagccagctgctaccgtggagaaccaacagatagaggatccaccaatctcgagatttacttggaccattgagaatttatcaagagttagcacaaagaagctctactctgaaatttttgttgttggaggctacaagtggcgaattttgattttccctcgggggaataatgttgaattcttatctatgtatttggatgtagctgattctggagtcttgccctatggatggactagatacgcacaattcagcctctctgtggttaatcagattcacaacaagttcacaataagaaaagaaacacaacatcagttctctgctcgagaaagtgattggggtttcacttcatttatgccgctgggtgaactctacaacccaagtaggggttatcttgtaaatgatacttgtatagtggaagctgaagttgctgtgtgtaaagttgttgagtattggagttatgactctaaaaaggaaactggctatgttggtcttaaaaatcagggtgctacctgctatatgaattctcttcttcagacactctaccacattccgtatttcagaaaggctgtttatcacatgcccaccaccgagaacgatatgccctcaggaagcatcccactagctctacagtcactcttttataagttgcagtataatgacagcagtgtctctacaaaggagctcacaaaatcgtttgggtgggatatgcatgattcatttatgcaacatgatgtacaagaattgaacagagttctttccgagaagttggaagataagatgaagggaactgttgtggagggaacgatacaacaattgtttgaagggcaccacatgaactacattgagtgtatcaatgtggatttcaaatcaacaagaaaggaatccttctatggcaaatctccagcttgatgtcaaaggttgtcaggatgtctatgcttcatttgataagtacgtagaagtggagcgtctggaaggtgacaacaagtatcatgccgacaaacatggcctgcaggatgcaaaaaaaggagttctttttatcgacttccctcctgttttgcaacttcagctaaaacgttttgagtatgatttcatgcgtgacacgatggtgaagataaacgatcgttatgaatttccactccaattggatcttgatagagataatggaaaatatttatctcctgatgctgacaggaatgtgcgtaatctttatacccttcacagtgttcttgtccatagtggtggtgttcatggtggacattactatgctttcatacgacctacactttctgatcaatggttcaagtttgatgatgagcgtgtgacaaaagaagatgcaaagagggcactagaagagcaatatggtggtgaggaggagctacctcagacaaatcctggcttaaacaacaccccattcaagtttactaaatattcaaatgcatacatgcttgtgtacattcgtgaaagtgacaaggacaaaattatatgtaatgtggatgagaaagatatagcggagcatcttcggattagattagaaaatgaccgtgaagagaaggaacgtcggaagaaggaaaaagcggaggcacacctctatactataatcaaggttgcaagggatgatgacttaaaagctcagatagggaaagacatatattttgatcttgttgatcatgataaagtcccaagcttccgtatccagaaacagatgacctttgctcaattcaaggaggaggtagcaaaagagtttggtattcctacacagtttcaacgattttggctgtgggccaagcgacaaaaccatacctaccgacctaacaggccattgtgtcctcaagacgaagcacatactgttgggcagctaaaggaactggtgaacaaggcccacaacgcagaactgaaactgttcttggaagttgaacttggactggaccttaaacctcttcctcttcccgacaagactagagaagatatatttcttttcttcaaactctatgaacctgaaaaggaacagctgcggtatgttggtaggctttttgtaaaggcttcaggaagaccacaggacattctgctgaagttaaggatgttggcaggtttttcacaggatgatgatattgaactttatgaggaaattaagttcgagcccaatgtgatgtgtgaatacattgacaacaggcttctgtttcgatcttgccagcttgaagacggggatataatttgttttcaaaagccttcaaaaccagatagtgcagaccgatatcgatttcctgacgtcccatcctttttgacgtatatacgtaaccggcaggtggtgcacttccgttcattggagaagcccaaggacgacgaattttgccttgagatgtcaaagattttcacatatgatcaagtcgtggaaaaagtagctgaaaaacttggcgtggatgacccatcgaaaattcgtcttacatcacataattgttattcgcaacagcctaagcctcaaccaataaagtacagaggcgttgaacgtctactggatatgctgattcattataaccagacttctgatattctgtactatgaagtattggacataccacttccagaattacaagcgctgaagacattaaaagttacctaccatcatgccacaaaagatgaggtgtcagttcacagtataagattaccaaaaaacagcactgttggcgatgtgctgaatgatatcaaaacgaaggttgagttgtctcataccaatgctgagctaagattacttgaggtcttttatcacaagatatacaaggtatttgcaccaaatgaaaagattgaaaacatcaatgatcagtactggacactgcgtgcagaggaggttccagaggaggagaaaaatcttggccccttcgatcgtttgattcatgtatatcattttacaaaagacactcaaaaccaaacgcaagttcagaactttggagaacctttttttatggttattcgtgaggatgagaccctatcttctatcaaagaacgtatacagaaaaagcttaaggttccagatgaggatttctcaaagtggaagtttgcatacatttcactcggtcgtcctgactattttgaagattcagatactgtagccctaaaattccagagaaacatgtatggagcttgggagcagtatcttggactggaacatccggacacggctcctaggaaggcacacacggctaatcagaaccggcattcattcgagagacctgtaaaaatttataactaggcatgttagaaattgagcgatgagctgccgctcaataccaagccaggctgaagttgctggcttgaaatagagagcatgttgctcaggtttttcgatggagctgtggaactagttcagaggagactgatcgggcgacttgtcatctttcctgtttgttttgctgccccggatatataaagttgtacagagatgaccccaccagacaattgtctttagtagataagataactttttacagtcgagtggccgatgttttagtcgatcactctgttctgcagttggtggtggtgctaggtggccttgagctgttgagggtacttgtctttcgactctttctgtatattattgacgcggcggatgtttgtaattccaatgatacatttcttacttgctggtttccggtgctttccttgctgcatcattctaatttggcattataatttagaattgagcgatgttcatcaccacttccatgatctattcgcagctgttct

SEQ ID NO: 23544 - DNA, 4001 bp, Zea Mays
tcccctcgcgatttccacctcctcccccacccccacctccgtaacccacttccaggtgggccccccacatcgccgccggtgacacgcacctccctccctgcctcccccgctaccgaccaccacgtccacgcccccggtcatgacgacctcgccgccgcccgccgagcaggaacagcaggaggaagaggaggtgctggtgccgcatggcccgcaccaggagctgcccaatggagcgcagccaatggaagttgtgcctgctgagccagctgctaccgtggagaaccaacagatagaggatccaccaatctcgagatttacttggaccattgagaatttatcaagagttagcacaaagaagctctactctgaaatttttgttgttggaggctacaagtggcgaattttgattttccctcgggggaataatgttgaattcttatctatgtatttggatgtagctgattctggagtcttgccctatggatggactagatacgcacaattcagcctctctgtggttaatcagattcacaacaagttcacaataagaaaagaaacacaacatcagttctctgctcgagaaagtgattggggtttcacttcatttatgccgctgggtgaactctacaacccaagtaggggttatcttgtaaatgatacttgtatagtggaagctgaagttgctgtgtgtaaagttgttgagtattggagttatgactctaaaaaggaaactggctatgttggtcttaaaaatcagggtgctacctgctatatgaattctcttcttcagacactctaccacattccgtatttcagaaaggctgtttatcacatgcccaccaccgagaacgatatgccctcaggaagcatcccactagctctacagtcactcttttataagttgcagtataatgacagcagtgtctctacaaaggagctcacaaaatcgtttgggtgggatatgcatgattcatttatgcaacatgatgtacaagaattgaacagagttctttccgagaagttggaagataagatgaaggtttgacatctggaactgttgtggagggaacgatacaacaattgtttgaagggcaccacatgaactacattgagtgtatcaatgtggatttcaaatcaacaagaaaggaatccttctatgatctccagcttgatgtcaaaggttgtcaggatgtctatgcttcatttgataagtacgtagaagtggagcgtctggaaggtgacaacaagtatcatgccgacaaacatggcctgcaggatgcaaaaaaaggagttctttttatcgacttccctcctgttttgcaacttcagctaaaacgttttgagtatgatttcatgcgtgacacgatggtgaagataaacgatcgttatgaatttccactccaattggatcttgatagagataatggaaaatatttatctcctgatgctgacaggaatgtgcgtaatctttatacccttcacagtgttcttgtccatagtggtggtgttcatggtggacattactatgctttcatacgacctacactttctgatcaatggttcaagtttgatgatgagcgtgtgacaaaagaagatgcaaagagggcactagaagagcaatatggtggtgaggaggagctacctcagacaaatcctggcttaaacaacaccccattcaagtttactaaatattcaaatgcatacatgcttgtgtacattcgtgaaagtgacaaggacaaaattatatgtaatgtggatgagaaagatatagcggagcatcttcggattagattagaaaatgaccgtgaagagaaggaacgtcggaagaaggaaaaagcggaggcacacctctatactataatcaaggttgcaagggatgatgacttaaaagctcagatagggaaagacatatattttgatcttgttgatcatgataaagtcccaagcttccgtatccagaaacagatgacctttgctcaattcaaggaggaggtagcaaaagagtttggtattcctacacagtttcaacgattttggctgtgggccaagcgacaaaaccatacctaccgacctaacaggccattgtgtcctcaagacgaagcacatactgttgggcagctaaaggaactggtgaacaaggcccacaacgcagaactgaaactgttcttggaagttgaacttggactggaccttaaacctcttcctcttcccgacaagactagagaagatatatttcttttcttcaaactctatgaacctgaaaaggaacagctgcggtatgttggtaggctttttgtaaaggcttcaggaagaccacaggacattctgctgaagttaaggatgttggcaggtttttcacaggatgatgatattgaactttatgaggaaattaagttcgagcccaatgtgatgtgtgaatacattgacaacaggcttctgtttcgatcttgccagcttgaagacggggatataatttgttttcaaaagccttcaaaaccagatagtgcagaccgatatcgatttcctgacgtcccatcctttttgacgtatatacgtaaccggcaggtggtgcacttccgttcattggagaagcccaaggacgacgaattttgccttgagatgtcaaagattttcacatatgatcaagtcgtggaaaaagtagctgaaaaacttggcgtggatgacccatcgaaaattcgtcttacatcacataattgttattcgcaacagcctaagcctcaaccaataaagtacagaggcgttgaacgtctactggatatgctgattcattataaccagacttctgatattctgtactatgaagtattggacataccacttccagaattacaagcgctgaagacattaaaagttacctaccatcatgccacaaaagatgaggtgtcagttcacagtataagattaccaaaaaacagcactgttggcgatgtgctgaatgatatcaaaacgaaggttgagttgtctcataccaatgctgagctaagattacttgaggtcttttatcacaagatatacaaggtatttgcaccaaatgaaaagattgaaaacatcaatgatcagtactggacactgcgtgcagaggaggttccagaggaggagaaaaatcttggccccttcgatcgtttgattcatgtatatcattttacaaaagacactcaaaaccaaacgcaagttcagaactttggagaacctttttttatggttattcgtgaggatgagaccctatcttctatcaaagaacgtatacagaaaaagcttaaggttccagatgaggatttctcaaagtggaagtttgcatacatttcactcggtcgtcctgactattttgaagattcagatactgtagccctaaaattccagagaaacatgtatggagcttgggagcagtatcttggactggaacatccggacacggctcctaggaaggcacacacggctaatcagaaccggcattcattcgagagacctgtaaaaatttataactaggcatgttagaaattgagcgatgagctgccgctcaataccaagccaggctgaagttgctggcttgaaatagagagcatgttgctcaggtttttcgatggagctgtggaactagttcagaggagactgatcgggcgacttgtcatctttcctgtttgttttgctgccccggatatataaagttgtacagagatgaccccaccagacaattgtctttagtagataagataactttttacagtcgagtggccgatgttttagtcgatcactctgttctgcagttggtggtggtgctaggtggccttgagctgttgagggtacttgtctttcgactctttctgtatattattgacgcggcggatgtttgtaattccaatgatacatttcttacttgctggtttccggtgctttccttgctgcatcattctaatttggcattataatttagaattgagcgatgttcatcaccacttccatgatctattcgcagctgttct

SEQ ID NO: 23545 - DNA, 3911 bp, Zea Mays
tcccctcgcgatttccacctcctcccccacccccacctccgtaacccacttccaggtgggccccccacatcgccgccggtgacacgcacctccctccctgcctcccccgctaccgaccaccacgtccacgcccccggtcatgacgacctcgccgccgcccgccgagcaggaacagcaggaggaagaggaggtgctggtgccgcatggcccgcaccaggagctgcccaatggagcgcagccaatggaagttgtgcctgctgagccagctgctaccgtggagaaccaacagatagaggatccaccaatctcgagatttacttggaccattgagaatttatcaagagttagcacaaagaagctctactctgaaatttttgttgttggaggctacaagtggcgaattttgattttccctcgggggaataatgttgaattcttatctatgtatttggatgtagctgattctggagtcttgccctatggatggactagatacgcacaattcagcctctctgtggttaatcagattcacaacaagttcacaataagaaaagaaacacaacatcagttctctgctcgagaaagtgattggggtttcacttcatttatgccgctgggtgaactctacaacccaagtaggggttatcttgtaaatgatacttgtatagtggaagctgaagttgctgtgtgtaaagttgttgagtattggagttatgactctaaaaaggaaactggctatgttggtcttaaaaatcagggtgctacctgctatatgaattctcttcttcagacactctaccacattccgtatttcagaaaggtagaaacgagaaatcacatgccactgcccatgtgctcaacctgttctgatagatacagctaactacagatatctcttgccaggctgtttatcacatgcccaccaccgagaacgatatgccctcaggaagcatcccactagctctacagtcactcttttataagttgcagtataatgacagcagtgtctctacaaaggagctcacaaaatcgtttgggtgggatatgcatgattcatttatgcaacatgatgtacaagaattgaacagagttctttccgagaagttggaagataagatgaagggaactgttgtggagggaacgatacaacaattgtttgaagggcaccacatgaactacattgagtatctccagcttgatgtcaaaggttgtcaggatgtctatgcttcatttgataagtacgtagaagtggagcgtctggaaggtgacaacaagtatcatgccgacaaacatggcctgcaggatgcaaaaaaaggagttctttttatcgacttccctcctgttttgcaacttcagctaaaacgttttgagtatgatttcatgcgtgacacgatggtgaagataaacgatcgttatgaatttccactccaattggatcttgatagagataatggaaaatatttatctcctgatgctgacaggaatgtgcgtaatctttatacccttcacagtgttcttgtccatagtggtggtgttcatggtggacattactatgctttcatacgacctacactttctgatcaatggttcaagtttgatgatgagcgtgtgacaaaagaagatgcaaagagggcactagaagagcaatatggtggtgaggaggagctacctcagacaaatcctggcttaaacaacaccccattcaagtttactaaatattcaaatgcatacatgcttgtgtacattcgtgaaagtgacaaggacaaaattatatgtaatgtggatgagaaagatatagcggagcatcttcggattagattagaaaatgaccgtgaagagaaggaacgtcggaagaaggaaaaagcggaggcacacctctatactataatcaaggttgcaagggatgatgacttaaaagctcagatagggaaagacatatattttgatcttgttgatcatgataaagtcccaagcttccgtatccagaaacagatgacctttgctcaattcaaggaggaggtagcaaaagagtttggtattcctacacagtttcaacgattttggctgtgggccaagcgacaaaaccatacctaccgacctaacaggccattgtgtcctcaagacgaagcacatactgttgggcagctaaaggaactggtgaacaaggcccacaacgcagaactgaaactgttcttggaagttgaacttggactggaccttaaacctcttcctcttcccgacaagactagagaagatatatttcttttcttcaaactctatgaacctgaaaaggaacagctgcggtatgttggtaggctttttgtaaaggcttcaggaagaccacaggacattctgctgaagttaaggatgttggcaggtttttcacaggatgatgatattgaactttatgaggaaattaagttcgagcccaatgtgatgtgtgaatacattgacaacaggcttctgtttcgatcttgccagcttgaagacggggatataatttgttttcaaaagccttcaaaaccagatagtgcagaccgatatcgatttcctgacgtcccatcctttttgacgtatatacgtaaccggcaggtggtgcacttccgttcattggagaagcccaaggacgacgaattttgccttgagatgtcaaagattttcacatatgatcaagtcgtggaaaaagtagctgaaaaacttggcgtggatgacccatcgaaaattcgtcttacatcacataattgttattcgcaacagcctaagcctcaaccaataaagtacagaggcgttgaacgtctactggatatgctgattcattataaccagacttctgatattctgtactatgaagtattggacataccacttccagaattacaagcgctgaagacattaaaagttacctaccatcatgccacaaaagatgaggtgtcagttcacagtataagattaccaaaaaacagcactgttggcgatgtgctgaatgatatcaaaacgaaggttgagttgtctcataccaatgctgagctaagattacttgaggtcttttatcacaagatatacaaggtatttgcaccaaatgaaaagattgaaaacatcaatgatcagtactggacactgcgtgcagaggaggttccagaggaggagaaaaatcttggccccttcgatcgtttgattcatgtatatcattttacaaaagacactcaaaaccaaacgtggaagtttgcatacatttcactcggtcgtcctgactattttgaagattcagatactgtagccctaaaattccagagaaacatgtatggagcttgggagcagtatcttggactggaacatccggacacggctcctaggaaggcacacacggctaatcagaaccggcattcattcgagagacctgtaaaaatttataactaggcatgttagaaattgagcgatgagctgccgctcaataccaagccaggctgaagttgctggcttgaaatagagagcatgttgctcaggtttttcgatggagctgtggaactagttcagaggagactgatcgggcgacttgtcatctttcctgtttgttttgctgccccggatatataaagttgtacagagatgaccccaccagacaattgtctttagtagataagataactttttacagtcgagtggccgatgttttagtcgatcactctgttctgcagttggtggtggtgctaggtggccttgagctgttgagggtacttgtctttcgactctttctgtatattattgacgcggcggatgtttgtaattccaatgatacatttcttacttgctggtttccggtgctttccttgctgcatcattctaatttggcattataatttagaattgagcgatgttcatcaccacttccatgatctattcgcagctgttct

SEQ ID NO: 23546 - DNA, 3987 bp, Zea Mays
tcccctcgcgatttccacctcctcccccacccccacctccgtaacccacttccaggtgggccccccacatcgccgccggtgacacgcacctccctccctgcctcccccgctaccgaccaccacgtccacgcccccggtcatgacgacctcgccgccgcccgccgaggaacagcaggaggaagaggaggtgctggtgccgcatggcccgcaccaggagctgcccaatggagcgcagccaatggaagttgtgcctgctgagccagctgctaccgtggagaaccaacagatagaggatccaccaatctcgagatttacttggaccattgagaatttatcaagagttagcacaaagaagctctactctgaaatttttgttgttggaggctacaagtggcgaattttgattttccctcgggggaataatgttgaattcttatctatgtatttggatgtagctgattctggagtcttgccctatggatggactagatacgcacaattcagcctctctgtggttaatcagattcacaacaagttcacaataagaaaagaaacacaacatcagttctctgctcgagaaagtgattggggtttcacttcatttatgccgctgggtgaactctacaacccaagtaggggttatcttgtaaatgatacttgtatagtggaagctgaagttgctgtgtgtaaagttgttgagtattggagttatgactctaaaaaggaaactggctatgttggtcttaaaaatcagggtgctacctgctatatgaattctcttcttcagacactctaccacattccgtatttcagaaaggctgtttatcacatgcccaccaccgagaacgatatgccctcaggaagcatcccactagctctacagtcactcttttataagttgcagtataatgacagcagtgtctctacaaaggagctcacaaaatcgtttgggtgggatatgcatgattcatttatgcaacatgatgtacaagaattgaacagagttctttccgagaagttggaagataagatgaagggaactgttgtggagggaacgatacaacaattgtttgaagggcaccacatgaactacattgagtgtatcaatgtggatttcaaatcaacaagaaaggaatccttctatgatctccagcttgatgtcaaaggttgtcaggatgtctatgcttcatttgataagtacgtagaagtggagcgtctggaaggtgacaacaagtatcatgccgacaaacatggcctgcaggatgcaaaaaaaggagttctttttatcgacttccctcctgttttgcaacttcagctaaaacgttttgagtatgatttcatgcgtgacacgatggtgaagataaacgatcgttatgaatttccactccaattggatcttgatagagataatggaaaatatttatctcctgatgctgacaggaatgtgcgtaatctttatacccttcacagtgttcttgtccatagtggtggtgttcatggtggacattactatgctttcatacgacctacactttctgatcaatggttcaagtttgatgatgagcgtgtgacaaaagaagatgcaaagagggcactagaagagcaatatggtggtgaggaggagctacctcagacaaatcctggcttaaacaacaccccattcaagtttactaaatattcaaatgcatacatgcttgtgtacattcgtgaaagtgacaaggacaaaattatatgtaatgtggatgagaaagatatagcggagcatcttcggattagattagaaaatgaccgtgaagagaaggaacgtcggaagaaggaaaaagcggaggcacacctctatactataatcaaggttgcaagggatgatgacttaaaagctcagatagggaaagacatatattttgatcttgttgatcatgataaagtcccaagcttccgtatccagaaacagatgacctttgctcaattcaaggaggaggtagcaaaagagtttggtattcctacacagtttcaacgattttggctgtgggccaagcgacaaaaccatacctaccgacctaacaggccattgtgtcctcaagacgaagcacatactgttgggcagctaaaggaactggtgaacaaggcccacaacgcagaactgaaactgttcttggaagttgaacttggactggaccttaaacctcttcctcttcccgacaagactagagaagatatatttcttttcttcaaactctatgaacctgaaaaggaacagctgcggtatgttggtaggctttttgtaaaggcttcaggaagaccacaggacattctgctgaagttaaggatgttggcaggtttttcacaggatgatgatattgaactttatgaggaaattaagttcgagcccaatgtgatgtgtgaatacattgacaacaggcttctgtttcgatcttgccagcttgaagacggggatataatttgttttcaaaagccttcaaaaccagatagtgcagaccgatatcgatttcctgacgtcccatcctttttgacgtatatacgtaaccggcaggtggtgcacttccgttcattggagaagcccaaggacgacgaattttgccttgagatgtcaaagattttcacatatgatcaagtcgtggaaaaagtagctgaaaaacttggcgtggatgacccatcgaaaattcgtcttacatcacataattgttattcgcaacagcctaagcctcaaccaataaagtacagaggcgttgaacgtctactggatatgctgattcattataaccagacttctgatattctgtactatgaagtattggacataccacttccagaattacaagcgctgaagacattaaaagttacctaccatcatgccacaaaagatgaggtgtcagttcacagtataagattaccaaaaaacagcactgttggcgatgtgctgaatgatatcaaaacgaaggttgagttgtctcataccaatgctgagctaagattacttgaggtcttttatcacaagatatacaaggtatttgcaccaaatgaaaagattgaaaacatcaatgatcagtactggacactgcgtgcagaggaggttccagaggaggagaaaaatcttggccccttcgatcgtttgattcatgtatatcattttacaaaagacactcaaaaccaaacgcaagttcagaactttggagaacctttttttatggttattcgtgaggatgagaccctatcttctatcaaagaacgtatacagaaaaagcttaaggttccagatgaggatttctcaaagtggaagtttgcatacatttcactcggtcgtcctgactattttgaagattcagatactgtagccctaaaattccagagaaacatgtatggagcttgggagcagtatcttggactggaacatccggacacggctcctaggaaggcacacacggctaatcagaaccggcattcattcgagagacctgtaaaaatttataactaggcatgttagaaattgagcgatgagctgccgctcaataccaagccaggctgaagttgctggcttgaaatagagagcatgttgctcaggtttttcgatggagctgtggaactagttcagaggagactgatcgggcgacttgtcatctttcctgtttgttttgctgccccggatatataaagttgtacagagatgaccccaccagacaattgtctttagtagataagataactttttacagtcgagtggccgatgttttagtcgatcactctgttctgcagttggtggtggtgctaggtggccttgagctgttgagggtacttgtctttcgactctttctgtatattattgacgcggcggatgtttgtaattccaatgatacatttcttacttgctggtttccggtgctttccttgctgcatcattctaatttggcattataatttagaattgagcgatgttcatcaccacttccatgatctattcgcagctgttct

SEQ ID NO: 23547 - DNA, 4074 bp, Zea Mays
tcccctcgcgatttccacctcctcccccacccccacctccgtaacccacttccaggtgggccccccacatcgccgccggtgacacgcacctccctccctgcctcccccgctaccgaccaccacgtccacgcccccggtcatgacgacctcgccgccgcccgccgagcaggaacagcaggaggaagaggaggtgctggtgccgcatggcccgcaccaggagctgcccaatggagcgcagccaatggaagttgtgcctgctgagccagctgctaccgtggagaaccaacagatagaggatccaccaatctcgagatttacttggaccattgagaatttatcaagagttagcacaaagaagctctactctgaaatttttgttgttggaggctacaagtggcgaattttgattttccctcgggggaataatgttgaattcttatctatgtatttggatgtagctgattctggagtcttgccctatggatggactagatacgcacaattcagcctctctgtggttaatcagattcacaacaagttcacaataagaaaagaaacacaacatcagttctctgctcgagaaagtgattggggtttcacttcatttatgccgctgggtgaactctacaacccaagtaggggttatcttgtaaatgatacttgtatagtggaagctgaagttgctgtgtgtaaagttgttgagtattggagttatgactctaaaaaggaaactggctatgttggtcttaaaaatcagggtgctacctgctatatgaattctcttcttcagacactctaccacattccgtatttcagaaaggctgtttatcacatgcccaccaccgagaacgatatgccctcaggaagcatcccactagctctacagtcactcttttataagttgcagtataatgacagcagtgtctctacaaaggagctcacaaaatcgtttgggtgggatatgcatgattcatttatgcaacatgatgtacaagaattgaacagagttctttccgagaagttggaagataagatgaagggaactgttgtggagggaacgatacaacaattgtttgaagggcaccacatgaactacattgagtgtatcaatgtggatttcaaatcaacaagaaaggaatccttctatgatctccagcttgatgtcaaaggttgtcaggatgtctatgcttcatttgataagtacgtagaagtggagcgtctggaaggtgacaacaagtatcatgccgacaaacatggcctgcaggatgcaaaaaaaggagttctttttatcgacttccctcctgttttgcaacttcagctaaaacgttttgagtatgatttcatgcgtgacacgatggtgaagataaacgatcgttatgaatttccactccaattggatcttgatagagataatggaaaatatttatctcctgatgctgacaggaatgtgcgtaatctttatacccttcacagtgttcttgtccatagtggtggtgttcatggtggacattactatgctttcatacgacctacactttctgatcaatggttcaagtttgatgatgagcgtgtgacaaaagaagatgcaaagagggcactagaagagcaatatggtggtgaggaggagctacctcagacaaatcctggcttaaacaacaccccattcaagtttactaaatattcaaatgcatacatgcttgtgtacattcgtgaaagtgacaaggacaaaattatatgtaatgtggatgagaaagatatagcggagcatcttcgggtaatttgtccccctaagacttgagtttcatggtgtcttcttttgtaggctctaatgcctaaatctgctctcagattagattagaaaatgaccgtgaagagaaggaacgtcggaagaaggaaaaagcggaggcacacctctatactataatcaaggttgcaagggatgatgacttaaaagctcagatagggaaagacatatattttgatcttgttgatcatgataaagtcccaagcttccgtatccagaaacagatgacctttgctcaattcaagtgctttacaggaggaggtagcaaaagagtttggtattcctacacagtttcaacgattttggctgtgggccaagcgacaaaaccatacctaccgacctaacaggccattgtgtcctcaagacgaagcacatactgttgggcagctaaaggaactggtgaacaaggcccacaacgcagaactgaaactgttcttggaagttgaacttggactggaccttaaacctcttcctcttcccgacaagactagagaagatatatttcttttcttcaaactctatgaacctgaaaaggaacagctgcggtatgttggtaggctttttgtaaaggcttcaggaagaccacaggacattctgctgaagttaaggatgttggcaggtttttcacaggatgatgatattgaactttatgaggaaattaagttcgagcccaatgtgatgtgtgaatacattgacaacaggcttctgtttcgatcttgccagcttgaagacggggatataatttgttttcaaaagccttcaaaaccagatagtgcagaccgatatcgatttcctgacgtcccatcctttttgacgtatatacgtaaccggcaggtggtgcacttccgttcattggagaagcccaaggacgacgaattttgccttgagatgtcaaagattttcacatatgatcaagtcgtggaaaaagtagctgaaaaacttggcgtggatgacccatcgaaaattcgtcttacatcacataattgttattcgcaacagcctaagcctcaaccaataaagtacagaggcgttgaacgtctactggatatgctgattcattataaccagacttctgatattctgtactatgaagtattggacataccacttccagaattacaagcgctgaagacattaaaagttacctaccatcatgccacaaaagatgaggtgtcagttcacagtataagattaccaaaaaacagcactgttggcgatgtgctgaatgatatcaaaacgaaggttgagttgtctcataccaatgctgagctaagattacttgaggtcttttatcacaagatatacaaggtatttgcaccaaatgaaaagattgaaaacatcaatgatcagtactggacactgcgtgcagaggaggttccagaggaggagaaaaatcttggccccttcgatcgtttgattcatgtatatcattttacaaaagacactcaaaaccaaacgcaagttcagaactttggagaacctttttttatggttattcgtgaggatgagaccctatcttctatcaaagaacgtatacagaaaaagcttaaggttccagatgaggatttctcaaagtggaagtttgcatacatttcactcggtcgtcctgactattttgaagattcagatactgtagccctaaaattccagagaaacatgtatggagcttgggagcagtatcttggactggaacatccggacacggctcctaggaaggcacacacggctaatcagaaccggcattcattcgagagacctgtaaaaatttataactaggcatgttagaaattgagcgatgagctgccgctcaataccaagccaggctgaagttgctggcttgaaatagagagcatgttgctcaggtttttcgatggagctgtggaactagttcagaggagactgatcgggcgacttgtcatctttcctgtttgttttgctgccccggatatataaagttgtacagagatgaccccaccagacaattgtctttagtagataagataactttttacagtcgagtggccgatgttttagtcgatcactctgttctgcagttggtggtggtgctaggtggccttgagctgttgagggtacttgtctttcgactctttctgtatattattgacgcggcggatgtttgtaattccaatgatacatttcttacttgctggtttccggtgctttccttgctgcatcattctaatttggcattataatttagaattgagcgatgttcatcaccacttccatgatctattcgcagctgttct

SEQ ID NO: 23548 - DNA, 3963 bp, Zea Mays
tcccctcgcgatttccacctcctcccccacccccacctccgtaacccacttccaggtgggccccccacatcgccgccggtgacacgcacctccctccctgcctcccccgctaccgaccaccacgtccacgcccccggtcatgacgacctcgccgccgcccgccgagcaggaacagcaggaggaagaggaggtgctggtgccgcatggcccgcaccaggagctgcccaatggagcgcagccaatggaagttgtgcctgctgagccagctgctaccgtggagaaccaacagatagaggatccaccaatctcgagatttacttggaccattgagaatttatcaagagttagcacaaagaagctctactctgaaatttttgttgttggaggctacaagtggcgaattttgattttccctcgggggaataatgttgaattcttatctatgtatttggatgtagctgattctggagtcttgccctatggatggactagatacgcacaattcagcctctctgtggttaatcagattcacaacaagttcacaataagaaaagaaacacaacatcagttctctgctcgagaaagtgattggggtttcacttcatttatgccgctgggtgaactctacaacccaagtaggggttatcttgtaaatgatacttgtatagtggaagctgaagttgctgtgtgtaaagttgttgagtattggagttatgactctaaaaaggaaactggctatgttggtcttaaaaatcagggtgctacctgctatatgaattctcttcttcagacactctaccacattccgtatttcagaaaggctgtttatcacatgcccaccaccgagaacgatatgccctcaggaagcatcccactagctctacagtcactcttttataagttgcagtataatgacagcagtgtctctacaaaggagctcacaaaatcgtttgggtgggatatgcatgattcatttatgcaacatgatgtacaagaattgaacagagttctttccgagaagttggaagataagatgaagggaactgttgtggagggaacgatacaacaattgtttgaagggcaccacatgaactacattgagtatctccagcttgatgtcaaaggttgtcaggatgtctatgcttcatttgataagtacgtagaagtggagcgtctggaaggtgacaacaagtatcatgccgacaaacatggcctgcaggtcctagagccctctgaggcgtctatggaccacaatgggaggcaacatgctcatcgctactggatgtcttcaattccttgtaggtgtgttaaggatgcaaaaaaaggagttctttttatcgacttccctcctgttttgcaacttcagctaaaacgttttgagtatgatttcatgcgtgacacgatggtgaagataaacgatcgttatgaatttccactccaattggatcttgatagagataatggaaaatatttatctcctgatgctgacaggaatgtgcgtaatctttatacccttcacaggttcaagtttgatgatgagcgtgtgacaaaagaagatgcaaagagggcactagaagagcaatatggtggtgaggaggagctacctcagacaaatcctggcttaaacaacaccccattcaagtttactaaatattcaaatgcatacatgcttgtgtacattcgtgaaagtgacaaggacaaaattatatgtaatgtggatgagaaagatatagcggagcatcttcggattagattagaaaatgaccgtgaagagaaggaacgtcggaagaaggaaaaagcggaggcacacctctatactataatcaaggttgcaagggatgatgacttaaaagctcagatagggaaagacatatattttgatcttgttgatcatgataaagtcccaagcttccgtatccagaaacagatgacctttgctcaattcaaggaggaggtagcaaaagagtttggtattcctacacagtttcaacgattttggctgtgggccaagcgacaaaaccatacctaccgacctaacaggccattgtgtcctcaagacgaagcacatactgttgggcagctaaaggaactggtgaacaaggcccacaacgcagaactgaaactgttcttggaagttgaacttggactggaccttaaacctcttcctcttcccgacaagactagagaagatatatttcttttcttcaaactctatgaacctgaaaaggaacagctgcggtatgttggtaggctttttgtaaaggcttcaggaagaccacaggacattctgctgaagttaaggatgttggcaggtttttcacaggatgatgatattgaactttatgaggaaattaagttcgagcccaatgtgatgtgtgaatacattgacaacaggcttctgtttcgatcttgccagcttgaagacggggatataatttgttttcaaaagccttcaaaaccagatagtgcagaccgatatcgatttcctgacgtcccatcctttttgacgtatatacgtaaccggcaggtggtgcacttccgttcattggagaagcccaaggacgacgaattttgccttgagatgtcaaagattttcacatatgatcaagtcgtggaaaaagtagctgaaaaacttggcgtggatgacccatcgaaaattcgtcttacatcacataattgttattcgcaacagcctaagcctcaaccaataaagtacagaggcgttgaacgtctactggatatgctgattcattataaccagacttctgatattctgtactatgaagtattggacataccacttccagaattacaagcgctgaagacattaaaagttacctaccatcatgccacaaaagatgaggtgtcagttcacagtataagattaccaaaaaacagcactgttggcgatgtgctgaatgatatcaaaacgaaggttgagttgtctcataccaatgctgagctaagattacttgaggtcttttatcacaagatatacaaggtatttgcaccaaatgaaaagattgaaaacatcaatgatcagtactggacactgcgtgcagaggaggttccagaggaggagaaaaatcttggccccttcgatcgtttgattcatgtatatcattttacaaaagacactcaaaaccaaacgcaagttcagaactttggagaacctttttttatggttattcgtgaggatgagaccctatcttctatcaaagaacgtatacagaaaaagcttaaggttccagatgaggatttctcaaagtggaagtttgcatacatttcactcggtcgtcctgactattttgaagattcagatactgtagccctaaaattccagagaaacatgtatggagcttgggagcagtatcttggactggaacatccggacacggctcctaggaaggcacacacggctaatcagaaccggcattcattcgagagacctgtaaaaatttataactaggcatgttagaaattgagcgatgagctgccgctcaataccaagccaggctgaagttgctggcttgaaatagagagcatgttgctcaggtttttcgatggagctgtggaactagttcagaggagactgatcgggcgacttgtcatctttcctgtttgttttgctgccccggatatataaagttgtacagagatgaccccaccagacaattgtctttagtagataagataactttttacagtcgagtggccgatgttttagtcgatcactctgttctgcagttggtggtggtgctaggtggccttgagctgttgagggtacttgtctttcgactctttctgtatattattgacgcggcggatgtttgtaattccaatgatacatttcttacttgctggtttccggtgctttccttgctgcatcattctaatttggcattataatttagaattgagcgatgttcatcaccacttccatgatctattcgcagctgttct

SEQ ID NO: 23549 - DNA, 3886 bp, Zea Mays
tcccctcgcgatttccacctcctcccccacccccacctccgtaacccacttccaggtgggccccccacatcgccgccggtgacacgcacctccctccctgcctcccccgctaccgaccaccacgtccacgcccccggtcatgacgacctcgccgccgcccgccgagcaggaacagcaggaggaagaggaggtgctggtgccgcatggcccgcaccaggagctgcccaatggagcgcagccaatggaagttgtgcctgctgagccagctgctaccgtggagaaccaacagatagaggatccaccaatctcgagatttacttggaccattgagaatttatcaagagttagcacaaagaagctctactctgaaatttttgttgttggaggctacaagtggcgaattttgattttccctcgggggaataatgttgaattcttatctatgtatttggatgtagctgattctggagtcttgccctatggatggactagatacgcacaattcagcctctctgtggttaatcagattcacaacaagttcacaataagaaaagaaacacaacatcagttctctgctcgagaaagtgattggggtttcacttcatttatgccgctgggtgaactctacaacccaagtaggggttatcttgtaaatgatacttgtatagtggaagctgaagttgctgtgtgtaaagttgttgagtattggagttatgactctaaaaaggaaactggctatgttggtcttaaaaatcagggtgctacctgctatatgaattctcttcttcagacactctaccacattccgtatttcagaaagatacagctaactacagatatctcttgccaggctgtttatcacatgcccaccaccgagaacgatatgccctcaggaagcatcccactagctctacagtcactcttttataagttgcagtataatgacagcagtgtctctacaaaggagctcacaaaatcgtttgggtgggatatgcatgattcatttatgcaacatgatgtacaagaattgaacagagttctttccgagaagttggaagataagatgaagggaactgttgtggagggaacgatacaacaattgtttgaagggcaccacatgaactacattgagtatctccagcttgatgtcaaaggttgtcaggatgtctatgcttcatttgataagtacgtagaagtggagcgtctggaaggtgacaacaagtatcatgccgacaaacatggcctgcaggatgcaaaaaaaggagttctttttatcgacttccctcctgttttgcaacttcagctaaaacgttttgagtatgatttcatgcgtgacacgatggtgaagataaacgatcgttatgaatttccactccaattggatcttgatagagataatggaaaatatttatctcctgatgctgacaggaatgtgcgtaatctttatacccttcacagtgttcttgtccatagtggtggtgttcatggtggacattactatgctttcatacgacctacactttctgatcaatggttcaagtttgatgatgagcgtgtgacaaaagaagatgcaaagagggcactagaagagcaatatggtggtgaggaggagctacctcagacaaatcctggcttaaacaacaccccattcaagtttactaaatattcaaatgcatacatgcttgtgtacattcgtgaaagtgacaaggacaaaattatatgtaatgtggatgagaaagatatagcggagcatcttcggattagattagaaaatgaccgtgaagagaaggaacgtcggaagaaggaaaaagcggaggcacacctctatactataatcaaggttgcaagggatgatgacttaaaagctcagatagggaaagacatatattttgatcttgttgatcatgataaagtcccaagcttccgtatccagaaacagatgacctttgctcaattcaaggaggaggtagcaaaagagtttggtattcctacacagtttcaacgattttggctgtgggccaagcgacaaaaccatacctaccgacctaacaggccattgtgtcctcaagacgaagcacatactgttgggcagctaaaggaactggtgaacaaggcccacaacgcagaactgaaactgttcttggaagttgaacttggactggtatgttggtaggctttttgtaaaggcttcaggaagaccacaggacattctgctgaagttaaggatgttggcaggtttttcacaggatgatgatattgaactttatgaggaaattaagttcgagcccaatgtgatgtgtgaatacattgacaacaggcttctgtttcgatcttgccagcttgaagacggggatataatttgttttcaaaagccttcaaaaccagatagtgcagaccgatatcgatttcctgacgtcccatcctttttgacgtatatacgtaaccggcaggtggtgcacttccgttcattggagaagcccaaggacgacgaattttgccttgagatgtcaaagattttcacatatgatcaagtcgtggaaaaagtagctgaaaaacttggcgtggatgacccatcgaaaattcgtcttacatcacataattgttattcgcaacagcctaagcctcaaccaataaagtacagaggcgttgaacgtctactggatatgctgattcattataaccagacttctgatattctgtactatgaagtattggacataccacttccagaattacaagcgctgaagacattaaaagttacctaccatcatgccacaaaagatgaggtgtcagttcacagtataagattaccaaaaaacagcactgttggcgatgtgctgaatgatatcaaaacgaaggttgagttgtctcataccaatgctgagctaagattacttgaggtcttttatcacaagatatacaaggtatttgcaccaaatgaaaagattgaaaacatcaatgatcagtactggacactgcgtgcagaggaggttccagaggaggagaaaaatcttggccccttcgatcgtttgattcatgtatatcattttacaaaagacactcaaaaccaaacgcaagttcagaactttggagaacctttttttatggttattcgtgaggatgagaccctatcttctatcaaagaacgtatacagaaaaagcttaaggttccagatgaggatttctcaaagtggaagtttgcatacatttcactcggtcgtcctgactattttgaagattcagatactgtagccctaaaattccagagaaacatgtatggagcttgggagcagtatcttggactggaacatccggacacggctcctaggaaggcacacacggctaatcagaaccggcattcattcgagagacctgtaaaaatttataactaggcatgttagaaattgagcgatgagctgccgctcaataccaagccaggctgaagttgctggcttgaaatagagagcatgttgctcaggtttttcgatggagctgtggaactagttcagaggagactgatcgggcgacttgtcatctttcctgtttgttttgctgccccggatatataaagttgtacagagatgaccccaccagacaattgtctttagtagataagataactttttacagtcgagtggccgatgttttagtcgatcactctgttctgcagttggtggtggtgctaggtggccttgagctgttgagggtacttgtctttcgactctttctgtatattattgacgcggcggatgtttgtaattccaatgatacatttcttacttgctggtttccggtgctttccttgctgcatcattctaatttggcattataatttagaattgagcgatgttcatcaccacttccatgatctattcgcagctgttct

SEQ ID NO: 23550 - DNA, 1870 bp, Zea Mays
tttcatgattctaggtgcggaggatgtttggctgccagctgccactcctcccttaggaccttaaacctcttcctcttcccgacaagactagagaagatatatttcttttcttcaaactctatgaacctgaaaaggaacagctgcggtatgttggtaggctttttgtaaaggcttcaggaagaccacaggacattctgctgaagttaaggatgttggcaggtttttcacaggatgatgatattgaactttatgaggaaattaagttcgagcccaatgtgatgtgtgaatacattgacaacaggcttctgtttcgatcttgccagcttgaagacggggatataatttgttttcaaaagccttcaaaaccagatagtgcagaccgatatcgatttcctgacgtcccatcctttttgacgtatatacgtaaccggcaggtggtgcacttccgttcattggagaagcccaaggacgacgaattttgccttgagatgtcaaagattttcacatatgatcaagtcgtggaaaaagtagctgaaaaacttggcgtggatgacccatcgaaaattcgtcttacatcacataattgttattcgcaacagcctaagcctcaaccaataaagtacagaggcgttgaacgtctactggatatgctgattcattataaccagacttctgatattctgtactatgaagtattggacataccacttccagaattacaagcgctgaagacattaaaagttacctaccatcatgccacaaaagatgaggtgtcagttcacagtataagattaccaaaaaacagcactgttggcgatgtgctgaatgatatcaaaacgaaggttgagttgtctcataccaatgctgagctaagattacttgaggtcttttatcacaagatatacaaggtatttgcaccaaatgaaaagattgaaaacatcaatgatcagtactggacactgcgtgcagaggaggttccagaggaggagaaaaatcttggccccttcgatcgtttgattcatgtatatcattttacaaaagacactcaaaaccaaacgcaagttcagaactttggagaacctttttttatggttattcgtgaggatgagaccctatcttctatcaaagaacgtatacagaaaaagcttaaggttccagatgaggatttctcaaagtggaagtttgcatacatttcactcggtcgtcctgactattttgaagattcagatactgtagccctaaaattccagagaaacatgtatggagcttgggagcagtatcttggactggaacatccggacacggctcctaggaaggcacacacggctaatcagaaccggcattcattcgagagacctgtaaaaatttataactaggcatgttagaaattgagcgatgagctgccgctcaataccaagccaggctgaagttgctggcttgaaatagagagcatgttgctcaggtttttcgatggagctgtggaactagttcagaggagactgatcgggcgacttgtcatctttcctgtttgttttgctgccccggatatataaagttgtacagagatgaccccaccagacaattgtctttagtagataagataactttttacagtcgagtggccgatgttttagtcgatcactctgttctgcagttggtggtggtgctaggtggccttgagctgttgagggtacttgtctttcgactctttctgtatattattgacgcggcggatgtttgtaattccaatgatacatttcttacttgctggtttccggtgctttccttgctgcatcattctaatttggcattataatttagaattgagcgatgttcatcaccacttccatgatctattcgcagctgttct

SEQ ID NO: 23551 - DNA, 903 bp, Zea Mays
tgttttaatttggacagtggtgtgagtgggtgtgccttgtatgggtttttatcccagtttttccttaatataatgatgtgcagatctcctatgtgctcgagaaaataaaactatttaataggaatcatgcaactaacagaagacacaaaagggcatttctaaagaatgcatttgtcttaaaccctgatgaaggctatagtaaaactgcagcagcaggtcagacggttctttaatctttcggtcttaactgtggtcggagatgggaccagtactctattttggttagataaatggttgaatgggaaggctatccaagatattgcaccagatgttgtctgtttggtggacagtagagtcagctctaccaggacggttgctcaagctatggataattggcagcgggttagtgatattgggagtcatctatatctgattgggctgcagcagtacttgaagttatgggatgctcttggggaggtaacgctttcacaggaggcggacaggcttgtttggatgcacactgcatttgggcagttctcttctaggtcttgctacagagccttcttcatggggttcatctcctttgagccatggaaaagattgtggaaaacctgggctccccctaaatgcaagtttttcctttggttagctataaggaataaatgttggactgctgacaggctccaaatgagaggattgcaatacccggtgtgttgtcccctatgtgatcaggagcaggaaacagtccagcatatcctctgcacctgcagttttactagacaattttggcatctcattttgtcgtccatcgggcttggtgacctcactccgtttgttgttgaacagtcctttgctgagtggtgggggaaggcttctaaaaaagtgcaaaggtgcaagaggaag

SEQ ID NO: 23552 - DNA, 93 bp, Zea Mays
ttacttctctttccactcccaaacttttttggtgaactcctctcgcgtcatatctgtcctcttgacaccttcagcggccagcatcttttccac

SEQ ID NO: 23553 - DNA, 483 bp, Zea Mays
taccatttgtaaattttctcctcgttggtgaagtcgaacgacttagcgacctccggggagttgaacacatccgtctcggaggcaatcgctgcaacggagcagacccaagcaatccagtcagctgacaagccattctcggcgcagaattagttaacaagctagacgaacccgccgctacctgcggagaacctgcgggcgacgcggcgcggggcccacgccgggcggcggcaggcggcggcagagaggaggagcgggttgagccggcggaggcaggcggacgaggagcatgagaggagagcggaggacgggcgcgcgagcgccattggcggttggcgcggcctcgcttgagataaaccctagtgggcgcgcaggagggctcggatgccgctatcgctgagagggagcctgtgagggaggggtttggattcgggataacgccggacggcggcaccgcgggagtgtggtgctgagcagcctgagcag

SEQ ID NO: 23554 - DNA, 1947 bp, Zea Mays
acaccactctgctccactccgccatggccacctccctcctacgcctctctcgccaccgccgcgcgctgctcgccatctcctccgtccgccttgcgctctccacccagccccacgtcccatctccgtccccatcccctaccccctcctccgcccgccgcctcccgcatttcctctccttcctcgccgccgccgccgccgccgccgctgggggagcaaccgtcgcgctctgcgactccggcctagatcaccgggtcgggggcaaggacagcgccgatctggtggttcgtggggagcggaagttcgtgccgcaggagttcatcgacgagctcgcgtccttcctcggggacaacatcactctggactacgaggagaggagcttccatggcacgccacagaacagcttccacaaggcggtcaacctgcctgatgtcgtcgtgttcccgagctcgcaagatgaggtacaaaggattgtgatggcctgtaacaagcacaaggttccaattgtaccatatggtggggctacctcaatagagggtcacacactggcacctcatggtggtgtttgcatcgacatgaccttgatgaagggcctggggccaccattggaggaatgtgtgctactcgttgttctggttcattagctgtgaggtatggaacaatgcgggataatgtgattaatcttcgggctgttttgccaaatggtgatgttgtcaagacaggctcccgggctcgaaagagtgcagctgggtatgaccttgctcgtttgatcattgggagtgaaggaactttgggtgtaattacagaagtgactttacgactccaaaagcttccatctcattctgtagttgcaatgtgcaatttcaaaacaattaaggatgctgctgatgttgctattgcaacaatgctttctgggatacaggtttcaagagtggaattgttggacgaggttcagataaaggcaataaatatggcaaatggcaaaaatttgcctgaagtgccgaccttgatgtttgaattcatagggacagaagcatatgctctggaacaaactctcttggttcaaaaaattgccactgaacaccatggatcagattttgtttttgtcgaggagccagatgctaaagcggaactatggaagatcaggaaggaggcactttgggctggttttgctatgaaacctgatcatgaagctatgataacggatgtttgtgtccctctatccagacttgctgaatgcatatctacatcaaagcgattgcttgatgcgtcgccattgacttgtctggttattgctcatgctggtgatggaaattttcacacaattatcctgtttgatccaagccaagaggaccaacgaaaggaagcagagagactaaaccatttcatggtccatacagctctgtctatggaaggtacatgcacaggagagcatggtgttggcacagggaaaatgaagtacctggagaaggagttgggcatcgagtcactcaggacgatgaaaagaataaaggcggcgctggatcccaacaacatcatgaatccgggaaagctgatcccgcctcacgtctgcatatgaccgtcacctgactggaggatcgatccccccatggccatcagtgggcttgttggctcactcatcaaaagctttggttccgcgaggcgtgacgcggtgctctgctgacagttgcaataatgcgctgaactgctctgtgcctgtatggcatgcgttggaggcaaatgcacgtaggcgtcacatcaaaactataccggtaccaaaaaaaaaaaaaaaaaactgaactgcctcagggaagggatgggaaataatggagcaaacattcgtctcctgacgccgttttaacaggagaaccctttttacgatcaagtacagcttgacggggccacctagcggtggcgagacggcagcgttctgtactacgcaccacttcc

SEQ ID NO: 23555 - DNA, 1974 bp, Zea Mays
accactctgctccactccgccatggccacctccctcctacgcctctctcgccaccgccgcgcgctgctcgccatctcctccgtccgccttgcgctctccacccagccccacgtcccatctccgtccccatcccctaccccctcctccgcccgccgcctcccgcatttcctctccttcctcgccgccgccgccgccgccgccgctgggggagcaaccgtcgcgctctgcgactccggcctagatcaccgggtcgggggcaaggacagcgccgatctggtggttcgtggggagcggaagttcgtgccgcaggagttcatcgacgagctcgcgtccttcctcggggacaacatcactctggactacgaggagaggagcttccatggcacgccacagaacagcttccacaaggcggtcaacctgcctgatgtcgtcgtgttcccgagctcgcaagatgaggtacaaaggattgtgatggcctgtaacaagcacaagaaaataaaatccctgaatgttgaggatatggacgtagttgttgaacctggagttggatggatagagctgaacgaatacctgaagccctatggcctattttttcctcttgatccagggcctggggccaccattggaggaatgtgtgctactcgttgttctggttcattagctgtgagtttgtaggtatggaacaatgcgggataatgtgattaatcttcgggctgttttgccaaatggtgatgttgtcaagacaggctcccgggctcgaaagagtgcagctgggtatgaccttgctcgtttgatcattgggagtgaaggaactttgggtgtaattacagaagtgactttacgactccaaaagcttccatctcattctgtagttgcaatgtgcaatttcaaaacaattaaggatgctgctgatgttgctattgcaacaatgctttctgggatacaggtttcaagagtggaattgttggacgaggttcagataaaggcaataaatatggcaaatggcaaaaatttgcctgaagtgccgaccttgatgtttgaattcatagggacagaagcatatgctctggaacaaactctcttggttcaaaaaattgccactgaacaccatggatcagattttgtttttgtcgaggagccagatgctaaagcggaactatggaagatcaggaaggaggcactttgggctggttttgctatgaaacctgatcatgaagctatgataacggatgtttgtgtccctctatccagacttgctgaatgcatatctacatcaaagcgattgcttgatgcgtcgccattgacttgtctggttattgctcatgctggtgatggaaattttcacacaattatcctgtttgatccaagccaagaggaccaacgaaaggaagcagagagactaaaccatttcatggtccatacagctctgtctatggaaggtacatgcacaggagagcatggtgttggcacagggaaaatgaagtacctggagaaggagttgggcatcgagtcactcaggacgatgaaaagaataaaggcggcgctggatcccaacaacatcatgaatccgggaaagctgatcccgcctcacgtctgcatatgaccgtcacctgactggaggatcgatccccccatggccatcagtgggcttgttggctcactcatcaaaagctttggttccgcgaggcgtgacgcggtgctctgctgacagttgcaataatgcgctgaactgctctgtgcctgtatggcatgcgttggaggcaaatgcacgtaggcgtcacatcaaaactataccggtaccaaaaaaaaaaaaaaaaaactgaactgcctcagggaagggatgggaaataatggagcaaacattcgtctcctgacgccgttttaacaggagaaccctttttacgatcaagtacagcttgacggggccacctagcggtggcgagacggcagcgttctgtactacgcaccacttcc

SEQ ID NO: 23556 - DNA, 2065 bp, Zea Mays
accactctgctccactccgccatggccacctccctcctacgcctctctcgccaccgccgcgcgctgctcgccatctcctccgtccgccttgcgctctccacccagccccacgtcccatctccgtccccatcccctaccccctcctccgcccgccgcctcccgcatttcctctccttcctcgccgccgccgccgccgccgccgctgggggagcaaccgtcgcgctctgcgactccggcctagatcaccgggtcgggggcaaggacagcgccgatctggtggttcgtggggagcggaagttcgtgccgcaggagttcatcgacgagctcgcgtccttcctcggggacaacatcactctggactacgaggagaggagcttccatggcacgccacagaacagcttccacaaggcggtcaacctgcctgatgtcgtcgtgttcccgagctcgcaagatgaggtacaaaggattgtgatggcctgtaacaagcacaaggttccaattgtaccatatggtggggctacctcaatagagggtcacacactggcacctcatggtggtgtttgcatcgacatgaccttgatgaagaaaataaaatccctgaatgttgaggatatggacgtagttgttgaacctggagttggatggatagagctgaacgaatacctgaagccctatggcctattttttcctcttgatccaggaaagggcctggggccaccattggaggaatgtgtgctactcgttgttctggttcattagctgtgaggtatggaacaatgcgggataatgtgattaatcttcgggctgttttgccaaatggtgatgttgtcaagacaggctcccgggctcgaaagagtgcagctgggtatgaccttgctcgtttgatcattgggagtgaaggaactttgggtgtaattacagaagtgactttacgactccaaaagcttccatctcattctgtagttgcaatgtgcaatttcaaaacaattaaggatgctgctgatgttgctattgcaacaatgctttctgggatacaggtttcaagagtggaattgttggacgaggttcagataaaggcaataaatatggcaaatggcaaaaatttgcctgaagtgccgaccttgatgtttgaattcatagggacagaagcatatgctctggaacaaactctcttggttcaaaaaattgccactgaacaccatggatcagattttgtttttgtcgaggagccagatgctaaagcggaactatggaagatcaggaaggaggcactttgggctggttttgctatgaaacctgatcatgaagctatgataacggatgtttgtgtccctctatccagacttgctgaatgcatatctacatcaaagcgattgcttgatgcgtcgccattgacttgtctggttattgctcatgctggtgatggaaattttcacacaattatcctgtttgatccaagccaagaggaccaacgaaaggaagcagagagactaaaccatttcatggtccatacagctctgtctatggaaggtacatgcacaggagagcatggtgttggcacagggaaaatgaagtacctggagaaggagttgggcatcgagtcactcaggacgatgaaaagaataaaggcggcgctggatcccaacaacatcatgaatccgggaaagctgatcccgcctcacgtctgcatatgaccgtcacctgactggaggatcgatccccccatggccatcagtgggcttgttggctcactcatcaaaagctttggttccgcgaggcgtgacgcggtgctctgctgacagttgcaataatgcgctgaactgctctgtgcctgtatggcatgcgttggaggcaaatgcacgtaggcgtcacatcaaaactataccggtaccaaaaaaaaaaaaaaaaaactgaactgcctcagggaagggatgggaaataatggagcaaacattcgtctcctgacgccgttttaacaggagaaccctttttacgatcaagtacagcttgacggggccacctagcggtggcgagacggcagcgttctgtactacgcaccacttcc

SEQ ID NO: 23557 - DNA, 2007 bp, Zea Mays
accactctgctccactccgccatggccacctccctcctacgcctctctcgccaccgccgcgcgctgctcgccatctcctccgtccgccttgcgctctccacccagccccacgtcccatctccgtccccatcccctaccccctcctccgcccgccgcctcccgcatttcctctccttcctcgccgccgccgccgccgccgccgctgggggagcaaccgtcgcgctctgcgactccggcctagatcaccgggtcgggggcaaggacagcgccgatctggtggttcgtggggagcggaagttcgtgccgcaggagttcatcgacgagctcgcgtccttcctcggggacaacatcactctggactacgaggagaggagcttccatggcacgccacagaacagcttccacaaggcggtcaacctgcctgatgtcgtcgtgttcccgagctcgcaagatgaggtacaaaggattgtgatggcctgtaacaagcacaaggttccaattgtaccatatggtggggctacctcaatagagggtcacacactggcacctcatggtggtgtttgcatcgacatgaccttgatgaagaaaataaaatccctgaatgttgaggatatggacgtagttgttgaacctggagttggatggatagagctgaacgaatacctgaagccctatggcctattttttcctcttgatccagggcctggggccaccattggaggaatgtgtgctactcgttgttctggttcattagctgtgagtttgtaggtatggaacaatgcgggataatgtgattaatcttcgggctgttttgccaaatggtgatgttgtcaagacaggctcccgggctcgaaagagtgcagctgggtatgaccttgctcgtttgatcattgggagtgaaggaactttgggtgtaattacagaagtgactttacgactccaaaagcttccatctcattctgtagttgcaatgtgcaatttcaaaacaattaaggatgctgctgatgttgctattgcaacaatgctttctgggatacaggtttcaagagtggaattgttggacgaggttcagataaaggcaataaatatggcaaatggcaaaaatttgcctgaagtgccgaccttgatgtttgaattcatagggacagaagcatatgctctggaacaaactctcttggttcaaaaaattgccactgaacaccatggatcagattttgtttttgtcgaggagccagatgctaaagcggaactatggaagatcaggaaggaggcactttgggctggttttgctatgaaacctgatcatgaagctatgataacggatgtttgtgtccctctatccagacttgctgaatgcatatctacatcaaagcgattgcttgatgcgtcgccattgacttgccaagaggaccaacgaaaggaagcagagagactaaaccatttcatggtccatacagctctgtctatggaaggtacatgcacaggagagcatggtgttggcacagggaaaatgaagtacctggagaaggagttgggcatcgagtcactcaggacgatgaaaagaataaaggcggcgctggatcccaacaacatcatgaatccgggaaagctgatcccgcctcacgtctgcatatgaccgtcacctgactggaggatcgatccccccatggccatcagtgggcttgttggctcactcatcaaaagctttggttccgcgaggcgtgacgcggtgctctgctgacagttgcaataatgcgctgaactgctctgtgcctgtatggcatgcgttggaggcaaatgcacgtaggcgtcacatcaaaactataccggtaccaaaaaaaaaaaaaaaaaactgaactgcctcagggaagggatgggaaataatggagcaaacattcgtctcctgacgccgttttaacaggagaaccctttttacgatcaagtacagcttgacggggccacctagcggtggcgagacggcagcgttctgtactacgcaccacttcc

SEQ ID NO: 23558 - DNA, 1892 bp, Zea Mays
accactctgctccactccgccatggccacctccctcctacgcctctctcgccaccgccgcgcgctgctcgccatctcctccgtccgccttgcgctctccacccagccccacgtcccatctccgtccccatcccctaccccctcctccgcccgccgcctcccgcatttcctctccttcctcgccgccgccgccgccgccgccgctgggggagcaaccgtcgcgctctgcgactccggcctagatcaccgggtcgggggcaaggacagcgccgatctggtggttcgtggggagcggaagttcgtgccgcaggagttcatcgacgagctcgcgtccttcctcggggacaacatcactctggactacgaggagaggagcttccatggcacgccacagaacagcttccacaaggcggtcaacctgcctgatgtcgtcgtgttcccgagctcgcaagatgaggtacaaaggattgtgatggcctgtaacaagcacaaggttccaattgtaccatatggtggggctacctcaatagagggtcacacactggcacctcatggtggtgtttgcatcgacatgaccttgatgaagggcctggggccaccattggaggaatgtgtgctactcgttgttctggttcattagctgtgagtttgtaggtatggaacaatgcgggataatgtgattaatcttcgggctgttttgccaaatggtgatgttgtcaagacaggctcccgggctcgaaagagtgcagctgggtatgaccttgctcgtttgatcattgggagtgaaggaactttgggtgtaattacagaagtgactttacgactccaaaagcttccatctcattctgtagttgcaatgtgcaatttcaaaacaattaaggatgctgctgatgttgctattgcaacaatgctttctgggatacaggtttcaagagtggaattgttggacgaggttcagataaaggcaataaatatggcaaatggcaaaaatttgcctgaagtgccgaccttgatgtttgaattcatagggacagaagcatatgctctggaacaaactctcttggttcaaaaaattgccactgaacaccatggatcagattttgtttttgtcgaggagccagatgctaaagcggaactatggaagatcaggaaggaggcactttgggctggttttgctatgaaacctgatcatgaagctatgataacggatgtttgtgtccctctatccagacttgctgaatgcatatctacatcaaagcgattgcttgatgcgtcgccattgacttgccaagaggaccaacgaaaggaagcagagagactaaaccatttcatggtccatacagctctgtctatggaaggtacatgcacaggagagcatggtgttggcacagggaaaatgaagtacctggagaaggagttgggcatcgagtcactcaggacgatgaaaagaataaaggcggcgctggatcccaacaacatcatgaatccgggaaagctgatcccgcctcacgtctgcatatgaccgtcacctgactggaggatcgatccccccatggccatcagtgggcttgttggctcactcatcaaaagctttggttccgcgaggcgtgacgcggtgctctgctgacagttgcaataatgcgctgaactgctctgtgcctgtatggcatgcgttggaggcaaatgcacgtaggcgtcacatcaaaactataccggtaccaaaaaaaaaaaaaaaaaactgaactgcctcagggaagggatgggaaataatggagcaaacattcgtctcctgacgccgttttaacaggagaaccctttttacgatcaagtacagcttgacggggccacctagcggtggcgagacggcagcgttctgtactacgcaccacttcc

SEQ ID NO: 23559 - DNA, 1885 bp, Zea Mays
accactctgctccactccgccatggccacctccctcctacgcctctctcgccaccgccgcgcgctgctcgccatctcctccgtccgccttgcgctctccacccagccccacgtcccatctccgtccccatcccctaccccctcctccgcccgccgcctcccgcatttcctctccttcctcgccgccgccgccgccgccgccgctgggggagcaaccgtcgcgctctgcgactccggcctagatcaccgggtcgggggcaaggacagcgccgatctggtggttcgtggggagcggaagttcgtgccgcaggagttcatcgacgagctcgcgtccttcctcggggacaacatcactctggactacgaggagaggagcttccatggcacgccacagaacagcttccacaaggcggtcaacctgcctgatgtcgtcgtgttcccgagctcgcaagatgaggtacaaaggattgtgatggcctgtaacaagcacaaggttccaattgtaccatatggtggggctacctcaatagagggtcacacactggcacctcatggtggtgtttgcatcgacatgaccttgatgaagggcctggggccaccattggaggaatgtgtgctactcgttgttctggttcattagctgtgaggtatggaacaatgcgggataatgtgattaatcttcgggctgttttgccaaatggtgatgttgtcaagacaggctcccgggctcgaaagagtgcagctgggtatgaccttgctcgtttgatcattgggagtgaaggaactttgggtgtaattacagaagtgactttacgactccaaaagcttccatctcattctgtagttgcaatgtgcaatttcaaaacaattaaggatgctgctgatgttgctattgcaacaatgctttctgggatacaggtttcaagagtggaattgttggacgaggttcagataaaggcaataaatatggcaaatggcaaaaatttgcctgaagtgccgaccttgatgtttgaattcatagggacagaagcatatgctctggaacaaactctcttggttcaaaaaattgccactgaacaccatggatcagattttgtttttgtcgaggagccagatgctaaagcggaactatggaagatcaggaaggaggcactttgggctggttttgctatgaaacctgatcatgaagctatgataacggatgtttgtgtccctctatccagacttgctgaatgcatatctacatcaaagcgattgcttgatgcgtcgccattgacttgccaagaggaccaacgaaaggaagcagagagactaaaccatttcatggtccatacagctctgtctatggaaggtacatgcacaggagagcatggtgttggcacagggaaaatgaagtacctggagaaggagttgggcatcgagtcactcaggacgatgaaaagaataaaggcggcgctggatcccaacaacatcatgaatccgggaaagctgatcccgcctcacgtctgcatatgaccgtcacctgactggaggatcgatccccccatggccatcagtgggcttgttggctcactcatcaaaagctttggttccgcgaggcgtgacgcggtgctctgctgacagttgcaataatgcgctgaactgctctgtgcctgtatggcatgcgttggaggcaaatgcacgtaggcgtcacatcaaaactataccggtaccaaaaaaaaaaaaaaaaaactgaactgcctcagggaagggatgggaaataatggagcaaacattcgtctcctgacgccgttttaacaggagaaccctttttacgatcaagtacagcttgacggggccacctagcggtggcgagacggcagcgttctgtactacgcaccacttcc

SEQ ID NO: 23560 - DNA, 2000 bp, Zea Mays
accactctgctccactccgccatggccacctccctcctacgcctctctcgccaccgccgcgcgctgctcgccatctcctccgtccgccttgcgctctccacccagccccacgtcccatctccgtccccatcccctaccccctcctccgcccgccgcctcccgcatttcctctccttcctcgccgccgccgccgccgccgccgctgggggagcaaccgtcgcgctctgcgactccggcctagatcaccgggtcgggggcaaggacagcgccgatctggtggttcgtggggagcggaagttcgtgccgcaggagttcatcgacgagctcgcgtccttcctcggggacaacatcactctggactacgaggagaggagcttccatggcacgccacagaacagcttccacaaggcggtcaacctgcctgatgtcgtcgtgttcccgagctcgcaagatgaggtacaaaggattgtgatggcctgtaacaagcacaaggttccaattgtaccatatggtggggctacctcaatagagggtcacacactggcacctcatggtggtgtttgcatcgacatgaccttgatgaagaaaataaaatccctgaatgttgaggatatggacgtagttgttgaacctggagttggatggatagagctgaacgaatacctgaagccctatggcctattttttcctcttgatccagggcctggggccaccattggaggaatgtgtgctactcgttgttctggttcattagctgtgaggtatggaacaatgcgggataatgtgattaatcttcgggctgttttgccaaatggtgatgttgtcaagacaggctcccgggctcgaaagagtgcagctgggtatgaccttgctcgtttgatcattgggagtgaaggaactttgggtgtaattacagaagtgactttacgactccaaaagcttccatctcattctgtagttgcaatgtgcaatttcaaaacaattaaggatgctgctgatgttgctattgcaacaatgctttctgggatacaggtttcaagagtggaattgttggacgaggttcagataaaggcaataaatatggcaaatggcaaaaatttgcctgaagtgccgaccttgatgtttgaattcatagggacagaagcatatgctctggaacaaactctcttggttcaaaaaattgccactgaacaccatggatcagattttgtttttgtcgaggagccagatgctaaagcggaactatggaagatcaggaaggaggcactttgggctggttttgctatgaaacctgatcatgaagctatgataacggatgtttgtgtccctctatccagacttgctgaatgcatatctacatcaaagcgattgcttgatgcgtcgccattgacttgccaagaggaccaacgaaaggaagcagagagactaaaccatttcatggtccatacagctctgtctatggaaggtacatgcacaggagagcatggtgttggcacagggaaaatgaagtacctggagaaggagttgggcatcgagtcactcaggacgatgaaaagaataaaggcggcgctggatcccaacaacatcatgaatccgggaaagctgatcccgcctcacgtctgcatatgaccgtcacctgactggaggatcgatccccccatggccatcagtgggcttgttggctcactcatcaaaagctttggttccgcgaggcgtgacgcggtgctctgctgacagttgcaataatgcgctgaactgctctgtgcctgtatggcatgcgttggaggcaaatgcacgtaggcgtcacatcaaaactataccggtaccaaaaaaaaaaaaaaaaaactgaactgcctcagggaagggatgggaaataatggagcaaacattcgtctcctgacgccgttttaacaggagaaccctttttacgatcaagtacagcttgacggggccacctagcggtggcgagacggcagcgttctgtactacgcaccacttcc

SEQ ID NO: 23561 - DNA, 1734 bp, Zea Mays
ccgctgcatttgacctgacaacatcactctggactacgaggagaggagcttccatggcacgccacagaacagcttccacaaggcggtcaacctgcctgatgtcgtcgtgttcccgagctcgcaagatgaggtacaaaggattgtgatggcctgtaacaagcacaaggttccaattgtaccatatggtggggctacctcaatagagggtcacacactggcacctcatggtggtgtttgcatcgacatgaccttgatgaagaaaataaaatccctgaatgttgaggatatggacgtagttgttgaacctggagttggatggatagagctgaacgaatacctgaagccctatggcctattttttcctcttgatccagggcctggggccaccattggaggaatgtgtgctactcgttgttctggttcattagctgtgaggtatggaacaatgcgggataatgtgattaatcttcgggctgttttgccaaatggtgatgttgtcaagacaggctcccgggctcgaaagagtgcagctgggtatgaccttgctcgtttgatcattgggagtgaaggaactttgggtgtaattacagaagtgactttacgactccaaaagcttccatctcattctgtagttgcaatgtgcaatttcaaaacaattaaggatgctgctgatgttgctattgcaacaatgctttctgggatacaggtttcaagagtggaattgttggacgaggttcagataaaggcaataaatatggcaaatggcaaaaatttgcctgaagtgccgaccttgatgtttgaattcatagggacagaagcatatgctctggaacaaactctcttggttcaaaaaattgccactgaacaccatggatcagattttgtttttgtcgaggagccagatgctaaagcggaactatggaagatcaggaaggaggcactttgggctggttttgctatgaaacctgatcatgaagctatgataacggatgtttgtgtccctctatccagacttgctgaatgcatatctacatcaaagcgattgcttgatgcgtcgccattgacttgtctggttattgctcatgctggtgatggaaattttcacacaattatcctgtttgatccaagccaagaggaccaacgaaaggaagcagagagactaaaccatttcatggtccatacagctctgtctatggaaggtacatgcacaggagagcatggtgttggcacagggaaaatgaagtacctggagaaggagttgggcatcgagtcactcaggacgatgaaaagaataaaggcggcgctggatcccaacaacatcatgaatccgggaaagctgatcccgcctcacgtctgcatatgaccgtcacctgactggaggatcgatccccccatggccatcagtgggcttgttggctcactcatcaaaagctttggttccgcgaggcgtgacgcggtgctctgctgacagttgcaataatgcgctgaactgctctgtgcctgtatggcatgcgttggaggcaaatgcacgtaggcgtcacatcaaaactataccggtaccaaaaaaaaaaaaaaaaaactgaactgcctcagggaagggatgggaaataatggagcaaacattcgtctcctgacgccgttttaacaggagaaccctttttacgatcaagtacagcttgacggggccacctagcggtggcgagacggcagcgttctgtactacgcaccacttcc

SEQ ID NO: 23562 - DNA, 1478 bp, Zea Mays
gcgttccccgccccggcgcggtcgtagaacacgaccacgaccaaatttattcaactagatggagccgaaggttgaaggttcaagcagcctcgcacggtcacacacactttgcacgcttgtctcacgtgttgaggagccaaccggctgtccggccatgtcgtcgccggctgcaggcacggcagcggagccgcacgtcgtggaggactgcctcggcttcgtgcagctgctgagcgacggcacagtgaggcggtccacggactactccatgctccgtcccatcggccgcgtgccgtcggacacggacctgcccgtgcagtggaaggacgtggtgtacgaggacacgcgcggcctccggctccgcatgtaccggcccactggcgccgcagccggggagacgaagctgccggtgctggtgtacttccacggcggtggcttctgcctgctcagcttcgaggtggccagcttccatgccggcgcgctccggctcgccgccgagctcccggcgctcgtgctgtccgcggactaccgcctggcgccggagcaccgcctccccgcggcgctggacgatgccgagtccgccttcgcctggctgcgcgcccaggccgcgccgccctccgccgcgggcgcggagtcggacccgtggctcgccgagtcggccgacttcgcccgcgtgttcgtcgccggcgactcggccggcggcaacatctcgcaccacgtcgccgtgcgtcacgctagctccggtggagggctctccctcgccccgctccgactcgccgggtgcgtcatgctctggccatacttcggcggcgaggagccgacgccgtccgaggcggcgttcccggccgaccagcccatgggcacggcgctgttcgaccagatgtggcgcctggcgctgccggcgggcgcgaccaaggaccacccgttcgcgaacccgttcgcgccggggagcgtcccgctccgcgacctcggcgcggccttcccgccgctgctcgtcgtggaccccgaccaggacccgctgcacgaccgcgtggtcgactacgtcgccaggctcaaggcggccgggaaggccgtcgagctcgtcgtgttcgcggggcaggggcatgggttcttcgccatggagccgtgcggtgaggccgccgacgacctcatccgggtcatcaggcgatttgtgtacggtgcttaatttgtcaatattatcagtatatcacagtagtggaaatattgacaaattaagaaatggctggattttcagctcaggttccgaaaacgactggacgatgcatggctttagtcatggtacatgtcgtttcaccacaatcaccatatatgtcattatagatgtccaataagcacgagacccacgaccccggcacgaagcccgttgtttggacccgggtccgagcccggcacggcccggttctatgcgaggcccgggccggcccgggccggcccggcacgaataagcgggccgggctcgg

SEQ ID NO: 23563 - DNA, 1001 bp, Zea Mays
gttgcagacagctacagccgtatgtccgtgtgacattctgctcagtcggccaatcctcaccaaattctccatcaaatccaaccaacccctcaccgcctatgccgccgcgggccgcctagggttccggcggccgccgctccctcgccggcgcgatggggaacacctgcatcggtcccagcgccccctcggaccgccacagcttcttcaacaccgtctccctggccgtgctctggcgacccccggccgccgctgaccgcgccgagccttccccgaccgctgaacccagctcatccactccctgctctcccccctccagggcccctaaccctgtcaccatctccgactccgagcacccgccacactccacctccaccgccttaggccccgccgcgccgcccaatcctaacggcaagcccaagcccaagcccaaggtgaagcgcgtgcagagcgccggcctcctcgccggctccgtgctgaagcgcgactccgagcggctcaaggacgtctacaccctgggcaagaagctcgggcaggggcagttcggcaccacctaccagtgcgtcgagaaggcaaccgggaagcacttcgcctgcaagtcaatcgccaagcggaagctcgtcaccgatgaggacgtcgaggacgtgcgccgcgagatccagatcatgcaccacctggccggccaccccaacgtcgtatccatcgtgggagcctacgaggacgctgtagccgtgcacctcgtcatggagctgtgcgctggaggggagctgttcgataggatcatacagcgggggcactactctgagaaagccgccgcacagttggcccgggtgatcatcggggttgtcgaagcatgccattcacttggggtgatgcacagagacctcaagcctgagaatttcttgtttgtgaaccaaaaggaggatgcacccttaaaggctattgatttcgggctctccatcttcttcaaaccagccttgatctgttttgctgggagaggcgaa

SEQ ID NO: 23564 - DNA, 1586 bp, Zea Mays
gttgcagacagctacagccgtatgtccgtgtgacattctgctcagtcggccaatcctcaccaaattctccatcaaatccaaccaacccctcaccgcctatgccgccgcgggccgcctagggttccggcggccgccgctccctcgccggcgcgatggggaacacctgcatcggtcccagcgccccctcggaccgccacagcttcttcaacaccgtctccctggccgtgctctggcgacccccggccgccgctgaccgcgccgagccttccccgaccgctgaacccagctcatccactccctgctctcccccctccagggcccctaaccctgtcaccatctccgactccgagcacccgccacactccacctccaccgccttaggccccgccgcgccgcccaatcctaacggcaagcccaagcccaagcccaaggtgaagcgcgtgcagagcgccggcctcctcgccggctccgtgctgaagcgcgactccgagcggctcaaggacgtctacaccctgggcaagaagctcgggcaggggcagttcggcaccacctaccagtgcgtcgagaaggcaaccgggaagcacttcgcctgcaagtcaatcgccaagcggaagctcgtcaccgatgaggacgtcgaggacgtgcgccgcgagatccagatcatgcaccacctggccggccaccccaacgtcgtatccatcgtgggagcctacgaggacgctgtagccgtgcacctcgtcatggagctgtgcgctggaggggagctgttcgataggatcatacagcgggggcactactctgagaaagccgccgcacagttggcccgggtgatcatcggggttgtcgaagcatgccattcacttggggtgatgcacagagacctcaagcctgagaatttcttgtttgtgaaccaaaaggaggatgcacccttaaaggctattgatttcgggctctccatcttcttcaaaccaggtgaaatattttctgatgtcgttggaagtccttactatgttgcccctgaggttctgaaaaaacgctatggctgtgaggttgatgtgtggagtgccggtgtaataatttatatcttattgagtggggttcctccgttttgggctgaatctgaacaagggatatttaaacaagttctaaaaggtggtcttgatttttcatccgatccctggcccagcatttcggagagtgcaaaggatttggttaggaagatgctaaatcgtgatcccagaaagagattgactgcacatgatgctctatgtcatccttgggtttgtgtagatggagttgctcctgacaaacctctggattctgctgtcttaaccagattgaaacagttttctgcaatgaataaactaaagaagatggcccttagggtcattgctgaaaatttgtctgaagatgaaattgcaggattgaaagagatgttcaaaatgctggacactgacaatagtgggcagatcacgttggaggaactaaaaattggtttgaagagagttggtgctaacttaaaggactcagaaattacaacactaatggaagcgtttcaggccttgcttgaatgaagattatgctct

SEQ ID NO: 23565 - DNA, 2183 bp, Zea Mays
gttgcagacagctacagccgtatgtccgtgtgacattctgctcagtcggccaatcctcaccaaattctccatcaaatccaaccaacccctcaccgcctatgccgccgcgggccgcctagggttccggcggccgccgctccctcgccggcgcgatggggaacacctgcatcggtcccagcgccccctcggaccgccacagcttcttcaacaccgtctccctggccgtgctctggcgacccccggccgccgctgaccgcgccgagccttccccgaccgctgaacccagctcatccactccctgctctcccccctccagggcccctaaccctgtcaccatctccgactccgagcacccgccacactccacctccaccgccttaggccccgccgcgccgcccaatcctaacggcaagcccaagcccaagcccaaggtgaagcgcgtgcagagcgccggcctcctcgccggctccgtgctgaagcgcgactccgagcggctcaaggacgtctacaccctgggcaagaagctcgggcaggggcagttcggcaccacctaccagtgcgtcgagaaggcaaccgggaagcacttcgcctgcaagtcaatcgccaagcggaagctcgtcaccgatgaggacgtcgaggacgtgcgccgcgagatccagatcatgcaccacctggccggccaccccaacgtcgtatccatcgtgggagcctacgaggacgctgtagccgtgcacctcgtcatggagctgtgcgctggaggggagctgttcgataggatcatacagcgggggcactactctgagaaagccgccgcacagttggcccgggtgatcatcggggttgtcgaagcatgccattcacttggggtgatgcacagagacctcaagcctgagaatttcttgtttgtgaaccaaaaggaggatgcacccttaaaggctattgatttcgggctctccatcttcttcaaaccagcatttcggagagtgcaaaggatttggttaggaagatgctaaatcgtgatcccagaaagagattgactgcacatgatgctctatgtcatccttgggtttgtgtagatggagttgctcctgacaaacctctggattctgctgtcttaaccagattgaaacagttttctgcaatgaataaactaaagaagatggcccttagggtcattgctgaaaatttgtctgaagatgaaattgcaggattgaaagagatgttcaaaatgctggacactgacaatagtgggcagatcacgttggaggaactaaaaattggtttgaagagagttggtgctaacttaaaggactcagaaattacaacactaatggaagcggcagatattgataacagtggttccatcgactatggagagttcctagctgcaactttacatctgaacaaagtcgagcgagaagacaacctcttcgcagcattctcatactttgataaagacggcagcggttatattactcatgatgagctacaaaaagcatgtgaggaattcggtatagaagatgcacacctagaagatatcatccatgacgttgatcaggacaatgatggtcggatcgactacaacgagtttgtaacaatgatgcagaagggaaataacccactagggaaaaaggggcactgccagatgagctttggtcttagagaagcattgaagcttggctaagtggcatgatcaatcctgtgtgaagtgccattcggcttcatatgccaactttagctgatgaaactaagtccgtgaatttgggacgccggtaccaaaggtggagcaagtgcgcgatacgattagctttgggataccaactaagcagtgagcatgcaggaacacattggtgatctttcgtcgttaaccccccatgtacatggcttttttgaggtgggataggaatggcggttgtgtttcccatggccattctttgcacgttatgaagctcagctgcaggatgctcttatatagagagaaatgttagtcacatcacatcgcgtgtccatactgtatagcgaaacttaacatgttgtaatatcggtcggacaatgtgtgcgtgttgtatgttatctttcttagatagaggcacaggcttagcgttgtcatatatgtattgcaagaatatgcaggctgtatattaaccaaatgatttttttgtgtacatttcagtgcatctaga

SEQ ID NO: 23566 - DNA, 3574 bp, Zea Mays
gttgcagacagctacagccgtatgtccgtgtgacattctgctcagtcggccaatcctcaccaaattctccatcaaatccaaccaacccctcaccgcctatgccgccgcgggccgcctagggttccggcggccgccgctccctcgccggcgcgatggggaacacctgcatcggtcccagcgccccctcggaccgccacagcttcttcaacaccgtctccctggccgtgctctggcgacccccggccgccgctgaccgcgccgagccttccccgaccgctgaacccagctcatccactccctgctctcccccctccagggcccctaaccctgtcaccatctccgactccgagcacccgccacactccacctccaccgccttaggccccgccgcgccgcccaatcctaacggcaagcccaagcccaagcccaaggtgaagcgcgtgcagagcgccggcctcctcgccggctccgtgctgaagcgcgactccgagcggctcaaggacgtctacaccctgggcaagaagctcgggcaggggcagttcggcaccacctaccagtgcgtcgagaaggcaaccgggaagcacttcgcctgcaagtcaatcgccaagcggaagctcgtcaccgatgaggacgtcgaggacgtgcgccgcgagatccagatcatgcaccacctggccggccaccccaacgtcgtatccatcgtgggagcctacgaggacgctgtagccgtgcacctcgtcatggagctgtgcgctggaggggagctgttcgataggatcatacagcgggggcactactctgagaaagccgccgcacagttggcccgggaggatgcacccttaaaggctattgatttcgggctctccatcttcttcaaaccaggtgaaatattttctgatgtcgttggaagtccttactatgttgcccctgaggttctgaaaaaacgctatggctgtgaggttgatgtgtggagtgccggtgtaataatttatatcttattgagtggggttcctccgttttgggctgaatctgaacaagggatatttaaacaagttctaaaaggtggtcttgatttttcatccgatccctggcccagcatttcggagagtgcaaaggatttggttaggaagatgctaaatcgtgatcccagaaagagattgactgcacatgatgctctatgtcatccttgggtttgtgtagatggagttgctcctgacaaacctctggattctgctgtcttaaccagattgaaacagttttctgcaatgaataaactaaagaagatggcccttagggtcattgctgaaaatttgtctgaagatgaaattgcaggattgaaagagatgttcaaaatgctggacactgacaatagtgggcagatcacgttggaggaactaaaaattggtttgaagagagttggtgctaacttaaaggactcagaaattacaacactaatggaagcggcagatattgataacagtggttccatcgactatggagagttcctagctgcaactttacatctgaacaaagtcgagcgagaagacaacctcttcgcagcattctcatactttgataaagacggcagcggttatattactcatgatgagctacaaaaagcatgtgaggaattcggtatagaagatgcacacctagaagatatcatccatgacgttgatcaggacaatgatggtcggatcgactacaacgagtttgtaacaatgatgcagaagggaaataacccactagggaaaaaggggcactgccagatgagctttggtcttagagaagcattgaagcttggctaagtggcatgatcaatcctgtgtgaagtgccattcggcttcatatgccaactttagctgatgaaactaagtccgtgaatttgggacgccggtaccaaaggtggagcaagtgcgcgatacgattagctttgggataccaactaagcagtgagcatgcaggaacacattggtgatctttcgtcgttaaccccccatgtacatggcttttttgaggtggggatggacgcggcggcagcggcggcggcgcagatggagaggcactcgtcggcggcggcgcagatggagaggcactcgtcggcggcggccttcgtggagggcggcgttcaggacggctgcgatgacacctgcagcatctgcctcgagaccttctccgacagtgacccctccgcggtgaccagctgcaagcacgagttccacctccagtgcatcctcgagtggtgccagaggagctcccagtgccccatgtgttggcaggcaatcagcatgaaggaccctacgagccaagagctccttgaggccgtcgaggaagagcggaacgacgtgcaggaaaaccacgcgcgcacaaccaccgttttccgtcacccgctgctcggagatttcgaggtaccggtggatgcagacgacgccgagatcgaggagcggatcatgcagcacctggccgccgccgcagccattcgccggtcgcaccgccacgccagaagagaaggccgccgcagcagcagggcggcggcagctcatggccatggccacccacaaccacaaacacaagtcctgttctttccgtctgctggcgaggccactcctggtggttctggttccccgtctccgcatccgcggcaagaacatgctgcttcttctgtggtttctcctccgccattgcccgccgttgcctccgcagaaggaacggatgcagacagtactgcctcggttggtggcgctgtcgggccagatgacagtgtttccaggagccagtcttcgcctgtcaaccacgatgaagctggaccatctgctgacgcgcagtcattctcagacacgatcaaatctaggctgcagtcagtctctacaaagtatatatcactcccagtctcctacatttccactcctcctaagaacaccagatgcatgcccctgtctaattctaaaccgtcgcttgacttacatagccatacattcattgttctcaaatctcaacgatggatggcaggtacaaggactccataacgaagagcacgcgcgggtggaaggagaggtggttcgcgcagagcagcgccatgtcgaatcttggctcggagatgaggagggaggtcggtgctgggatcgccgccgtttcccgcatgatcgagaagcagctggagacacggccggatgggagtgggacagcgccgtcgcctgctaccgcttcgtctccagctcacgcccaccctggttcggatgcaagtagtcagggtcagggagctgctgttcccgctacacctgcagccgctctgaataacgctacgcctgcagctgctgctgctctgaatgacgcctcgtcgtcttcgacagcttgaacgcgcgccaggatcatgttcagtgagtttgcactaggtgtggttttcaagtgctttagatgcttgcaatgcaatgcgtcgcgtgtatagtcagtttgtcaattagcctcattggtagccagtgaaacagatagtggatgccaagctactgttcgatcagtgaatgtttcagaataaagttggatacttggatgcgcacaagaacacccgagagaccac

SEQ ID NO: 23567 - DNA, 1443 bp, Zea Mays
cagctttggaggcatcaagtgaaatattttctgatgtcgttggaagtccttactatgttgcccctgaggttctgaaaaaacgctatggctgtgaggttgatgtgtggagtgccggtgtaataatttatatcttattgagtggggttcctccgttttgggctgaatctgaacaagggatatttaaacaagttctaaaaggtggtcttgatttttcatccgatccctggcccagcatttcggagagtgcaaaggatttggttaggaagatgctaaatcgtgatcccagaaagagattgactgcacatgatgctctatgtcatccttgggtttgtgtagatggagttgctcctgacaaacctctggattctgctgtcttaaccagattgaaacagttttctgcaatgaataaactaaagaagatggcccttagggtcattgctgaaaatttgtctgaagatgaaattgcaggattgaaagagatgttcaaaatgctggacactgacaatagtgggcagatcacgttggaggaactaaaaattggtttgaagagagttggtgctaacttaaaggactcagaaattacaacactaatggaagcggcagatattgataacagtggttccatcgactatggagagttcctagctgcaactttacatctgaacaaagtcgagcgagaagacaacctcttcgcagcattctcatactttgataaagacggcagcggttatattactcatgatgagctacaaaaagcatgtgaggaattcggtatagaagatgcacacctagaagatatcatccatgacgttgatcaggacaatgatggtcggatcgactacaacgagtttgtaacaatgatgcagaagggaaataacccactagggaaaaaggggcactgccagatgagctttggtcttagagaagcattgaagcttggctaagtggcatgatcaatcctgtgtgaagtgccattcggcttcatatgccaactttagctgatgaaactaagtccgtgaatttgggacgccggtaccaaaggtggagcaagtgcgcgatacgattagctttgggataccaactaagcagtgagcatgcaggaacacattggtgatctttcgtcgttaaccccccatgtacatggcttttttgaggtgggataggaatggcggttgtgtttcccatggccattctttgcacgttatgaagctcagctgcaggatgctcttatatagagagaaatgttagtcacatcacatcgcgtgtccatactgtatagcgaaacttaacatgttgtaatatcggtcggacaatgtgtgcgtgttgtatgttatctttcttagatagaggcacaggcttagcgttgtcatatatgtattgcaagaatatgcaggctgtatattaaccaaatgatttttttgtgtacatttcagtgcatctaga

SEQ ID NO: 23568 - DNA, 871 bp, Zea Mays
atcgaactcatatgtagatgttttgaggcagatattgataacagtggttccatcgactatggagagttcctagctgcaactttacatctgaacaaagtcgagcgagaagacaacctcttcgcagcattctcatactttgataaagacggcagcggttatattactcatgatgagctacaaaaagcatgtgaggaattcggtatagaagatgcacacctagaagatatcatccatgacgttgatcaggacaatgatggtcggatcgactacaacgagtttgtaacaatgatgcagaagggaaataacccactagggaaaaaggggcactgccagatgagctttggtcttagagaagcattgaagcttggctaagtggcatgatcaatcctgtgtgaagtgccattcggcttcatatgccaactttagctgatgaaactaagtccgtgaatttgggacgccggtaccaaaggtggagcaagtgcgcgatacgattagctttgggataccaactaagcagtgagcatgcaggaacacattggtgatctttcgtcgttaaccccccatgtacatggcttttttgaggtgggataggaatggcggttgtgtttcccatggccattctttgcacgttatgaagctcagctgcaggatgctcttatatagagagaaatgttagtcacatcacatcgcgtgtccatactgtatagcgaaacttaacatgttgtaatatcggtcggacaatgtgtgcgtgttgtatgttatctttcttagatagaggcacaggcttagcgttgtcatatatgtattgcaagaatatgcaggctgtatattaaccaaatgatttttttgtgtacatttcagtgcatctaga

SEQ ID NO: 23569 - DNA, 1819 bp, Zea Mays
cggggccgtttcctcgccttttcccttgccgtggacgcgtgccgcggtcgtcgccggccgcgggaggagatcgattccacgcggcggacttggtctacagtctactaatctattctctatctctagcagtggtaccatttggcggcgatcgccgtgctattgcttgggccttggactgagtaggtttggaggtagcgatacgagacactcgcccccgattcccctcccgttgccgaagcctgtgttgcagggatcgttcgcggaagcggtttttgatcggagagagagaaagagagagcgagggagggaggtggggatggacgcggcggcagcggcggcggcgcagatggagaggcactcgtcggcggcggcgcagatggagaggcactcgtcggcggcggccttcgtggagggcggcgttcaggacggctgcgatgacacctgcagcatctgcctcgagaccttctccgacagtgacccctccgcggtgccagaggagctcccagtgccccatgtgttggcaggcaatcagcatgaaggaccctacgagccaagagctccttgaggccgtcgaggaagagcggaacgacgtgcaggaaaaccacgcgcgcacaaccaccgttttccgtcacccgctgctcggagatttcgaggtaccggtggatgcagacgacgccgagatcgaggagcggatcatgcagcacctggccgccgccgcagccattcgccggtcgcaccgccacgccagaagagaaggccgccgcagcagcagggcggcggcagctcatggccatggccacccacaaccacaaacacaagtcctgttctttccgtctgctggcgaggccactcctggtggttctggttccccgtctccgcatccgcggcaagaacatgctgcttcttctgtggtttctcctccgccattgcccgccgttgcctccgcagaaggaacggatgcagacagtactgcctcggttggtggcgctgtcgggccagatgacagtgtttccaggagccagtcttcgcctgtcaaccacgatgaagctggaccatctgctgacgcgcagtcattctcagacacgatcaaatctaggctgcagtcagtctctacaaagtatatatcactcccagtctcctacatttccactcctcctaagaacaccagatgcatgcccctgtctaattctaaaccgtcgcttgacttacatagccatacattcattgttctcaaatctcaacgatggatggcaggtacaaggactccataacgaagagcacgcgcgggtggaaggagaggtggttcgcgcagagcagcgccatgtcgaatcttggctcggagatgaggagggaggtcggtgctgggatcgccgccgtttcccgcatgatcgagaagcagctggagacacggccggatgggagtgggacagcgccgtcgcctgctaccgcttcgtctccagctcacgcccaccctggttcggatgcaagtagtcagggtcagggagctgctgttcccgctacacctgcagccgctctgaataacgctacgcctgcagctgctgctgctctgaatgacgcctcgtcgtcttcgacagcttgaacgcgcgccaggatcatgttcagtgagtttgcactaggtgtggttttcaagtgctttagatgcttgcaatgcaatgcgtcgcgtgtatagtcagtttgtcaattagcctcattggtagccagtgaaacagatagtggatgccaagctactgttcgatcagtgaatgtttcagaataaagttggatacttggatgcgcacaagaacacccgagagaccac

SEQ ID NO: 23570 - DNA, 1720 bp, Zea Mays
cggggccgtttcctcgccttttcccttgccgtggacgcgtgccgcggtcgtcgccggccgcgggaggagatcgattccacgcggcggacttggtctacagtctactaatctattctctatctctagcagtggtaccatttggcggcgatcgccgtgctattgcttgggccttggactgagtaggtttggaggtagcgatacgagacactcgcccccgattcccctcccgttgccgaagcctgtgttgcagggatcgttcgcggaagcggtttttgatcggagagagagaaagagagagcgagggagggaggtggggatggacgcggcggcagcggcggcggcgcagatggagaggcactcgtcggcggcggcgcagatggagaggcactcgtcggcggcggccttcgtggagggcggcgttcaggacggctgcgatgacacctgcagcatctgcctcgagaccttctccgacagtgacccctccgcggtgaccagctgcaagcacgagttccacctccagtgcatcctcgagtggtgccagaggagctcccagtgccccatgtgttggcaggcaatcagcatgaaggaccctacgagccaagagctccttgaggccgtcgaggaagagcggaacgacgtgcaggaaaaccacgcgcgcacaaccaccgttttccgtcacccgctgctcggagatttcgaggtaccggtggatgcagacgacgccgagatcgaggagcggatcatgcagcacctggccgccgccgcagccattcgccggtcgcaccgccacgccagaagagaaggccgccgcagcagcagggcggcggcagctcatggccatggccacccacaaccacaaacacaagtcctgttctttccgtctgctggcgaggccactcctggtggttctggttccccgtctccgcatccgcggcaagaacatgctgcttcttctgtggtttctcctccgccattgcccgccgttgcctccgcagaaggaacggatgcagacagtactgcctcggttggtggcgctgtcgggccagatgacaggagccagtcttcgcctgtcaaccacgatgaagctggaccatctgctgacgcgcagtcattctcagacacgatcaaatctaggctgcagtcagtctctacaaagtacaaggactccataacgaagagcacgcgcgggtggaaggagaggtggttcgcgcagagcagcgccatgtcgaatcttggctcggagatgaggagggaggtcggtgctgggatcgccgccgtttcccgcatgatcgagaagcagctggagacacggccggatgggagtgggacagcgccgtcgcctgctaccgcttcgtctccagctcacgcccaccctggttcggatgcaagtagtcagggtcagggagctgctgttcccgctacacctgcagccgctctgaataacgctacgcctgcagctgctgctgctctgaatgacgcctcgtcgtcttcgacagcttgaacgcgcgccaggatcatgttcagtgagtttgcactaggtgtggttttcaagtgctttagatgcttgcaatgcaatgcgtcgcgtgtatagtcagtttgtcaattagcctcattggtagccagtgaaacagatagtggatgccaagctactgttcgatcagtgaatgtttcagaataaagttggatacttggatgcgcacaagaacacccgagagaccac

SEQ ID NO: 23571 - DNA, 3490 bp, Zea Mays
gtaactccaaaacctccctgccttctctccttccatcaccgcaactccaaagcctcttatcgtcttcttccatcgccgaacgacgactgggcccgctgtcgctgccgccgccgccctacttcgccaccttcgccggcgacgggcaccaccagtgtggactgtaatgtttgatgatgatgatgatggagtggacccacaaattgaggatgtcaacagatactactttgaggatggtgaagagaaaccagtttgtttcagtatcttgcctttccagtttggaggtggtagcttggaagataaggcttgacagtgagcatcccaacatctatgtgctttctattgagcacaagtggataaagctgttgaaaccacgaaaatgctatggagacattgttcgatcaacattgattacggtgcaaatgctccacttttttgggagaggggagcaaagaagttcgaatcacctttgggatcaccttgatgaagtttttggtaaatacaatcctaaacccgtggaggatgacttgatgaagcaccataccctaatcaagttgtttgtagagaaagatcaaaccttgatgaagtcaaagattcttcaaaggctcattgagaatggctttaagagaactaaaaaggccttaggtatggaagcacaatccattgttagtgacgggtggcgtgctagaaaaaatgatgataacaattatggtaacaaagatgacagtggtgatgattgtgatggtgatggtagcagtgatgatggtgatggcagcagtgatgatgatgttaccgatcaaatatgtgcgctatgtgatgatggaggacatttgcttagctgtgacggtccatgcaagaggtctttccaccccacaaagaaagatggcagagaatctaaatgtgaaagtcttcattacacttcagcagaagtaaagagaattggtacttatctatgtgcaaactgcaaaaataagcaacaccaatgttttagatgtggagagcttgaaccatcccatgggccaaatgctaaggtctttcaatgcaatcaagcatcttgtggatatttttaccaccctaagtgcattgcacaattattggatcctaatgccactgatggtgagttggaaagaaggattatgtcgggaatgtcatttccgtgccccatacattggtgtttcaaatgtggccacatggagaacaaagctcaaagagcacttcagcttgcagtgtgtagacgctgtccaagagcatatcacagggaatgccttccaagggacttatcctttggaacaaaggacaaggatggtaaccaacgcgcttggaagctttccgacacaattttcatttactgcctagatcatgaaatagacaaggatactggcacaactagtaggaaccatataaaatttccagctacacctgaatacaccaaaacaaaagggcttggtaacagcaaaggaaggatgactggcaaaaggagaaagaacaaaaggagaaagaacactgaccaatcaacaaaacctacagatttgccaaacaggttgtgtggagcagaaagtgagcaagctgacaatgtaggtgcaaaaagcacattgccccagattgttgtagagcctcactgtgcagcaaagcacttgaagggtgatccacaaattgccaaacagggtgttgctgctcgtcaaaatggtgcagaaactatgaaagggcatgaaaatcaatttggcatttcattttgtgttgcaagtactgaaacagagaagagggtaacatgtttggcacaaaggggaacatgtttagggacacaatatgatgggccatcaaccaagggcatgtatgattgttctgttcaggacacccctatggacgacgatgttgagttggataatgtggcctgcataatcgcggtggataaatatgtcaatgggagggggaaaacacaagaggactacactagaaaagaagctgctcagcgcaaagactcgagtgaaaatcaagggcagaatgatgctctagagctagacaacctccggatggagatgcaagctgacgaacgtccgttagaaccaggaaacaagagggacaggaagtggcagaaaaatgtatatggactcggatcagcttcgggacagaaggaaaccttgtccaggagagaaaatccacggtcagatagagggatggtccacagtaacgacagcaaaacaatttattacaggaagggtgggacggaagtcgataatgttgatgaccaccctttagaaaagcaagaccaccaggatacatcaagtgacggatctaaaaagagaagccgaccagtggacaacgcatctggtggcaacagaccatacttggatgagaacaagaagcgtaatctcagagaagatggaagatatgctcattatgaagactggagaagtgaaaggaatacagcagcagacacgtctggatataaggcccaatcagaagagaagcctgtatggacaaacactcgaacaggatcaagggagcattcactggacaggcaaaggatagagtgcggtgacagctatcgtggaacctataacaatagacaaagacatgaatggctgcacccgcacgctagtggtaattcctcgagaattggttgggatgacaggaggcagtggagttcatctcggtcaccatttccttcggctgaatttggtggtgaccgttcctgttctcgtgcccatccgagaggttctaaatacagaaccggcgggaggcatgatcacccccagtacctgggactgggaacacctcaacatggtacaagtagaccgcaccacacaatgggctgggacagggacaccttccatgatcaccagcatggcagaagaccgccgcaccacacaatgggctgggacagggcccccttccgtgatcaccagcatggcgaatacgacgactccaggtatggtgaatatgatgcaactgacaatggtcctgacagcgcgcatcgaccctacacggctgctggcgtggctggacgttcagcaccgagttatcagcttgctggtggttatggagagggatcaagggcttggcggccagttacggacaagtacgccccatggcccttgccttgaccgcacaaactaatattagccaaggagccagagtgagctacaagaacaccgtttgctattgtcggaaatgctttcttcgaggactgtctcagtacggggaattgatgggtcggtgttgaaacccaaatgatatctgccttccagttgcttgctttgcctatcgtaatcactgcatgttatttcacataagcagctggattctcaagttatgtgggcggtgcatttgagttatactagatgacagcctgtgcatattgttactgaagtaaaatatcttttttattaggttccccttatctcgctgtgttgttggtcaatggttatggactatctagtttgtcaaccccattttttgaagaaatttttattttttaaagaaaaatcagttc

SEQ ID NO: 23572 - DNA, 3454 bp, Zea Mays
gtaactccaaaacctccctgccttctctccttccatcaccgcaactccaaagcctcttatcgtcttcttccatcgccgaacgacgactgggcccgctgtcgctgccgccgccgccctacttcgccaccttcgccggcgacgggcaccaccagtgtggactgtaatgtttgatgatgatgatgatggagtggacccacaaattgaggatgtcaacagatactactttgaggatggtgaagagaaaccagtttgtttcagtatcttgcctttccagtttggtgaggacgatagcgaggcagttttcctcagaaaggatgttttcttgtgtggatttgtggataaaaatcttcctgtgtacaaggaggtggtagcttggaagataaggcttgacagtgagcatcccaacatctatgtgctttctattgagcacaagtggataaagctgttgaaaccacgaaaatgctatggagacattgttcgatcaacattgattacggtgcaaatgctccacttttttgggagaggggagcaaagaagttcgaatcacctttgggatcaccttgatgaagtttttggtaaatacaatcctaaacccgtggaggatgacttgatgaagcaccataccctaatcaagttgtttgtagagaaagatcaaaccttgatgaagtcaaagattcttcaaaggctcattgagaatggctttaagagaactaaaaagtgatgatggtgatggcagcagtgatgatgatgttaccgatcaaatatgtgcgctatgtgatgatggaggacatttgcttagctgtgacggtccatgcaagaggtctttccaccccacaaagaaagatggcagagaatctaaatgtgaaagtcttcattacacttcagcagaagtaaagagaattggtacttatctatgtgcaaactgcaaaaataagcaacaccaatgttttagatgtggagagcttgaaccatcccatgggccaaatgctaaggtctttcaatgcaatcaagcatcttgtggatatttttaccaccctaagtgcattgcacaattattggatcctaatgccactgatggtgagttggaaagaaggattatgtcgggaatgtcatttccgtgccccatacattggtgtttcaaatgtggccacatggagaacaaagctcaaagagcacttcagcttgcagtgtgtagacgctgtccaagagcatatcacagggaatgccttccaagggacttatcctttggaacaaaggacaaggatggtaaccaacgcgcttggaagctttccgacacaattttcatttactgcctagatcatgaaatagacaaggatactggcacaactagtaggaaccatataaaatttccagctacacctgaatacaccaaaacaaaagggcttggtaacagcaaaggaaggatgactggcaaaaggagaaagaacaaaaggagaaagaacactgaccaatcaacaaaacctacagatttgccaaacaggttgtgtggagcagaaagtgagcaagctgacaatgtaggtgcaaaaagcacattgccccagattgttgtagagcctcactgtgcagcaaagcacttgaagggtgatccacaaattgccaaacagggtgttgctgctcgtcaaaatggtgcagaaactatgaaagggcatgaaaatcaatttggcatttcattttgtgttgcaagtactgaaacagagaagagggtaacatgtttggcacaaaggggaacatgtttagggacacaatatgatgggccatcaaccaagggcatgtatgattgttctgttcaggacacccctatggacgacgatgttgagttggataatgtggcctgcataatcgcggtggataaatatgtcaatgggagggggaaaacacaagaggactacactagaaaagaagctgctcagcgcaaagactcgagtgaaaatcaagggcagaatgatgctctagagctagacaacctccggatggagatgcaagctgacgaacgtccgttagaaccaggaaacaagagggacaggaagtggcagaaaaatgtatatggactcggatcagcttcgggacagaaggaaaccttgtccaggagagaaaatccacggtcagatagagggatggtccacagtaacgacagcaaaacaatttattacaggaagggtgggacggaagtcgataatgttgatgaccaccctttagaaaagcaagaccaccaggatacatcaagtgacggatctaaaaagagaagccgaccagtggacaacgcatctggtggcaacagaccatacttggatgagaacaagaagcgtaatctcagagaagatggaagatatgctcattatgaagactggagaagtgaaaggaatacagcagcagacacgtctggatataaggcccaatcagaagagaagcctgtatggacaaacactcgaacaggatcaagggagcattcactggacaggcaaaggatagagtgcggtgacagctatcgtggaacctataacaatagacaaagacatgaatggctgcacccgcacgctagtggtaattcctcgagaattggttgggatgacaggaggcagtggagttcatctcggtcaccatttccttcggctgaatttggtggtgaccgttcctgttctcgtgcccatccgagaggttctaaatacagaaccggcgggaggcatgatcacccccagtacctgggactgggaacacctcaacatggtacaagtagaccgcaccacacaatgggctgggacagggacaccttccatgatcaccagcatggcagaagaccgccgcaccacacaatgggctgggacagggcccccttccgtgatcaccagcatggcgaatacgacgactccaggtatggtgaatatgatgcaactgacaatggtcctgacagcgcgcatcgaccctacacggctgctggcgtggctggacgttcagcaccgagttatcagcttgctggtggttatggagagggatcaagggcttggcggccagttacggacaagtacgccccatggcccttgccttgaccgcacaaactaatattagccaaggagccagagtgagctacaagaacaccgtttgctattgtcggaaatgctttcttcgaggactgtctcagtacggggaattgatgggtcggtgttgaaacccaaatgatatctgccttccagttgcttgctttgcctatcgtaatcactgcatgttatttcacataagcagctggattctcaagttatgtgggcggtgcatttgagttatactagatgacagcctgtgcatattgttactgaagtaaaatatcttttttattaggttccccttatctcgctgtgttgttggtcaatggttatggactatctagtttgtcaaccccattttttgaagaaatttttattttttaaagaaaaatcagttc

SEQ ID NO: 23573 - DNA, 2898 bp, Zea Mays
cttagttgctgggctgcggaacttcaggatgcgccagcaacttgccttaggtatggaagcacaatccattgttagtgacgggtggcgtgctagaaaaaatgatgataacaattatggtaacaaagatgacagtggtgatgattgtgatggtgatggtagcagtgatgatggtgatggcagcagtgatgatgatgttaccgatcaaatatgtgcgctatgtgatgatggaggacatttgcttagctgtgacggtccatgcaagaggtctttccaccccacaaagaaagatggcagagaatctaaatgtgaaagtcttcattacacttcagcagaagtaaagagaattggtacttatctatgtgcaaactgcaaaaataagcaacaccaatgttttagatgtggagagcttgaaccatcccatgggccaaatgctaaggtctttcaatgcaatcaagcatcttgtggatatttttaccaccctaagtgcattgcacaattattggatcctaatgccactgatggtgagttggaaagaaggattatgtcgggaatgtcatttccgtgccccatacattggtgtttcaaatgtggccacatggagaacaaagctcaaagagcacttcagcttgcagtgtgtagacgctgtccaagagcatatcacagggaatgccttccaagggacttatcctttggaacaaaggacaaggatggtaaccaacgcgcttggaagctttccgacacaattttcatttactgcctagatcatgaaatagacaaggatactggcacaactagtaggaaccatataaaatttccagctacacctgaatacaccaaaacaaaagggcttggtaacagcaaaggaaggatgactggcaaaaggagaaagaacaaaaggagaaagaacactgaccaatcaacaaaacctacagatttgccaaacaggttgtgtggagcagaaagtgagcaagctgacaatgtaggtgcaaaaagcacattgccccagattgttgtagagcctcactgtgcagcaaagcacttgaagggtgatccacaaattgccaaacagggtgttgctgctcgtcaaaatggtgcagaaactatgaaagggcatgaaaatcaatttggcatttcattttgtgttgcaagtactgaaacagagaagagggtaacatgtttggcacaaaggggaacatgtttagggacacaatatgatgggccatcaaccaagggcatgtatgattgttctgttcaggacacccctatggacgacgatgttgagttggataatgtggcctgcataatcgcggtggataaatatgtcaatgggagggggaaaacacaagaggactacactagaaaagaagctgctcagcgcaaagactcgagtgaaaatcaagggcagaatgatgctctagagctagacaacctccggatggagatgcaagctgacgaacgtccgttagaaccaggaaacaagagggacaggaagtggcagaaaaatgtatatggactcggatcagcttcgggacagaaggaaaccttgtccaggagagaaaatccacggtcagatagagggatggtccacagtaacgacagcaaaacaatttattacaggaagggtgggacggaagtcgataatgttgatgaccaccctttagaaaagcaagaccaccaggatacatcaagtgacggatctaaaaagagaagccgaccagtggacaacgcatctggtggcaacagaccatacttggatgagaacaagaagcgtaatctcagagaagatggaagatatgctcattatgaagactggagaagtgaaaggaatacagcagcagacacgtctggatataaggcccaatcagaagagaagcctgtatggacaaacactcgaacaggatcaagggagcattcactggacaggcaaaggatagagtgcggtgacagctatcgtggaacctataacaatagacaaagacatgaatggctgcacccgcacgctagtggtaattcctcgagaattggttgggatgacaggaggcagtggagttcatctcggtcaccatttccttcggctgaatttggtggtgaccgttcctgttctcgtgcccatccgagaggttctaaatacagaaccggcgggaggcatgatcacccccagtacctgggactgggaacacctcaacatggtacaagtagaccgcaccacacaatgggctgggacagggacaccttccatgatcaccagcatggcagaagaccgccgcaccacacaatgggctgggacagggcccccttccgtgatcaccagcatggcgaatacgacgactccaggtatggtgaatatgatgcaactgacaatggtcctgacagcgcgcatcgaccctacacggctgctggcgtggctggacgttcagcaccgagttatcagcttgctggtggttatggagagggatcaagggcttggcggccagttacggacaagtacgccccatggcccttgccttgaccgcacaaactaatattagccaaggagccagagtgagctacaagaacaccgtttgctattgtcggaaatgctttcttcgaggactgtctcagtacggggaattgatgggtcggtgttgaaacccaaatgatatctgccttccagttgcttgctttgcctatcgtaatcactgcatgttatttcacataagcagctggattctcaagttatgtgggcggtgcatttgagttatactagatgacagcctgtgcatattgttactgaagtaaaatatcttttttattaggttccccttatctcgctgtgttgttggtcaatggttatggactatctagtttgtcaaccccattttttgaagaaatttttattttttaaagaaaaatcagttc

SEQ ID NO: 23574 - DNA, 1974 bp, Zea Mays
atacgcctgccgctgtcgcctcaggtagttaatggccccttagcttgccttgtgtagctcacatttctgagcaacaacgaacgacggacggcgattcaattcagtggtggtggcttagcccagatctctgtctctgtctctctctcggccgcagtcatcaccctacgacctgcagcccaagccatacatctacacttgagagcgaggagaggacgtacgcatcgcagcagcagcaacaacagcaagcagcgtcatgaggagttgcagctagttagctagctggcgcctggcggcaatgaacttgcagcaggaacacctgttgttctcggtctcccggcctgcttccaggccgtcggcggcaacgacgacgggcttccaggaccacgggctcggcggcttccaggtgatcgccaccgacggcggcgccggcccggccgcgccctggtgggccgccgccgctccccaggggtgcgctgcggccaagttcccgatcggctcaccgccctcaggtaattaatcatgcaagtagactgaaaaatgctctcgtcgtctttcttgctgccggccgtacgtcgaccgatcgacggcgcggcggtggtcggccagctattagcagccgcgcgtccgtcgatcgagtagtacggccgacgacgaccgctctctgaatgccggccgccggccgtacggtacgtcccgggtcgatggctgcatcactgcacgcatcataattgcactagtatttgccaccgtggtcctggtcctaggagacttagggggtgtttggttttagagactaatttttagtccctccaatttattccactttagtcactaaattatcaaatatggaaattaaaatagagttatagtttccatattttgcaatttatagactaaagtggaataaaatggtgggactaaaaattagtccctagtaaccaaacactaccttaactctacatgtacatacagtacgtgtagctggactggggtccttaactcgcgtcagggatgtggtgcggttggtgccggtgcctggtcgggctcctctcctcctccagatgcgcggcgatccagaccttcggcggcacgagctgaggttcgtccacgaccacgagtcgtcgtctgcgcccgccggtggggcatcatcagccgccatggccgcgcacccggagctgctgctgctggacaggtaccagtaccaccaccatggccgcttcgacctgaccgttgggcaatccatggtgcttaacaacgacagcgccattgctggccatcagatctatggcgccactgcgtactatcatcccttctacggagcccaagctctgcacgggagggtgctcctgccgccggcgatcgcggccgacgagccggtctacgtgaacgccaagcagttcaacggcatcctccggcggcgcctggcgcgcgccaagcgggcggccgccacggaccgccgggtctccgggagccgcaagccgtacctccacgagtcacggcacctgcacgcgctgcgccgggcgcggggcaccggcggccgcttcctcaacacccggagccgcgacggcgaccccgaggccggcagcgcggggaaggcggcgaggctgcaggaggaggaccggcaggcggacgccgtgttcctctcgtcgttggcgagcatggcgggcggcgatgccacccggtggcccagcgcgccgtcgcgggggcggggctgctgcgacctgctcaaggcgtgacggacggccgtgcgtcgcctggtggtggccgtggctctctaggacgcctactcactgattcttggctcccggtgtgtgagcagactgcagagggagatgcagcagcgacttgtgttgtcaatgtttcgtgcagagttgcagacccttttcaaacacctttccttttgtttgatttgacgagatcgacggatgtggtcactgttcaacccaaaatctttaagttgataagagaaagtac

SEQ ID NO: 23575 - DNA, 695 bp, Zea Mays
gcatgggcatttgaggagtattcatcagtacgggtgccctgacatcgaggaaatagagaaattcaatagactctacaagcagaaactggatgagatcgtcgaaagaggcgaaatatccctggacctggcactcgaggtatcatcgccaggcgcagagaggcttctgaaggtgcctgaggatctggaccgcttcaaggacatggctatgagggtgcagtacctcgctgaaggcaacagtgaccttgcgtcgaagcagagcctgctgaaggacggcatcttcttgctcgagtccgttaacgctgaggctgggcactgtgtttggaggctggcagatgtgaaggaaaaccgagcagaagctgggaagggaaggccgctgaacaggaaacagagagactggaggctgcagacttgcttcaccgcagtgaagaaggtgaccttgtacttggacgccaactagtaaatccgggccaggaggactattatggcttgtgaaaactatcctaaccctagcagattatgtagaataagaatgttgggttttctttatatagagtagagctatgttggtaggctgcacaaattggatatccatgaaattgctttgctatgagttgctagtgcgaaattgactgatgtttctcacacttgcagtataatgacacctttttcttttcaaattataagatgctttatta

SEQ ID NO: 23576 - DNA, 509 bp, Zea Mays
aactggttcgcagtttccgcacccagcacccgtcccgtggacactccactgcatccaccacaccaccagatctgccgtccgcgcagaggacgagaggaatacttcatcgcgatgggggcggtggtgacggcggtgatcgcgatcgccgcggtggtgctcggctggatcaccatcgagatggcatgcaagccctgcctcgagaccggccgacgcgccatggaccgcgcgctcgaccccaaccacgacccggactcccccaccaacgccggcggcgcctccgccaacgagccgctcctcgccgacctctccgcctccaccgcgccacccgcaaaggccatctgaatctcgtcatctcccagagcgagccagaggcggaccacccttttcccctcgcgttgtaatattgcttctttctatgtcattttgtgtttatgagtttgctattaatattaatggtgttttggttatgaaacgaccactgctagcaatatataaactacttattcaga

SEQ ID NO: 23577 - DNA, 1096 bp, Zea Mays
cacaatttggttgctaccaaaccagccaaataaaattagcattaggatttcatgaatgcaaaacacggttgatgcagtacatgcagttcttttattttgatgtactgtatatgcattcctaacatgttatcattaatttcagcatgtgtagcgcatatatggtatactaaggctatctccagcaactcccctatcacatccactatttcaaactccactctgcaaacagtgttatctacagtgcaaaacaatgttttacacgtccatatacagttatacacgatctgctggacacggcctaagggggtgttagtaagtaagtggtggtttcttttttagatctatacaaataaaagaaacagattagagaaccaaaggttgaatgatttgctttatatctgatacaagataattgaaaggctcaaaaagagacatgtggaagaaaaaaatctaaaccctttgatcttagaagagttccaataggttcaaatggcaactaacaatgaagaagagatcatcctgaagatcatgatcttttctggtctcgtgttcatgaagccattggtgcaacaacatcactacagaaccgtaattttcctaggatgagcaggatctatactcgttgaaatggtgttgtagctgctgcttcaacatccaccacaaccataatttcagaacaagaacaacaaggattaggagaagacaaagaagctgaaattgactttgttgctcttgatgatctacatgttgaagatgactatggccaagctcttgctacagatgatgctgctgcaactgcaagtgacgagcatgtgtgcggcataaatgagatggacttatatactaattaagccttatggacttagggcaggataatatgccatatttatcagttattcagttttatcatgtatttgctagacatatataattgcttgctacctatattttatttgctagttttttatatcttgtatgatatatgttgcatacttgctgctaaacaaattggtgtctaggtgtccatgcgcccagctggcgactcgccttgtcgtggcgtgtggcgacatgataaccataatattgccacttatcc

SEQ ID NO: 23578 - DNA, 3056 bp, Zea Mays
cttgtagtctttaattttatatatatgatcgagctgcagatgagaagctgcacgcgatgccccagcaagcagtattagttgggttgacggcgggcatggtggcggcggaggggaaggcagctgggaacaagacgatgatgcagaagcagcaggcgagcagctgctgctcggaccgtgaccaggacatggcggacctggagctggcgcttgaggcggttgttccggtgagcgtgcagcggcaggactcgctgtacagggacgcgacgagggcgggcggcggcgggcagcagcagcacgaagggtgggctcggactctgaggctggccttccagtgcgtgggcgtcctctacggcgacatcgggacgtcgccgctgtacgtctactcgagcaccttcgccggcggcatccgggacaccgacgacctcctgggcgtgctctccctcatcatctacagcttcctcctcttcaccatcatcaagtacgtctacatcgcgctcagagcaaacgacgacggggacggcggcacgttggcgctctactcgctcatctctcgccacgccaaggtgagcctggtgcccaaccaccagcccgaggacgagctgcagacgacggacgccgccgccgccgtgctgggcaagcacgggagcgtgcggcgccggaccgtgcagctggcggcgtcgcacgggcgggagcagcgggcggtgtgggtgaaggagctgctagagacgagcaagcccgtgcgcatctccctcttcttcctgaccatcgtggccaccgccatggtcatcagcgacgcctgcctcacgcccgccatctccgtcctctccgccgtaggggggctcaaggagaaagcgccaaacctcaccacagcgcttcggcacccacaaggtgggctacctgttcgcccccgtctcctcctgtggctgctcctcatcggcggcgtgggcgtgtacaacctgctcaggcacgacgtcaccgtcctccgcgccttcaaccccaagtacatcctggactacttccggcgcaacggcagggacgcctgggtctccctcggcggcgtcctcctctgcttcaccggcaccgaggcgctgttcgccgacctcggctacttcagcatccgctccatccagctcagcttcggcttcggcctcgtccccgccgtgctgctcgcctacatcggccaggccgccttcctccgccggtacccggagcaggtgtccaacgccttctaccagtccacgcccgagtccatcttctggcccaccttcgtgctggcgctggcggcgtcggtcatcggcagccaggccatgatctcctgcgccttcgccaccatctcccactcgcaggcgctgggctgcttcccgagggtcaaggtgctccacacgtcgcgccagtaccggggccagctctacatcccggaggtgaacttgctgctcgccctcgtcgcctgcgtcgtcacgctcgcgtccaagaccacggccgtcatcgccgaggcgcacggcatctgcgtcgtcctcgtcatgctcatcaccacgctgctgctcaccctggtcatgctcctggtgtggcgcgtcaacgccgcctgcgtcgcgctcttcttcgccgtcttcgccgccgccgagtccgtctacctctcctccgtgctctaccggttcgcgcacggcgggtacatccccgtcgccatgtccgcggtgctggtggccgtcatggtgctgtggcactacgtgcacgtgaagcggtacaagtacgagctggagcgcacggtgtcgcacgagagcgtggtgcgggacctgctgccgcgctgccgcaccgtccccggcgtcggcctcttctacacggacctggtgcagggcatcccgcccgtgttcccgcacctggtggacaagatcccgtccatccacgccgtcctgctcttcgtctccgtcaagcacctgccggtgccgcacgtggacgcaacggagcgcttcctcttcaggcaggtggcatcgtcgtcggagtcggacacagctgcaggcccacgggtgttccggtgcgtggcgcgctacggctaccgggacctgctggaggaggccagtgacttcgcgggcagcctggtggagcgcctccagtactacatccgcgacgtcaacctctacggcgtggagcaccagcagccgggcgccaaggtgagctacccgagctcgcgctgcgacagcatgatattgatggcgcggcagaggtcgtcggtcatgatgctgcggcagtcgtcggcggcatcctactactcgtcgtacgcagcggcagcggagacccagcagctgcagctggcgagggccaggtccacgtccggggcggggggcatcctcctccactcggcgtcggagagggccgagcagctggcccgcgccaggtccacgggcatcttcgcggaggagatgctgacgccggcggagtcgttctcggagctgtcgaggatggggagcatcggcggcggaggaatgcaggcggtgaagatcagcctggaggagatggcgcggatcgaggaggagcagcggtttatcgagcgggagatggaaaagggggtggtgtacatcctcggggagagcgaggtggtggcgcggccccactcgtcgctgctcaagaagctgctcgtcaactacgcctacgccttcctgcggaacaactgccggcagggggagaagatgctcgccatccccaagtcgcagctgctcaaggtcggcatgtcctacgagatctgatctgatctgattctgatggcgcgcgcgtcaccgatcgatctcccagctccatcatgccgtcgtcctcattatatatatatgacccagactccatatagtatagtacactactagtcttcagacagatttgatttcgtatgctttctctgcagtgatgctactagctacctagctagctagtacaattaattgtggcacacttgttagctgctgcagtagcataattattaagtaatttgcttctcatctactctactctactctactctactcttccagcagttcatggatgagggacatatctggtgcacatagaag

SEQ ID NO: 23579 - DNA, 3106 bp, Zea Mays
gtagtctttaattttatatatatgatcgagctgcagatgagaagctgcacgcgatgccccagcaagcagtattagttgggttgacggcgggcatggtggcggcggaggggaaggcagctgggaacaagacgatgatgcagaagcagcaggcgagcagctgctgctcggaccgtgaccaggacatggcggacctggagctggcgcttgaggcggttgttccggtgagcgtgcagcggcaggactcgctgtacagggacgcgacgagggcgggcggcggcgggcagcagcagcacgaagggtgggctcggactctgaggctggccttccagtgcgtgggcgtcctctacggcgacatcgggacgtcgccgctgtacgtctactcgagcaccttcgccggcggcatccgggacaccgacgacctcctgggcgtgctctccctcatcatctacagcttcctcctcttcaccatcatcaagtacgtctacatcgcgctcagagcaaacgacgacggggacggcggcacgttggcgctctactcgctcatctctcgccacgccaaggtgagcctggtgcccaaccaccagcccgaggacgagctgcagacgacggacgccgccgccgccgtgctgggcaagcacgggagcgtgcggcgccggaccgtgcagctggcggcgtcgcacgggcgggagcagcgggcggtgtgggtgaaggagctgctagagacgagcaagcccgtgcgcatctccctcttcttcctgaccatcgtggccaccgccatggtcatcagcgacgcctgcctcacgcccgccatctccgtcctctccgccgtaggggggctcaaggagaaagcgccaaacctcaccacagaccagatcgtgtggatcactgtgggcatcctggtgcttctgttcgccgtgcagcgcttcggcacccacaaggtgggctacctgttcgcccccgtctcctcctgtggctgctcctcatcggcggcgtgggcgtgtacaacctgctcaggcacgacgtcaccgtcctccgcgccttcaaccccaagtacatcctggactacttccggcgcaacggcagggacgcctgggtctccctcggcggcgtcctcctctgcttcaccggcaccgaggcgctgttcgccgacctcggctacttcagcatccgctccatccagctcagcttcggcttcggcctcgtccccgccgtgctgctcgcctacatcggccaggccgccttcctccgccggtacccggagcaggtgtccaacgccttctaccagtccacgcccgagtccatcttctggcccaccttcgtgctggcgctggcggcgtcggtcatcggcagccaggccatgatctcctgcgccttcgccaccatctcccactcgcaggcgctgggctgcttcccgagggtcaaggtgctccacacgtcgcgccagtaccggggccagctctacatcccggaggtgaacttgctgctcgccctcgtcgcctgcgtcgtcacgctcgcgtccaagaccacggccgtcatcgccgaggcgcacggcatctgcgtcgtcctcgtcatgctcatcaccacgctgctgctcaccctggtcatgctcctggtgtggcgcgtcaacgccgcctgcgtcgcgctcttcttcgccgtcttcgccgccgccgagtccgtctacctctcctccgtgctctaccggttcgcgcacggcgggtacatccccgtcgccatgtccgcggtgctggtggccgtcatggtgctgtggcactacgtgcacgtgaagcggtacaagtacgagctggagcgcacggtgtcgcacgagagcgtggtgcgggacctgctgccgcgctgccgcaccgtccccggcgtcggcctcttctacacggacctggtgcagggcatcccgcccgtgttcccgcacctggtggacaagatcccgtccatccacgccgtcctgctcttcgtctccgtcaagcacctgccggtgccgcacgtggacgcaacggagcgcttcctcttcaggcaggtggcatcgtcgtcggagtcggacacagctgcaggcccacgggtgttccggtgcgtggcgcgctacggctaccgggacctgctggaggaggccagtgacttcgcgggcagcctggtggagcgcctccagtactacatccgcgacgtcaacctctacggcgtggagcaccagcagccgggcgccaaggtgagctacccgagctcgcgctgcgacagcatgatattgatggcgcggcagaggtcgtcggtcatgatgctgcggcagtcgtcggcggcatcctactactcgtcgtacgcagcggcagcggagacccagcagctgcagctggcgagggccaggtccacgtccggggcggggggcatcctcctccactcggcgtcggagagggccgagcagctggcccgcgccaggtccacgggcatcttcgcggaggagatgctgacgccggcggagtcgttctcggagctgtcgaggatggggagcatcggcggcggaggaatgcaggcggtgaagatcagcctggaggagatggcgcggatcgaggaggagcagcggtttatcgagcgggagatggaaaagggggtggtgtacatcctcggggagagcgaggtggtggcgcggccccactcgtcgctgctcaagaagctgctcgtcaactacgcctacgccttcctgcggaacaactgccggcagggggagaagatgctcgccatccccaagtcgcagctgctcaaggtcggcatgtcctacgagatctgatctgatctgattctgatggcgcgcgcgtcaccgatcgatctcccagctccatcatgccgtcgtcctcattatatatatatgacccagactccatatagtatagtacactactagtcttcagacagatttgatttcgtatgctttctctgcagtgatgctactagctacctagctagctagtacaattaattgtggcacacttgttagctgctgcagtagcataattattaagtaatttgcttctcatctactctactctactctactctactcttccagcagttcatggatgagggacatatctggtgcacatagaag

SEQ ID NO: 23580 - DNA, 3065 bp, Zea Mays
gtagtctttaattttatatatatgatcgagctgcagatgagaagctgcacgcgatgccccagcaagcagtattagttgggttgacggcgggcatggtggcggcggaggggaaggcagctgggaacaagacgatgatgcagaagcagcaggcgagcagctgctgctcggaccgtgaccaggacatggcggacctggagctggcgcttgaggcggttgttccggtgagcgtgcagcggcaggactcgctgtacagggacgcgacgagggcgggcggcggcgggcagcagcagcacgaagggtgggctcggactctgaggctggccttccagtgcgtgggcgtcctctacggcgacatcgggacgtcgccgctgtacgtctactcgagcaccttcgccggcggcatccgggacaccgacgacctcctgggcgtgctctccctcatcatctacagcttcctcctcttcaccatcatcaagtacgtctacatcgcgctcagagcaaacgacgacggggacggcggcacgttggcgctctactcgctcatctctcgccacgccaaggtgagcctggtgcccaaccaccagcccgaggacgagctgcagacgacggacgccgccgccgccgtgctgggcaagcacgggagcgtgcggcgccggaccgtgcagctggcggcgtcgcacgggcgggagcagcgggcggtgtgggtgaaggagctgctagagacgagcaagcccgtgcgcatctccctcttcttcctgaccatcgtggccaccgccatggtcatcagcgacgcctgcctcacgcccgccatctccgtcctctccgccgtaggggggctcaaggagaaagcgccaaacctcaccacaggtacggccggtgcgaggccgagggtacgtacaccagatcgtgtggatcactgtgggcatcctggtgcttctgttcgccgtgcagcgcttcggcacccacaaggtgggctacctgttcgcccccgtctcctcctgtggctgctcctcatcggcggcgtgggcgtgtacaacctgctcaggcacgacgtcaccgtcctccgcgccttcaaccccaagtacatcctggactacttccggcgcaacggcagggacgcctgggtctccctcggcggcgtcctcctctgcttcaccggcaccgaggcgctgttcgccgacctcggctacttcagcatccgctccatccagctcagcttcggcttcggcctcgtccccgccgtgctgctcgcctacatcggccaggccgccttcctccgccggtacccggagcaggtgtccaacgccttctaccagtccacgcccgagtccatcttctggcccaccttcgtgctggcgctggcggcgtcggtcatcggcagccaggccatgatctcctgcgccttcgccaccatctcccactcgcaggcgctgggctgcttcccgagggtcaaggtgctccacacgtcgcgccagtaccggggccagctctacatcccggaggtgaacttgctgctcgccctcgtcgcctgcgtcgtcacgctcgcgtccaagaccacggccgtcatcgccgaggcgcacggcatctgcgtcgtcctcgtcatgctcatcaccacgctgctgctcaccctggtcatgctcctggtgtggcgcgtcaacgccgcctgcgtcgcgctcttcttcgccgtcttcgccgccgccgagtccgtctacctctcctccgtgctctaccggttcgcgcacggcgggtacatccccgtcgccatgtccgcggtgctggtggccgtcatggtgctgtggcactacgtgcacgtgaagcggtacaagtacgagctggagcgcacggtgtcgcacgagagcgtggtgcgggacctgctgccgcgctgccgcaccgtccccggcgtcggcctcttctacacggacctggtgcagggcatcccgcccgtgttcccgcacctggtggacaagatcccgtccatccacgccgtcctgctcttcgtctccgtcaagcacctgccggtgccgcacgtggacgcaacggagcgcttcctcttcaggcaggtggcatcgtcgtcggagtcggacacagctgcaggcccacgggtgttccggtgcgtggcgcgctacggctaccgggacctgctggaggaggccagtgacttcgcgggcagcctggtggagcgcctccagtactacatccgcgacgtcaacctctacggcgtggagcaccagcagccgggcgccaaggtgagctacccgagctcgcgctgcgacagcatgatattgatggcgcggcagaggtcgtcggtcatgatgctgcggcagtcgtcggcggcatcctactactcgtcgtacgcagcggcagcggagacccagcagctgcagctggcgagggccaggtccacgggcatcttcgcggaggagatgctgacgccggcggagtcgttctcggagctgtcgaggatggggagcatcggcggcggaggaatgcaggcggtgaagatcagcctggaggagatggcgcggatcgaggaggagcagcggtttatcgagcgggagatggaaaagggggtggtgtacatcctcggggagagcgaggtggtggcgcggccccactcgtcgctgctcaagaagctgctcgtcaactacgcctacgccttcctgcggaacaactgccggcagggggagaagatgctcgccatccccaagtcgcagctgctcaaggtcggcatgtcctacgagatctgatctgatctgattctgatggcgcgcgcgtcaccgatcgatctcccagctccatcatgccgtcgtcctcattatatatatatgacccagactccatatagtatagtacactactagtcttcagacagatttgatttcgtatgctttctctgcagtgatgctactagctacctagctagctagtacaattaattgtggcacacttgttagctgctgcagtagcataattattaagtaatttgcttctcatctactctactctactctactctactcttccagcagttcatggatgagggacatatctggtgcacatagaag

SEQ ID NO: 23581 - DNA, 1797 bp, Zea Mays
tgggcataaataaagtccatcctccttccgtgagacgagatgagaccaagaaaagattcgcggcggtggagtcggagctcaactcatcaatagggtttgatcagcgctccgctcgtgctagccacccagcccccccgcgcccacttgcgacggcgatggcttcgccgtactcgctcagctgggccgacgcgccgccctaccactaccacgggagaccccagccagcgcccgactcacccgcatcctccgacggggccgggccccgctcgctctggatcggcggcctgctgccatggatggacgaggactacctctacggctgcttcaccacctcgcgcgagcttctttcccttgtcatcaaacggaacaagcagactggccaatcagagggctttggcttcctcaaattttctgaccataccgccgctgctcatattctcaagtcttacaatggtcagaagatgcctaacgctgttcaagatttcaagctcaactgggccacccaacaacctgctcccaagaaacttcctgatccagatttcaagctcgacctggccacgcagcaggagaggcatgccgccgttgattcctcatctgatcattccatattcgttggggacttggcctacaatgttacaggatacatgctacaccatgtgttcaaggcccgctacccatcagtgaagagcgcaaaaatcatctttgacaagttcactggcctctcaaaatgctatggatttgttcagtttggagatgtcgatgagcagatacagcactgacagaaatgaatggagcctactgttctaccaggcctatgcggattggacctgttcccaagaagaaaagtgcgtacgccaccgtatgactaaattctttccgcagcaaacagtggactgagtcttatcacgatgcaaacaattcaaggctatttgttgggcaacttgaccaaagtgtgacttctgaagatctgatgcaagcctttagtccatatggggagcttgttgatgtgaaggcattaccagggaagggctgtgggtttgtcacgtactctaacagggcatcagcagaggaagccattagaatgctgaatggaagtcagctgggaggtaaagccataaaactttcgtggggttacccttctgctgacaagcaggctcaaaggaacagcggcggcgggttcggacgcgactgcttcgtttggtctcctcagtatccctacgcttacgctcagacatgccaaccgggatatggatattaattaccgatagcaagctgcccacagtgcagtgagatcgtgtgaagaaagatgtcagtcacaaggaacagctgctagggtgtagagggatttttggtccatgtttttttttctttttggaaattggttcctcctatggttgcataccgtgaagcatcggcatctggatccatacatgagaatgcaaacaacgattgaatgtacatttacacacatactgctactactatattaattactgtaccttgaattttttgtctaccctatattacgcagcacgtccattaatttttatgggttggacgttggagaacgttgttgtgtggcccagagacatcaaataaacatcagtttttatggaaagaggattatttttctcaaaggagacaggcaagaagaaagaagagagcttgacccaaggagacatttgacccacacgagctagataaaggagacacgaaagagagctttgactcacacgagctagatatcgaagtactacctctattcatttttaaaaaatatttgtctagtttattttt

SEQ ID NO: 23582 - DNA, 1789 bp, Zea Mays
tgggcataaataaagtccatcctccttccgtgagacgagatgagaccaagaaaagattcgcggcggtggagtcggagctcaactcatcaatagggtttgatcagcgctccgctcgtgctagccacccagcccccccgcgcccacttgcgacggcgatggcttcgccgtactcgctcagctgggccgacgcgccgccctaccactaccacgggagaccccagccagcgcccgactcacccgcatcctccgacggggccgggccccgctcgctctggatcggcggcctgctgccatggatggacgaggactacctctacggctgcttcaccacctcgcgcgagcttctttcccttgtcatcaaacggaacaagcagactggccaatcagagggctttggcttcctcaaattttctgaccataccgccgctgctcatattctcaagtcttacaatggtcagaagatgcctaacgctgttcaagatttcaagctcaactgggccacccaacaacctgctcccaagaaacttcctgatccagatttcaagctcgacctggccacgcagcaggagaggcatgccgccgttgattcctcatctgatcattccatattcgttggggacttggcctacaatgttacaggatacatgctacaccatgtgttcaaggcccgctacccatcagtgaagagcgcaaaaatcatctttgacaagttcactggcctctcaaaatgctatggatttgttcagtttggagatgtcgatgagcagatacagcactgacagaaatgaatggagcctactgttctaccaggcctatgcggattggacctgttcccaagaagaaaagtgcgtacgccaccgtatgactaaattctttccgcagcaaacagtggactgagtcttatcacgatgcaaacaattcaaggctatttgttgggcaacttgaccaaagtgtgacttctgaagatctgatgcaagcctttagtccatatggggagcttgttgatgtgaaggcattaccagggaagggctgtgggtttgtcacgtactctaacagcagaggaagccattagaatgctgaatggaagtcagctgggaggtaaagccataaaactttcgtggggttacccttctgctgacaagcaggctcaaaggaacagcggcggcgggttcggacgcgactgcttcgtttggtctcctcagtatccctacgcttacgctcagacatgccaaccgggatatggatattaattaccgatagcaagctgcccacagtgcagtgagatcgtgtgaagaaagatgtcagtcacaaggaacagctgctagggtgtagagggatttttggtccatgtttttttttctttttggaaattggttcctcctatggttgcataccgtgaagcatcggcatctggatccatacatgagaatgcaaacaacgattgaatgtacatttacacacatactgctactactatattaattactgtaccttgaattttttgtctaccctatattacgcagcacgtccattaatttttatgggttggacgttggagaacgttgttgtgtggcccagagacatcaaataaacatcagtttttatggaaagaggattatttttctcaaaggagacaggcaagaagaaagaagagagcttgacccaaggagacatttgacccacacgagctagataaaggagacacgaaagagagctttgactcacacgagctagatatcgaagtactacctctattcatttttaaaaaatatttgtctagtttattttt

SEQ ID NO: 23583 - DNA, 1759 bp, Zea Mays
tgggcataaataaagtccatcctccttccgtgagacgagatgagaccaagaaaagattcgcggcggtggagtcggagctcaactcatcaatagggtttgatcagcgctccgctcgtgctagccacccagcccccccgcgcccacttgcgacggcgatggcttcgccgtactcgctcagctgggccgacgcgccgccctaccactaccacgggagaccccagccagcgcccgactcacccgcatcctccgacggggccgggccccgctcgctctggatcggcggcctgctgccatggatggacgaggactacctctacggctgcttcaccacctcgcgcgagcttctttcccttgtcatcaaacggaacaagcagactggccaatcagagggctttggcttcctcaaattttctgaccataccgccgctgctcatattctcaagtcttacaatggtcagaagatgcctaacgctgttcaagatttcaagctcaactgggccacccaacaacctgctcccaagaaacttcctgatccagatttcaagctcgacctggccacgcagcaggagaggcatgccgccgttgattcctcatctgatcattccatattcgttggggacttggcctacaatgttacaggatacatgctacaccatgtgttcaaggcccgctacccatcagtgaagagcgcaaaaatcatctttgacaagttcactggcctctcaaaatgctatggatttgttcagtttggagatgtcgatgagcagatacagcactgacagaaatgaatggagcctactgttctaccaggcctatgcggattggacctgttcccaagaagaaaaattctttccgcagcaaacagtggactgagtcttatcacgatgcaaacaattcaaggctatttgttgggcaacttgaccaaagtgtgacttctgaagatctgatgcaagcctttagtccatatggggagcttgttgatgtgaaggcattaccagggaagggctgtgggtttgtcacgtactctaacagggcatcagcagaggaagccattagaatgctgaatggaagtcagctgggaggtaaagccataaaactttcgtggggttacccttctgctgacaagcagcggcggcgggttcggacgcgactgcttcgtttggtctcctcagtatccctacgcttacgctcagacatgccaaccgggatatggatattaattaccgatagcaagctgcccacagtgcagtgagatcgtgtgaagaaagatgtcagtcacaaggaacagctgctagggtgtagagggatttttggtccatgtttttttttctttttggaaattggttcctcctatggttgcataccgtgaagcatcggcatctggatccatacatgagaatgcaaacaacgattgaatgtacatttacacacatactgctactactatattaattactgtaccttgaattttttgtctaccctatattacgcagcacgtccattaatttttatgggttggacgttggagaacgttgttgtgtggcccagagacatcaaataaacatcagtttttatggaaagaggattatttttctcaaaggagacaggcaagaagaaagaagagagcttgacccaaggagacatttgacccacacgagctagataaaggagacacgaaagagagctttgactcacacgagctagatatcgaagtactacctctattcatttttaaaaaatatttgtctagtttattttt

SEQ ID NO: 23584 - DNA, 2573 bp, Zea Mays
tgggcataaataaagtccatcctccttccgtgagacgagatgagaccaagaaaagattcgcggcggtggagtcggagctcaactcatcaatagggtttgatcagcgctccgctcgtgctagccacccagcccccccgcgcccacttgcgacggcgatggcttcgccgtactcgctcagctgggccgacgcgccgccctaccactaccacgggagaccccagccagcgcccgactcacccgcatcctccgacggggccgggccccgctcgctctggatcggcggcctgctgccatggatggacgaggactacctctacggctgcttcaccacctcgcgcgagcttctttcccttgtcatcaaacggaacaagcagactggccaatcagagggctttggcttcctcaaattttctgaccataccgccgctgctcatattctcaagtcttacaatggtcagaagatgcctaacgctgttcaagatttcaagctcaactgggccacccaacaacctgctcccaagaaacttcctgatccagatttcaagctcgacctggccacgcagcaggagaggcatgccgccgttgattcctcatctgatcattccatattcgttggggacttggcctacaatgttacaggatacatgctacaccatgtgttcaaggcccgctacccatcagtgaagagcgcaaaaatcatctttgacaagttcactggcctctcaaaatgctatggatttgttcagtttggagatgtcgatgagcagatacagcactgacagaaatgaatggagcctactgttctaccaggcctatgcggattggacctgttcccaagaagaaaagtgcgtacgccaccgtatgactaagtaatctgcggttcagctgctctgatagattttagtgtcctttgtttccttgagttggaacgcctcaagcatatatctttgtgtaggctgttcctctgagtttctttcctccagcattaatgtattcttcatgccatcacatttaatttgtctgaagactgaacttttttagcccctagtaagtagtaaagtaaggattatcagcactgcttgcttattaggatgccagtggagcagttcactctacttagatttctcattcaaggagaggtctttgactctttgtgtaccacattgctttgtttctgtttcttttggctcttccttatttcataaaagcaacaaaatacagtgtgtgcaatcttaagttatctggtcacaagggcatccatgcaagtatatgcttaatactaagacagtacatgcagatgttttcagtacaccttttatattactctgttgcttcttggcttgtggtacgtgaatacaaaatacagatcagtcggaaatctagaatgtaggataggatgcattagcgttacattgtccatgagtattattgagttaatcagaaaaatacttgtgcatccaatattcagagtagctagtaactagtattatattagcctgtagtagcagtcccaatacaactatttaatccaatcttcttcttttttcatgtgatatgcagattctttccgcagcaaacagtggactgagtcttatcacgatgcaaacaattcaagggtgggtacttttttccccacttttttcaatcaaagcagccagacggaagaacatttaacataaaggatgtattaattggtcgcagctatttgttgggcaacttgaccaaagtgtgacttctgaagatctgatgcaagcctttagtccatatggggagcttgttgatgtgaaggcattaccagggaagggctgtgggtttgtcacgtactctaacagggcatcagcagaggaagccattagaatgctgaatggaagtcagctgggaggtaaagccataaaactttcgtggggttacccttctgctgacaagcaggctcaaaggaacagcggcggcgggttcggacgcgactgcttcgtttggtctcctcagtatccctacgcttacgctcagacatgccaaccgggatatggatattaattaccgatagcaagctgcccacagtgcagtgagatcgtgtgaagaaagatgtcagtcacaaggaacagctgctagggtgtagagggatttttggtccatgtttttttttctttttggaaattggttcctcctatggttgcataccgtgaagcatcggcatctggatccatacatgagaatgcaaacaacgattgaatgtacatttacacacatactgctactactatattaattactgtaccttgaattttttgtctaccctatattacgcagcacgtccattaatttttatgggttggacgttggagaacgttgttgtgtggcccagagacatcaaataaacatcagtttttatggaaagaggattatttttctcaaaggagacaggcaagaagaaagaagagagcttgacccaaggagacatttgacccacacgagctagataaaggagacacgaaagagagctttgactcacacgagctagatatcgaagtactacctctattcatttttaaaaaatatttgtctagtttattttt

SEQ ID NO: 23585 - DNA, 1562 bp, Zea Mays
gccattctctactttagttgcctcctcattactactgtaccagtgcttctttcccttgtcatcaaacggaacaagcagactggccaatcagagggctttggcttcctcaaattttctgaccataccgccgctgctcatattctcaagtcttacaatggtcagaagatgcctaacgctgttcaagatttcaagctcaactgggccacccaacaacctgctcccaagaaacttcctgatccagatttcaagctcgacctggccacgcagcaggagaggcatgccgccgttgattcctcatctgatcattccatattcgttggggacttggcctacaatgttacaggatacatgctacaccatgtgttcaaggcccgctacccatcagtgaagagcgcaaaaatcatctttgacaagttcactggcctctcaaaatgctatggatttgttcagtttggagatgtcgatgagcagatacagcactgacagaaatgaatggagcctactgttctaccaggcctatgcggattggacctgttcccaagaagaaaaattctttccgcagcaaacagtggactgagtcttatcacgatgcaaacaattcaagggtgggtacttttttccccacttttttcaatcaaagcagccagacggaagaacatttaacataaaggatgtattaattggtcgcagctatttgttgggcaacttgaccaaagtgtgacttctgaagatctgatgcaagcctttagtccatatggggagcttgttgatgtgaaggcattaccagggaagggctgtgggtttgtcacgtactctaacagggcatcagcagaggaagccattagaatgctgaatggaagtcagctgggaggtaaagccataaaactttcgtggggttacccttctgctgacaagcaggctcaaaggaacagcggcggcgggttcggacgcgactgcttcgtttggtctcctcagtatccctacgcttacgctcagacatgccaaccgggatatggatattaattaccgatagcaagctgcccacagtgcagtgagatcgtgtgaagaaagatgtcagtcacaaggaacagctgctagggtgtagagggatttttggtccatgtttttttttctttttggaaattggttcctcctatggttgcataccgtgaagcatcggcatctggatccatacatgagaatgcaaacaacgattgaatgtacatttacacacatactgctactactatattaattactgtaccttgaattttttgtctaccctatattacgcagcacgtccattaatttttatgggttggacgttggagaacgttgttgtgtggcccagagacatcaaataaacatcagtttttatggaaagaggattatttttctcaaaggagacaggcaagaagaaagaagagagcttgacccaaggagacatttgacccacacgagctagataaaggagacacgaaagagagctttgactcacacgagctagatatcgaagtactacctctattcatttttaaaaaatatttgtctagtttattttt

SEQ ID NO: 23586 - DNA, 3014 bp, Zea Mays
agagaacgctgacgtgacaggtgagtgagatatagcagggcgcggcatgtgaggcactgcaccagctgtacatggaggggcaactgtcttgtcacggttgggccaatctaggatggagtaatttgggcctctgcggcccgcttacgcacgttcttgccctgctttgctctctccaactccagcatcgccccaaacagcggagccagcaccaccaccaccgcggcggcgcgagcgtcactgccctgccctctcctcctcctgtcctactgctctaccgtcctctcccccccgcgccgctgccgcaaccaaaaccctaaaagtcgctttctatccacttgctccgccgcctccaccaccgggcgccatggcggacacagtgcagtaccgcctggagcggatgaccgacgaactggacgacctggagcgccggggcctcttcacgcgcggcgagctagctgacgtcgtccgcaaacgccgcgacttcgagtaccgcctccgccgccactccccgctccgccaggactttctcgactacatcgcctacgagctccgcctcgactccctccgcaacctccgcaagcgcgccatcatacgcgccgccgccgaagacgacgacgacgagcctcagcacgacgctcgcagcagcgacgacgagggaggccggaggaagaggaagaaggataaatccaagaagaagtggaagaagtccgtctccgacgtcgcgggcgtcctccgcgtcctcgacatctaccggatggccaccgtcaggttcaagggcgatctcgacctctggttccggtacctcgagttctgccgcgacaagcgacacggcaggatgaagcaggttctggcacaagccattcgcttccatcccaaggttcctgggctttggatctatgcagcagcatgggaattcgatcagaacctgaacgttgccgcggcacgtgcactgatgcagagcggtctcaggtcttgccctcagtcagaggatatgtggatcgagtatcttcgcatggagcttacctaccttaacaagctcaaggctcgaaaggttgctcttggagaggatgtcaagacgctgcaaaagaaagacaacgatgcgagccagtggaaagaggaaaacaaggaactgttcatgccactgaatgaacaggtcaaagatcctaaggagccaggctcggctggagatgccctggaggagaaggaagacctgttttggcgtcaagggttgttaatcattcagaccatatatcatggtgccgtggaagctcttccgtcaagcttaaccttgcggaagaaattcttggagatactaaacagtgttgacttggcacattctgatgagttaaaactggaggtcctggatgaccttaagagagatttctctcatagcgaggactactgggattggtttgctaggcttcagcttagcaacttgaacagttccagtaattcgaatagaaaggatgctatatcaaacaagttgaacagatcaattcaggtgtatgacgaagctatcaggaagctaccaaattccaaaatgtactcattgtatgcaaagttttggatggatgttatatatactgacagagaagattcagtcacattattccaggattctgaatttgatgcttcagagttcacttcatccatactgaaagtttatgaaaatgcagaatcatgtggatgtcttactgaggatcttgcttgccaatacatatcactttacttgaaactagaaagactggaggaagctaagactctcgcagaaaagctttgtgatggtcctctttcaaatgctgcaaatttgtggagcctgagatttactatggagataaattcaattgcaactgctcctggcagttcttccttgagcaaggagaacctgagctctctgcttgatctatttagcactgtactctccaagttgtctgtaactgaggctgagagactgtggcatatggccatgaagttgttttcccatgataaggtctgtttcgagaagctggtgaagtgtgcgatgctatcattaagtctggcaggtggcagtgattcaggagcatcagtttcttctgctatcgttggatggtatttgcaaagagatggtgtgaagcatgctaggaagatgtataagagattgcttgctttacctcggccaagcctcaagttcatgcaatactgcatagcgctggaggcgaaccttgcatcgctcggagacaacggcgccctcaaagatgctcggcggctatatgattcagcgctcgacctgtatccccaggaaagagaagtgtggcggagctactacgacctggagctgaagatgggaacatcggagtctgccaacgccgtgtactcgcgctctcgtaaggtgctgggtgactccactgccttgactgctccccggggctaggtcgcagcatgcaatgtattccaagatgcaatgtgattttttttgtttggatctgtgttttccaatcctctctgagtctgggtcagcaagcaattaagctgatgcatcgaaattttggctctaaatgggagacctacaatgtgctgctggggaacactgtatatcttgttcaaaaaacaagagtactgcagctgctggtggctgtctcctttgagaacacttgcctgtgtcccttttctttctttttcttttttgtttgagcagtagctgggctgttggtgatgctgttccttagtgttgaggtgctatggtgtaacagtgtcaattgcgacgtgaacaaattctgggatctcgaaccatttgttgagattttgaaagtgtactggtggtcataatttttgttgggacctcgaaccatttttttagattttgatgtgttccttttatttatttattttttgtatggttcatggatgagccacatttgcttttgtgtcagtcttgctgcagattcctggtattaataaattagatgaattatgatgatttggattgttatttccttggttttttttttgttctcctgcttgcgtttttgttctac

SEQ ID NO: 23587 - DNA, 3108 bp, Zea Mays
gacaggtgagtgagatatagcagggcgcggcatgtgaggcactgcaccagctgtacatggaggggcaactgtcttgtcacggttgggccaatctaggatggagtaatttgggcctctgcggcccgcttacgcacgttcttgccctgctttgctctctccaactccagcatcgccccaaacagcggagccagcaccaccaccaccgcggcggcgcgagcgtcactgccctgccctctcctcctcctgtcctactgctctaccgtcctctcccccccgcgccgctgccgcaaccaaaaccctaaaagtcgctttctatccacttgctccgccgcctccaccaccgggcgccatggcggacacagtgcagtaccgcctggagcggatgaccgacgaactggacgacctggagcgccggggcctcttcacgcgcggcgagctagctgacgtcgtccgcaaacgccgcgacttcgagtaccgcctccgccgccactccccgctccgccaggactttctcgactacatcgcctacgagctccgcctcgactccctccgcaacctccgcaagcgcgccatcatacgcgccgccgccgaagacgacgacgacgagcctcagcacgacgctcgcagcagcgacgacgagggaggccggaggaagaggaagaaggataaatccaagaagaagtggaagaagtccgtctccgacgtcgcgggcgtcctccgcgtcctcgacatctaccggatggccaccgtcaggttcaagggcgatctcgacctctggttccggtacctcgagttctgccgcgacaagcgacacggcaggatgaagcagatgtctcgttctggactatacactgacattctgctatgctcacaagaagatcggggaaacctgaaacctttctatgcctataatgtgctatattccagctacacatctagttctggcacaagccattcgcttccatcccaaggttcctgggctttggatctatgcagcagcatgggaattcgatcagaacctgaacgttgccgcggcacgtgcactgatgcagagcggtctcaggtcttgccctcagtcagaggatatgtggatcgagtatcttcgcatggagcttacctaccttaacaagctcaaggctcgaaaggttgctcttggagaggatgtcaagacgctgcaaaagaaagacaacgatgcgagccagtggaaagaggaaaacaaggaactgttcatgccactgaatgaacaggtcaaagatcctaaggagccaggctcggctggagatgccctggaggagaaggaagacctgttttggcgtcaagggttgttaatcattcagaccatatatcatggtgccgtggaagctcttccgtcaagcttaaccttgcggaagaaattcttggagatactaaacagtgttgacttggcacattctgatgagttaaaactggaggtcctggatgaccttaagagagatttctctcatagcgaggactactgggattggtttgctaggcttcagcttagcaacttgaacagttccagtaattcgaatagaaaggatgctatatcaaacaagttgaacagatcaattcaggtgtatgacgaagctatcaggaagctaccaaattccaaaatgtactcattgtatgcaaagttttggatggatgttatatatactgacagagaagattcagtcacattattccaggattctgaatttgatgcttcagagttcacttcatccatactgaaagtttatgaaaatgcagaatcatgtggatgtcttactgaggatcttgcttgccaatacatatcactttacttgaaactagaaagactggaggaagctaagactctcgcagaaaagctttgtgatggtcctctttcaaatgctgcaaatttgtggagcctgagatttactatggagataaattcaattgcaactgctcctggcagttcttccttgagcaaggagaacctgagctctctgcttgatctatttagcactgtactctccaagttgtctgtaactgaggctgagagactgtggcatatggccatgaagttgttttcccatgataaggtctgtttcgagaagctggtgaagtgtgcgatgctatcattaagtctggcaggtggcagtgattcaggagcatcagtttcttctgctatcgttggatggtatttgcaaagagatggtgtgaagcatgctaggaagatgtataagagattgcttgctttacctcggccaagcctcaagttcatgcaatactgcatagcgctggaggcgaaccttgcatcgctcggagacaacggcgccctcaaagatgctcggcggctatatgattcagcgctcgacctgtatccccaggaaagagaagtgtggcggagctactacgacctggagctgaagatgggaacatcggagtctgccaacgccgtgtactcgcgctctcgtaaggtgctgggtgactccactgccttgactgctccccggggctaggtcgcagcatgcaatgtattccaagatgcaatgtgattttttttgtttggatctgtgttttccaatcctctctgagtctgggtcagcaagcaattaagctgatgcatcgaaattttggctctaaatgggagacctacaatgtgctgctggggaacactgtatatcttgttcaaaaaacaagagtactgcagctgctggtggctgtctcctttgagaacacttgcctgtgtcccttttctttctttttcttttttgtttgagcagtagctgggctgttggtgatgctgttccttagtgttgaggtgctatggtgtaacagtgtcaattgcgacgtgaacaaattctgggatctcgaaccatttgttgagattttgaaagtgtactggtggtcataatttttgttgggacctcgaaccatttttttagattttgatgtgttccttttatttatttattttttgtatggttcatggatgagccacatttgcttttgtgtcagtcttgctgcagattcctggtattaataaattagatgaattatgatgatttggattgttatttccttggttttttttttgttctcctgcttgcgtttttgttctac

SEQ ID NO: 23588 - DNA, 2805 bp, Zea Mays
ccaccaccgcggcggcgcgagcgtcactgccctgccctctcctcctcctgtcctactgctctaccgtcctctcccccccgcgccgctgccgcaaccaaaaccctaaaagtcgctttctatccacttgctccgccgcctccaccaccgggcgccatggcggacacagtgcagtaccgcctggagcggatgaccgacgaactggacgacctggagcgccggggcctcttcacgcgcggcgagctagctgacgtcgtccgcaaacgccgcgacttcgagtaccgcctccgccgccactccccgctccgccaggactttctcgactacatcgcctacgagctccgcctcgactccctccgcaacctccgcaagcgcgccatcatacgcgccgccgccgaagacgacgacgacgagcctcagcacgacgctcgcagcagcgacgacgagggaggccggaggaagaggaagaaggataaatccaagaagaagtggaagaagtccgtctccgacgtcgcgggcgtcctccgcgtcctcgacatctaccggatggccaccgtcaggttcaagggcgatctcgacctctggttccggtacctcgagttctgccgcgacaagcgacacggcaggatgaagcaggttctggcacaagccattcgcttccatcccaaggttcctgggctttggatctatgcagcagcatgggaattcgatcagaacctgaacgttgccgcggcacgtgcactgatgcagagcggtctcaggtcttgccctcagtcagaggatatgtggatcgagtatcttcgcatggagcttacctaccttaacaagctcaaggctcgaaaggttgctcttggagaggatgtcaagacgctgcaaaagaaagacaacgatgcgagccagtggaaagaggaaaacaaggaactgttcatgccactgaatgaacaggtcaaagatcctaaggagccaggctcggctggagatgccctggaggagaaggaagacctgttttggcgtcaagggttgttaatcattcagaccatatatcatggtgccgtggaagctcttccgtcaagcttaaccttgcggaagaaattcttggagatactaaacagtgttgacttggcacattctgatgagttaaaactggaggtcctggatgaccttaagagagatttctctcatagcgaggactactgggattggtttgctaggcttcagcttagcaacttgaacagttccagtaattcgaatagaaaggatgctatatcaaacaagttgaacagatcaattcagaggtgtatgacgaagctatcaggaagctaccaaattccaaaatgtactcattgtatgcaaagttttggatggatgttatatatactgacagagaagattcagtcacattattccaggattctgaatttgatgcttcagagttcacttcatccatactgaaagtttatgaaaatgcagaatcatgtggatgtcttactgaggatcttgcttgccaatacatatcactttacttgaaactagaaagactggaggaagctaagactctcgcagaaaagctttgtgatggtcctctttcaaatgctgcaaatttgtggagcctgagatttactatggagataaattcaattgcaactgctcctggcagttcttccttgagcaaggagaacctgagctctctgcttgatctatttagcactgtactctccaagttgtctgtaactgaggctgagagactgtggcatatggccatgaagttgttttcccatgataaggtctgtttcgagaagctggtgaagtgtgcgatgctatcattaagtctggcaggtggcagtgattcaggagcatcagtttcttctgctatcgttggatggtatttgcaaagagatggtgtgaagcatgctaggaagatgtataagagattgcttgctttacctcggccaagcctcaagttcatgcaatactgcatagcgctggaggcgaaccttgcatcgctcggagacaacggcgccctcaaagatgctcggcggctatatgattcagcgctcgacctgtatccccaggaaagagaagtgtggcggagctactacgacctggagctgaagatgggaacatcggagtctgccaacgccgtgtactcgcgctctcgtaaggtgctgggtgactccactgccttgactgctccccggggctaggtcgcagcatgcaatgtattccaagatgcaatgtgattttttttgtttggatctgtgttttccaatcctctctgagtctgggtcagcaagcaattaagctgatgcatcgaaattttggctctaaatgggagacctacaatgtgctgctggggaacactgtatatcttgttcaaaaaacaagagtactgcagctgctggtggctgtctcctttgagaacacttgcctgtgtcccttttctttctttttcttttttgtttgagcagtagctgggctgttggtgatgctgttccttagtgttgaggtgctatggtgtaacagtgtcaattgcgacgtgaacaaattctgggatctcgaaccatttgttgagattttgaaagtgtactggtggtcataatttttgttgggacctcgaaccatttttttagattttgatgtgttccttttatttatttattttttgtatggttcatggatgagccacatttgcttttgtgtcagtcttgctgcagattcctggtattaataaattagatgaattatgatgatttggattgttatttccttggttttttttttgttctcctgcttgcgtttttgttctac

SEQ ID NO: 23589 - DNA, 2804 bp, Zea Mays
ccaccaccgcggcggcgcgagcgtcactgccctgccctctcctcctcctgtcctactgctctaccgtcctctcccccccgcgccgctgccgcaaccaaaaccctaaaagtcgctttctatccacttgctccgccgcctccaccaccgggcgccatggcggacacagtgcagtaccgcctggagcggatgaccgacgaactggacgacctggagcgccggggcctcttcacgcgcggcgagctagctgacgtcgtccgcaaacgccgcgacttcgagtaccgcctccgccgccactccccgctccgccaggactttctcgactacatcgcctacgagctccgcctcgactccctccgcaacctccgcaagcgcgccatcatacgcgccgccgccgaagacgacgacgacgagcctcagcacgacgctcgcagcagcgacgacgagggaggccggaggaagaggaagaaggataaatccaagaagaagtggaagaagtccgtctccgacgtcgcgggcgtcctccgcgtcctcgacatctaccggatggccaccgtcaggttcaagggcgatctcgacctctggttccggtacctcgagttctgccgcgacaagcgacacggcaggatgaagcaggttctggcacaagccattcgcttccatcccaaggttcctgggctttggatctatgcagcagcatgggaattcgatcagaacctgaacgttgccgcggcacgtgcactgatgcagagcggtctcaggtcttgccctcagtcagaggatatgtggatcgagtatcttcgcatggagcttacctaccttaacaagctcaaggctcgaaaggttgctcttggagaggatgtcaagacgctgcaaaagaaagacaacgatgcgagccagtggaaagaggaaaacaaggaactgttcatgccactgaatgaacaggtcaaagatcctaaggagccaggctcggctggagatgccctggaggagaaggaagacctgttttggcgtcaagggttgttaatcattcagaccatatatcatggtgccgtggaagctcttccgtcaagcttaaccttgcggaagaaattcttggagatactaaacagtgttgacttggcacattctgatgagttaaaactggaggtcctggatgaccttaagagagatttctctcatagcgaggactactgggattggtttgctaggcttcagcttagcaacttgaacagttccagtaattcgaatagaaaggatgctatatcaaacaagttgaacagatcaattcagggtgtatgacgaagctatcaggaagctaccaaattccaaaatgtactcattgtatgcaaagttttggatggatgttatatatactgacagagaagattcagtcacattattccaggattctgaatttgatgcttcagagttcacttcatccatactgaaagtttatgaaaatgcagaatcatgtggatgtcttactgaggatcttgcttgccaatacatatcactttacttgaaactagaaagactggaggaagctaagactctcgcagaaaagctttgtgatggtcctctttcaaatgctgcaaatttgtggagcctgagatttactatggagataaattcaattgcaactgctcctggcagttcttccttgagcaaggagaacctgagctctctgcttgatctatttagcactgtactctccaagttgtctgtaactgaggctgagagactgtggcatatggccatgaagttgttttcccatgataaggtctgtttcgagaagctggtgaagtgtgcgatgctatcattaagtctggcaggtggcagtgattcaggagcatcagtttcttctgctatcgttggatggtatttgcaaagagatggtgtgaagcatgctaggaagatgtataagagattgcttgctttacctcggccaagcctcaagttcatgcaatactgcatagcgctggaggcgaaccttgcatcgctcggagacaacggcgccctcaaagatgctcggcggctatatgattcagcgctcgacctgtatccccaggaaagagaagtgtggcggagctactacgacctggagctgaagatgggaacatcggagtctgccaacgccgtgtactcgcgctctcgtaaggtgctgggtgactccactgccttgactgctccccggggctaggtcgcagcatgcaatgtattccaagatgcaatgtgattttttttgtttggatctgtgttttccaatcctctctgagtctgggtcagcaagcaattaagctgatgcatcgaaattttggctctaaatgggagacctacaatgtgctgctggggaacactgtatatcttgttcaaaaaacaagagtactgcagctgctggtggctgtctcctttgagaacacttgcctgtgtcccttttctttctttttcttttttgtttgagcagtagctgggctgttggtgatgctgttccttagtgttgaggtgctatggtgtaacagtgtcaattgcgacgtgaacaaattctgggatctcgaaccatttgttgagattttgaaagtgtactggtggtcataatttttgttgggacctcgaaccatttttttagattttgatgtgttccttttatttatttattttttgtatggttcatggatgagccacatttgcttttgtgtcagtcttgctgcagattcctggtattaataaattagatgaattatgatgatttggattgttatttccttggttttttttttgttctcctgcttgcgtttttgttctac

SEQ ID NO: 23590 - DNA, 1518 bp, Zea Mays
gccggttaggacagcacgagtggcccattcctagtccctcatcctctctcctccctcctcctccatttaccacctggtggtcagtcagtcacccaccccacaccgccgccgggaacttgttcatcgagccgagaggatagatagatagatagatagatagatagatagggtaaccgatcgaatccgccaaccaaacaatggcgtccgacggcagtggcgtggtgacggtgtacggcaacaacggcgcggcgctgctggagccgccgaagcagcccaagtcgtcgactttctccgtgaaggtgggcctggcgcagatgctccgcggcggtgtgatcatggacgtggtgaccccggagcaggcccgcctcgccgaggaggccggcgcctgcgccgtgatggcgctggagcgtgtccccgccgacatccgcgcgcagggtggcgtggcgcgcatgtcggacccgggcctgatccgcgacatcaagcgcgccgtgaccatccccgtcatggccaaggcccgcatcgggcacttcgtggaggcgcagatcctggaggccgtgggcgtggactacgtggacgagagcgaggtgctgaccccggccgacgacgcccaccacatcaacaagcacaacttccgcgtgcccttcgtgtgcggctgccgcgacctcggcgaggcgctgcgcagggtccgcgagggcgccgccatgatccgcaccaagggggaggccggcacgggcaacgtcgtggaggcggtgcgccacgtgcgctccgtcgcgggcgccgtccgcgcgctccgcggcatggacgacgacgaggtgttcgcctacgccaagcgcatcgccgcgccctacgacctggtcatgcagaccaagcagctggggcggctccccgtcgtgcagttcgcggcggggggcgtggccacgcccgccgacgccgcgctcatgatgcagctcggctgcgacggcgtcttcgtcggctccggcatcttcaagagcggcgaccccgcgcgccgcgcccgcgccatcgtccaggcggtcacccactacagcgaccccaccatcctgaccgacgtcagcgcggggctcggggaggccatggtcggcatcaacctcaacgacccaaagggtgcttgaggagaggagacgttgtctaactagtgagatggtggagaccttgacatgtttgaaggattggcagatgggcgacgatcgagaacagcacaacttggagaatccagagcttcaacaagccttcgagaatcagtatctagatggtgatggtgatgataatcaagatgctcaacctgttattgttgcctagtgtgcatgtggccgtgtaggattttatcattgtatctgtatttcgtatgtatggctgtattactcaactaaactctcgaaacattgaactgattactatttttgagctggttgtactcttttcccttctgaccaaaggtttttaatgaggcagccacaaaacagctcaattttatttggtcatatatgttctgtacctgag

SEQ ID NO: 23591 - DNA, 5282 bp, Zea Mays
ggcccattcctagtccctcatcctctctcctccctcctcctccatttaccacctggtggtcagtcagtcacccaccccacaccgccgccgggaacttgttcatcgagccgagaggatagatagatagatagatagatagatagatagggtaaccgatcgaatccgccaaccaaacaatggcgtccgacggcagtggcgtggtgacggtgtacggcaacaacggcgcggcgctgctggagccgccgaagcagcccaagtcgtcgactttctccgtgaaggtgggcctggcgcagatgctccgcggcggtgtgatcatggacgtggtgaccccggagcaggcccgcctcgccgaggaggccggcgcctgcgccgtgatggcgctggagcgtgtccccgccgacatccgcgcgcagggtggcgtggcgcgcatgtcggacccgggcctgatccgcgacatcaagcgcgccgtgaccatccccgtcatggccaaggcccgcatcgggcacttcgtggaggcgcagatcctggaggccgtgggcgtggactacgtggacgagagcgaggtgctgaccccggccgacgacgcccaccacatcaacaagcacaacttccgcgtgcccttcgtgtgcggctgccgcgacctcggcgaggcgctgcgcagggtccgcgagggcgccgccatgatccgcaccaagggggaggccggcacgggcaacgtcgtggaggcggtgcgccacgtgcgctccgtcgcgggcgccgtccgcgcgctccgcggcatggacgacgacgaggtgttcgcctacgccaagcgcatcgccgcgccctacgacctggtcatgcagaccaagcagctggggcggctccccgtcgtgcagttcgcggcggggggcgtggccacgcccgccgacgccgcgctcatgatgcagctcggctgcgacggcgtcttcgtcggctccggcatcttcaagagcggcgaccccgcgcgccgcgcccgcgccatcgtccaggcggtcacccactacagcgaccccaccatcctgaccgacgtcagcgcggggctcggggaggccatggtcggcatcaacctcaacgacccaaagtagcttaagtaataatggaatgagtgaatgaaatggtgacaaacgaagccagaagctctgtaattttatgccgttcttattaagtttgcataggctcccctggattatgaatcagtcactcagcctgcttatgacttacgaatcacatgcttttcatctggtcggattgtatttctttcttgtggcaacaagtgaagtagctgtgccgaactgtgagcaactttttgctgaatctgaaatcaagataagaagcggcaatgggtcagaacaatgagaatagaatggattgcagcgcatatgtcaaaagtaagcttggtatttgaagtgctggatgcatagaaaccataaaaattgactcaacgaactgacagagcaactcttgttctgtacttagttataaaattgactgatcaatccattcgattgctgatgcataggctccccttagaaccaagcatgtacgtgtcaggcgcacatgccgcttcatcttcatctttgctagaaaaggcagatcgatacaactcaactcattaggattcatttacaaagcaaatattgcatcagctaatagctagtagcaaattttgtgtctaaccacacaacatgtaacttcccagcggtgtcattcttaccacatggcaagcaaacaaacaaatctggacaaagtcaatcttcatgatacaccttccgttctttttttatccttccgagcctctcccttgggcttgtgctcctctacctcctcggctaacttggtggtcagcaatgtcttgtgcgttgacgacaggattggaccctaatgcgagggaaacttgttactgatcgcccattatacagcagccaaacaataagaaagactgaaagagtaaagtacatttctgatcctttaaattgtgtcttttaaagacttaaggctcaaacgggctgtggtttcaccttacaaactagaactggcacatggactcacatgtcagcctctgtctcacttttctccgttctctcttacttgtccctgccgtcacctgttggtgccgatccgggcactaatcactgtgttgagaaccggcggcggtgctctctacacaggcgcagacggttcacgggcagagaccggacggtcagtgacctggagcagggctagggttccttgcctgatgatccgcgcgtgcgcaggggcggcggagttcgccgacggcgccaaaatctcgctcccgggagtataggtgtacatttaggctgtgcctaacaggccgacacaaagcacacaattttaggcacggcccaacctatttgcgggcccaggccggcctggcacaatgcatgggccgtgcctgggcctcaactcaagcacacgggccggcctggcacggcccatttaactaaggcacactaaagctcactaaacttaaaaaccctagtccctagcgatcctatccgtcgaccgtccgatccaacggccacttccccacccacacagacacgggcacacgaccatcagccacaccaattctatttggcgcggtttgggcgtttggcacaggcacaggcgcagcgcacagcaaaccctaatcctaaacggcggctctgcctgcgtcttccactcttcccgccgccgctcgctcaacgctcattccctactccctcgtcttcgcgctgccgctcgctgcaccgcctccggtctccctcttcttcgcgcggtcgcgccgcctccgtgtcccaaacggccagcgagcccgcgagcttcctcgacatcggcaatggcgcaaggaaatggaggtggcgccccgactccacttccccagctcggtgcacgggccacggccaccctgtatctacctcaacggcaagccacaacagcgtctaccgcagatccgactccgaatcatccgacctccattgaggatggcgctggtggcagttcttcgttcacgccaacgccgagtgcaagcccaactgttgtaggcagcagctcggacacaggtaacaagcgaggtaggaaaaccacctctgatgtgtggaatgacttcgagcaactctacaaacaagttaatggtaagaaagtcaggtatgcagcaaaatgtcactactgcaaatcacagttaactgctaagggtggtacaggtcatttgcatcgacatcgtattgcttgtgcatctaaagctgaccgtgcaagtaggccacaatctttacttcagtttaatggtgatggttctgtgcgttcatgggattataatgctgctactgctcgtactgaaatgtgtcgtttgattgctactttagatcttcctttgggttttggtggtcatcctgcttttgaacgttacattagacgctctcataatcctaggttccgttctgtgtgtagacagacaacgactagagatcttgttaagtttttcaagcaacgtcgtaccgtgttgattgatctattgcaatctagtgtgtcatctgttgcactcacatctgatatatggtctggtaatgcgaaggaagattatattagtgttgttgcccattttgttaatgttgattggttgttagagaaaagagtcattggaatgaggcttattgatgtttcgcatagtggctctaatattgcagagcgggttgcaactgttgttgaagagtttaagttgattgataaggttttttctgttactctagataatgcatcagctaattctaatgctatgaacatccttgcaccaagattctctggttatgttggttctctattcttgcatcagagatgtgcatgtcacataattaatctcattgtaaaatctggtttgaagcgtttgaaaccttatgttgaagatttcagaactgcaatatcatttttaaatgcttccaaccaacgcatcgctgcatataaatcttattgtgttgctatggatgttcgtcctcgcaaatttggtttggatatggatgttagatggaactctacatatctaatgctaaaacatgtcattccatataagaccacattctctgtttttatccaaacacactatcagcaggtgatgggtcaaacattacttacacaagcacattgggagattggtgagaaaattctaacctttcttgagttgttttatgattcaactgttgctctatccggaatttattatccaacctctcctcttatgttgcaccatattattgagattgcttctcatctgagcaactatgagaacgatatattgcttagagatattgttgtgcctatgaaatctaaatttcttaagtactagaaaaacattcctatactatattcatttgcttttgtcttagaccctagagctaaactcagaggtttcaacagtgcactccagtttctttctaatgtgacttttactgattactctgattattacaataacgtgcgtactgagttatctaatgtttttgccaagtatgatagcaaatttggtggcaccaggttgcaaagggcaactcaatccgtaagtactagcaaagtgaaatctgcttggggtaagatttatggtacttcatcttctaacactggaactactactacttctgttggccatacttcttcgccttctaatttttgtccagtctctgagttgtccatgtatgttggcagtgatccaattactatgtttgatgatgattttgatattcttagttggtggcgtgagcataagaatacataccctattctctccattttagctaaggatgttctaactgtacctggatgttgtaactgtacctgtttcaactattagctctgaatctgtttttagtcttactggcagggtgcttgaggagaggagacgttgtctaactagtgagatggtggagaccttgacatgtttgaaggattggcagatgggcgacgatcgagaacagcacaacttggagaatccagagcttcaacaagccttcgagaatcagtatctagatggtgatggtgatgataatcaagatgctcaacctgttattgttgcctagtgtgcatgtggccgtgtaggattttatcattgtatctgtatttcgtatgtatggctgtattactcaactaaactctcgaaacattgaactgattactatttttgagctggttgtactcttttcccttctgaccaaaggtttttaatgaggcagccacaaaacagctcaattttatttggtcatatatgttctgtacctgag

SEQ ID NO: 23592 - DNA, 5108 bp, Zea Mays
cccattcctagtccctcatcctctctcctccctcctcctccatttaccacctggtggtcagtcagtcacccaccccacaccgccgccgggaacttgttcatcgagccgagaggatagatagatagatagatagatagatagatagggtaaccgatcgaatccgccaaccaaacaatggcgtccgacggcagtggcgtggtgacggtgtacggcaacaacggcgcggcgctgctggagccgccgaagcagcccaagtcgtcgactttctccgtgaaggtgggcctggcgcagatgctccgcggcggtgtgatcatggacgtggtgaccccggagcaggcccgcctcgccgaggaggccggcgcctgcgccgtgatggcgctggagcgtgtccccgccgacatccgcgcgcagggtggcgtggcgcgcatgtcggacccgggcctgatccgcgacatcaagcgcgccgtgaccatccccgtcatggccaaggcccgcatcgggcacttcgtggaggcgcagatcctggaggccgtgggcgtggactacgtggacgagagcgaggtgctgaccccggccgacgacgcccaccacatcaacaagcacaacttccgcgtgcccttcgtgtgcggctgccgcgacctcggcgaggcgctgcgcagggtccgcgagggcgccgccatgatccgcaccaagggggaggccggcacgggcaacgtcgtggaggcggtgcgccacgtgcgctccgtcgcgggcgccgtccgcgcgctccgcggcatggacgacgacgaggtgttcgcctacgccaagcgcatcgccgcgccctacgacctggtcatgcagaccaagcagctggggcggctccccgtcgtgcagttcgcggcggggggcgtggccacgcccgccgacgccgcgctcatgatgcagctcggctgcgacggcgtcttcgtcggctccggcatcttcaagagcggcgaccccgcgcgccgcgcccgcgccatcgtccaggcggtcacccactacagcgaccccaccatcctgaccgacgtcagcgcggggctcggggaggccatggtcggcatcaacctcaacgacccaaaggtggagcgatacgccgccagatccgagtgaacacttccctttcctactccacttatatttatcagtatcatctccgctccgccggctctgccaacaaatttttttgcactgcatgcagtagcttaagtaataatggaatgagtgaatgaaatggtgacaaacgaagccagaagctctgtaattttatgccgttcttattaagtttgcataggctcccctggattatgaatcagtcactcagcctgcttatgacttacgaatcacatgcttttcatctggtcggattgtatttctttcttgtggcaacaagtgaagtagctgtgccgaactgtgagcaactttttgctgaatctgaaatcaagataagaagcggcaatgggtcagaacaatgagaatagaatggattgcagcgcatatgtcaaaagtaagcttggtatttgaagtgctggatgcatagaaaccataaaaattgactcaacgaactgacagagcaactcttgttctgtacttagttataaaattgactgatcaatccattcgattgctgatgcataggctccccttagaaccaagcatgtacgtgtcaggcgcacatgccgcttcatcttcatctttgctagaaaaggcagatcgatacaactcaactcattaggattcatttacaaagcaaatattgcatcagctaatagctagtagcaaattttgtgtctaaccacacaacatgtaacttcccagcggtgtcattcttaccacatggcaagcaaacaaacaaatctggacaaagtcaatcttcatgatacaccttccgttctttttttatccttccgagcctctcccttgggcttgtgctcctctacctcctcggctaacttggtggtcagcaatgtcttgtgcgttgacgacaggattggaccctaatgcgagggaaacttgttactgatcgcccattatacagcagccaaacaataagaaagactgaaagagtaaagtacatttctgatcctttaaattgtgtcttttaaagacttaaggctcaaacgggctgtggtttcaccttacaaactagaactggcacatggactcacatgtcagcctctgtctcacttttctccgttctctcttacttgtccctgccgtcacctgttggtgccgatccgggcactaatcactgtgttgagaaccggcggcggtgctctctacacaggcgcagacggttcacgggcagagaccggacggtcagtgacctggagcagggctagggttccttgcctgatgatccgcgcgtgcgcaggggcggcggagttcgccgacggcgccaaaatctcgctcccgggagtataggtgtacatttaggctgtgcctaacaggccgacacaaagcacacaattttaggcacggcccaacctatttgcgggcccaggccggcctggcacaatgcatgggccgtgcctgggcctcaactcaagcacacgggccggcctggcacggcccatttaactaaggcacactaaagctcactaaacttaaaaaccctagtccctagcgatcctatccgtcgaccgtccgatccaacggccacttccccacccacacagacacgggcacacgaccatcagccacaccaattctatttggcgcggtttgggcgtttggcacaggcacaggcgcagcgcacagcaaaccctaatcctaaacggcggctctgcctgcgtcttccactcttcccgccgccgctcgctcaacgctcattccctactccctcgtcttcgcgctgccgctcgctgcaccgcctccggtctccctcttcttcgcgcggtcgcgccgcctccgtgtcccaaacggccagcgagcccgcgagcttcctcgacatcggcaatggcgcaaggaaatggaggtggcgccccgactccacttccccagctcggtgcacgggccacggccaccctgtatctacctcaacggcaagccacaacagcgtctaccgcagatccgactccgaatcatccgacctccattgaggatggcgctggtggcagttcttcgttcacgccaacgccgagtgcaagcccaactgttgtaggcagcagctcggacacaggtaacaagcgaggtaggaaaaccacctctgatgtgtggaatgacttcgagcaactctacaaacaagttaatggtaagaaagtcaggtatgcagcaaaatgtcactactgcaaatcacagttaactgctaagggtggtacaggtcatttgcatcgacatcgtattgcttgtgcatctaaagctgaccgtgcaagtaggccacaatctttacttcagtttaatggtgatggttctgtgcgttcatgggattataatgctgctactgctcgtactgaaatgtgtcgtttgattgctactttagatcttcctttgggttttggtggtcatcctgcttttgaacgttacattagacgctctcataatcctaggttccgttctgtgtgtagacagacaacgactagagatcttgttaagtttttcaagcaacgtcgtaccgtgttgattgatctattgcaatctagtgtgtcatctgttgcactcacatctgatatatggtctggtaatgcgaaggaagattatattagtgttgttgcccattttgttaatgttgattggttgttagagaaaagagtcattggaatgaggcttattgatgtttcgcatagtggctctaatattgcagagcgggttgcaactgttgttgaagagtttaagttgattgataaggttttttctgttactctagataatgcatcagctaattctaatgctatgaacatccttgcaccaagattctctggttatgttggttctctattcttgcatcagagatgtgcatgtcacataattaatctcattgtaaaatctggtttgaagcgtttgaaaccttatgttgaagatttcagaactgcaatatcatttttaaatgcttccaaccaacgcatcgctgcatataaatcttattgtgttgctatggatgttcgtcctcgcaaatttggtttggatatggatgttagatggaactctacatatctaatgctaaaacatgtcattccatataagaccacattctctgtttttatccaaacacactatcagcaggtgatgggtcaaacattacttacacaagcacattgggagattggtgagaaaattctaacctttcttgagttgttttatgattcaactgttgctctatccggaatttattatccaacctctcctcttatgttgcaccatattattgagattgcttctcatctgagcaactatgagaacgatatattgcttagagatattgttgtgcctatgaaatctaaatttcttaagtactagaaaaacattcctatactatattcatttgcttttgtcttagaccctagagctaaactcagaggtttcaacagtgcactccagtttctttctaatgtgacttttactgattactctgattattacaataacgtgcgtactgagttatctaatgtttttgccaagtatgatagcaaatttggtggcaccaggttgcaaagggcaactcaatccgtaagtactagcaaagtgaaatctgcttgggggtgcttgaggagaggagacgttgtctaactagtgagatggtggagaccttgacatgtttgaaggattggcagatgggcgacgatcgagaacagcacaacttggagaatccagagcttcaacaagccttcgagaatcagtatctagatggtgatggtgatgataatcaagatgctcaacctgttattgttgcctagtgtgcatgtggccgtgtaggattttatcattgtatctgtatttcgtatgtatggctgtattactcaactaaactctcgaaacattgaactgattactatttttgagctggttgtactcttttcccttctgaccaaaggtttttaatgaggcagccacaaaacagctcaattttatttggtcatatatgttctgtacctgag

SEQ ID NO: 23593 - DNA, 3959 bp, Zea Mays
agtactagagggcccacccctacccctgcccccaaatcgccaaatcctccccaccaccgcacgctggtcctgcccgtctcccgcccccgccggccgccggcgactggccgccgccatgggctccgaccgcgccgagctcgcgcgcctctgcagcgcccgcaactggtccaaggccatccgcctcctcgactccatcctggcccgatccccctcctccatccacgacctctgcaaccgggccttctgctactcccagctcgagctccacaagcacgtcgtcaaggattgcgaccgcgcactgctgctcgaccccgccctgctgcaggcctacatcctcaaaggcaaggcactgtcttcattagataaaaaagaggatgctctagctgcttggaagcaaggatatgaaattgctgtccgtgacacaacagacttgaaacaattgcttgatctggaagaattggtttcttctgttaaaatttgcgggacaacccagtctgcggaccatgtcatggatgcatcaacttgtgataccaaagttgttatctcagaagatcgtgttgctgacacgtcgttcgctgcaactacaatggctgatacaaaaactgttgtctgtgaagaggccattggcagttccaaagtttcatcaaatggtgataccaagttgacgaattataataaaaaagcggaccataataaagtctctagcagttcagtgaaagacatcacagggactcaagctcccaagaaggcaccgaagctagataagaaaaacaaagcaaaagctgtgaaagaaataaatggccgagctgaaggtgtaactggcagagctagtactgatgaaagtgaaactatttcactggatcaagcactctttgctacaaaaatttcaaagtcatcaaaatctataagcttggatttccgactttcaagaggcattgcacaggtaaatgaaggaagatatgaccaggcgatatccatttttgatcagatattgcgggaaactcctacgtatcctgaagcactgattggaaggggcacagcttatgcatttcaaagagaattggattctgctatttctgatttcaccaaggctatacaatctagcccatcggctggggaggcatggaagcgacggggacaagctcgtgctgctttaggagagttcaaggaggccattgaagacttgactaaagcattggaatttgaaccaaattctcctgatattttacatgaaagaggttacttactcttgcactcatgtttgaattcttactagcaaagtgcccacacgttgttatggtttccatttatgcttgaatatagagtataaaacacaaatacatgtgtgttctcttggctgggtgggtgtgaatatgggtttggactttggagccaacaaccatagtttgaatctccatttgtgtatcattttagcttttttaccgttgaaatgtggaagtgaaggttaacgcaagggaaggggtgacacaagatgacgatggaaactgatgctttatatagagagattgccattgatgccacttgccatttctcgtatatcttttgatgggaacaaaacgacaccaagtctttatgctcacttcatgtctatacagaattgtgaacttcaaattcaaggactacaactctgcactcgaagatctttcgacatgtgtgaagcatgacaagaagaacagctccgctcacacttatttaggtcttactctttcagcacttggagagtacaagcgtgctgaagatgagcatgtcattggtttaaagtatgacgagagtttccttgactgttgggctcaccttgcccagctttatcttgatttggcatatccagagaagttgttgaattgccttgagaaagctattcaaattgattcaaggttcgcaaaagcttaccatctgcgtggaattctctaccatggaatgggtcgacataggagtgctattaaagaattatcggttgctttgacatatgaaagttcaagtatagagtgcctatacttacgtgcctcaagccatcatgcaattggagaatataaagctgcgataaaaggttatgatgatgtacttgatttggaacttgattccatggataaatttgtgttgcaatgtttgtccttctaccagaaggaaatggctctgtatattgcttcaaaggccaatttagagttctctcagttcaacattgatgatgatgttgacccactatttaaggaatactggtgcaaacgactacatcccaaaaatgtggctgaaaaggtttatcgccagccaccgttgcggatctcattgagaagtgggcgccttaacaagcaagacttcaaattcacaaagcatcaaacaactcttcttctagctgcagattcaattgggaagaagattcaatacaattgtcatggcttcttaccaaatcaacgtcagtaccgcatggccgggttggctgctattgagattgctcagaaagtgtccaaggcttggcgctttctaaggaatccgaagaacatcgcaaagttagttaggaaaagggataaacttaacatgagccagaacaggggaggttattgtagcactagcactttggctggatctccaacttccagcccaaatgaagacagggtctcctccgggatctctctttcctggcaggatgtctataacattgctgttaagtggagacaaatttctgaaccttgtgatccagttgtttgggtcaataagctaagtgaagagttcaattctggatttggttctcataccccaatgcttcttggtcaagcaaaagttattcgctactatccatattaccaaagagtcttggaaactgcgaagactataatgcttgacttgaagtatgtcaataatgcagaggaccgtgcaatttttcttacagatattgacaagttgaaaaagatagaaattgcatcgtcatgctcagatttgtaccatgtagttggtgagacctactgggttgctacaagatgtgatagtatggcgtttcgggggaggcgccttgaagggacaagaattaccactcaaaacataggcaagacaggatttgactttgcaattcgaacaccttgcacgccatcgagatgggaggagtatgatgaagaaatgactgcagcctgggaggctatttgtgaggcatattgtaatgacacaaaccccacacgagaccctggtgtgcttgatgctgtgaaggacgcgatattgcggatgacatattactggtacaattttatgcctctttcgagaggctcggctgttgttggctacgtagtgttgctcggtttattcctggcagcaaacatggatattactgccagcattccacccggtgtccaagttgattgggaggcgatcctgtctccagatcccggcacatttgttgacgccgtgaagccctggttgtacccatccacaaaaataagcaggtgcctgaaagattacacggacgtcagctgcgcgttcagcacgacaggttcggttgtagcggccctaacatctgttgacccataggttatttgtccaagtgttataggttgctccagttgttagtgtatttgtttcaaaatacctcagctttgcttagcttgtcagaatttctcagtttgcaaaaagtttgtatgtttctgtgttgtatacagatatgcagtaatgttgtaacttgaaaaaaaataagatttattttcattggaacaagttttttttttttttttgtaataaacagttaaacaccaataagttttgcagttacttcttggatgtttgtatgccatggtatatggtcttgaacacttagcctagaggatttccctcttatttatagagctattactcaaggccttgtggtatttgacatttatcagagtccataagcacgaatccactactttcaccatcatcattgactgacttcgagctctacacatacgcaagtcaag

SEQ ID NO: 23594 - DNA, 3280 bp, Zea Mays
agtactagagggcccacccctacccctgcccccaaatcgccaaatcctccccaccaccgcacgctggtcctgcccgtctcccgcccccgccggccgccggcgactggccgccgccatgggctccgaccgcgccgagctcgcgcgcctctgcagcgcccgcaactggtccaaggccatccgcctcctcgactccatcctggcccgatccccctcctccatccacgacctctgcaaccgggccttctgctactcccagctcgagctccacaagcacgtcgtcaaggattgcgaccgcgcactgctgctcgaccccgccctgctgcaggcctacatcctcaaaggcaaggcactgtcttcattagataaaaaagaggatgctctagctgcttggaagcaaggatatgaaattgctgtccgtgacacaacagacttgaaacaattgcttgatctggaagaattggtttcttctgttaaaatttgcgggacaacccagtctgcggaccatgtcatggatgcatcaacttgtgataccaaagttgttatctcagaagatcgtgttgctgacacgtcgttcgctgcaactacaatggctgatacaaaaactgttgtctgtgaagaggccattggcagttccaaagtttcatcaaatggtgataccaagttgacgaattataataaaaaagcggaccataataaagtctctagcagttcagtgaaagacatcacagggactcaagctcccaagaaggcaccgaagctagataagaaaaacaaagcaaaagctgtgaaagaaataaatggccgagctgaaggtgtaactggcagagctagtactgatgaaagtgaaactatttcactggatcaagcactctttgctacaaaaatttcaaagtcatcaaaatctataagcttggatttccgactttcaagaggcattgcacaggtaaatgaaggaagatatgaccaggcgatatccatttttgatcagatattgcgggaaactcctacgtatcctgaagcactgattggaaggggcacagcttatgcatttcaaagagaattggattctgctatttctgatttcaccaaggctatacaatctagcccatcggctggggaggcatggaagcgacggggacaagctcgtgctgctttaggagagttcaaggaggccattgaagacttgactaaagcattggaatttgaaccaaattctcctgatattttacatgaaagaggaattgtgaacttcaaattcaaggactacaactctgcactcgaagatctttcgacatgtgtgaagcatgacaagaagaacagctccgctcacacttatttaggtcttactctttcagcacttggagagtacaagcgtgctgaagatgagcatgtcattggtttaaagtatgacgagagtttccttgactgttgggctcaccttgcccagctttatcttgatttggcatatccagagaagttgttgaattgccttgagaaagctattcaaattgattcaaggttcgcaaaagcttaccatctgcgtggaattctctaccatggaatgggtcgacataggagtgctattaaagaattatcggttgctttgacatatgaaagttcaagtatagagtgcctatacttacgtgcctcaagccatcatgcaattggagaatataaagctgcgataaaaggttatgatgatgtacttgatttggaacttgattccatggataaatttgtgttgcaatgtttgtccttctaccagaaggaaatggctctgtatattgcttcaaaggccaatttagagttctctcagttcaacattgatgatgatgttgacccactatttaaggaatactggtgcaaacgactacatcccaaaaatgtggctgaaaaggtttatcgccagccaccgttgcggatctcattgagaagtgggcgccttaacaagcaagacttcaaattcacaaagcatcaaacaactcttcttctagctgcagattcaattgggaagaagattcaatacaattgtcatggcttcttaccaaatcaacgtcagtgaagagttcaattctggatttggttctcataccccaatgcttcttggtcaagcaaaagttattcgctactatccatattaccaaagagtcttggaaactgcgaagactataatgcttgacttgaagtatgtcaataatgcagaggaccgtgcaatttttcttacagatattgacaagttgaaaaagatagaaattgcatcgtcatgctcagatttgtaccatgtagttggtgagacctactgggttgctacaagatgtgatagtatggcgtttcgggggaggcgccttgaagggacaagaattaccactcaaaacataggcaagacaggatttgactttgcaattcgaacaccttgcacgccatcgagatgggaggagtatgatgaagaaatgactgcagcctgggaggctatttgtgaggcatattgtaatgacacaaaccccacacgagaccctggtgtgcttgatgctgtgaaggacgcgatattgcggatgacatattactggtacaattttatgcctctttcgagaggctcggctgttgttggctacgtagtgttgctcggtttattcctggcagcaaacatggatattactgccagcattccacccggtgtccaagttgattgggaggcgatcctgtctccagatcccggcacatttgttgacgccgtgaagccctggttgtacccatccacaaaaataagcaggtgcctgaaagattacacggacgtcagctgcgcgttcagcacgacaggttcggttgtagcggccctaacatctgttgacccataggttatttgtccaagtgttataggttgctccagttgttagtgtatttgtttcaaaatacctcagctttgcttagcttgtcagaatttctcagtttgcaaaaagtttgtatgtttctgtgttgtatacagatatgcagtaatgttgtaacttgaaaaaaaataagatttattttcattggaacaagttttttttttttttttgtaataaacagttaaacaccaataagttttgcagttacttcttggatgtttgtatgccatggtatatggtcttgaacacttagcctagaggatttccctcttatttatagagctattactcaaggccttgtggtatttgacatttatcagagtccataagcacgaatccactactttcaccatcatcattgactgacttcgagctctacacatacgcaagtcaag

SEQ ID NO: 23595 - DNA, 3582 bp, Zea Mays
agtactagagggcccacccctacccctgcccccaaatcgccaaatcctccccaccaccgcacgctggtcctgcccgtctcccgcccccgccggccgccggcgactggccgccgccatgggctccgaccgcgccgagctcgcgcgcctctgcagcgcccgcaactggtccaaggccatccgcctcctcgactccatcctggcccgatccccctcctccatccacgacctctgcaaccgggccttctgctactcccagctcgagctccacaagcacgtcgtcaaggattgcgaccgcgcactgctgctcgaccccgccctgctgcaggcctacatcctcaaaggcaaggcactgtcttcattagataaaaaagaggatgctctagctgcttggaagcaaggatatgaaattgctgtccgtgacacaacagacttgaaacaattgcttgatctggaagaattggtttcttctgttaaaatttgcgggacaacccagtctgcggaccatgtcatggatgcatcaacttgtgataccaaagttgttatctcagaagatcgtgttgctgacacgtcgttcgctgcaactacaatggctgatacaaaaactgttgtctgtgaagaggccattggcagttccaaagtttcatcaaatggtgataccaagttgacgaattataataaaaaagcggaccataataaagtctctagcagttcagtgaaagacatcacagggactcaagctcccaagaaggcaccgaagctagataagaaaaacaaagcaaaagctgtgaaagaaataaatggccgagctgaaggtgtaactggcagagctagtactgatgaaagtgaaactatttcactggatcaagcactctttgctacaaaaatttcaaagtcatcaaaatctataagcttggatttccgactttcaagaggcattgcacaggtaaatgaaggaagatatgaccaggcgatatccatttttgatcagatattgcgggaaactcctacgtatcctgaagcactgattggaaggggcacagcttatgcatttcaaagagaattggattctgctatttctgatttcaccaaggctatacaatctagcccatcggctggggaggcatggaagcgacggggacaagctcgtgctgctttaggagagttcaaggaggccattgaagacttgactaaagcattggaatttgaaccaaattctcctgatattttacatgaaagaggaattgtgaacttcaaattcaaggactacaactctgcactcgaagatctttcgacatgtgtgaagcatgacaagaagaacagctccgctcacacttatttaggtcttactctttcagcacttggagagtacaagcgtgctgaagatgagcatgtcattggtttaaagtatgacgagagtttccttgactgttgggctcaccttgcccagctttatcttgatttggcatatccagagaagttgttgaattgccttgagaaagctattcaaattgattcaaggttcgcaaaagcttaccatctgcgtggaattctctaccatggaatgggtcgacataggagtgctattaaagaattatcggttgctttgacatatgaaagttcaagtatagagtgcctatacttacgtgcctcaagccatcatgcaattggagaatataaagctgcgataaaaggttatgatgatgtacttgatttggaacttgattccatggataaatttgtgttgcaatgtttgtccttctaccagaaggaaatggctctgtatattgcttcaaaggccaatttagagttctctcagttcaacattgatgatgatgttgacccactatttaaggaatactggtgcaaacgactacatcccaaaaatgtggctgaaaaggtttatcgccagccaccgttgcggatctcattgagaagtgggcgccttaacaagcaagacttcaaattcacaaagcatcaaacaactcttcttctagctgcagattcaattgggaagaagattcaatacaattgtcatggcttcttaccaaatcaacgtcagtaccgcatggccgggttggctgctattgagattgctcagaaagtgtccaaggcttggcgctttctaaggaatccgaagaacatcgcaaagttagttaggaaaagggataaacttaacatgagccagaacaggggaggttattgtagcactagcactttggctggatctccaacttccagcccaaatgaagacagggtctcctccgggatctctctttcctggcaggatgtctataacattgctgttaagtggagacaaatttctgaaccttgtgatccagttgtttgggtcaataagctaagtgaagagttcaattctggatttggttctcataccccaatgcttcttggtcaagcaaaagttattcgctactatccatattaccaaagagtcttggaaactgcgaagactataatgcttgacttgaagtatgtcaataatgcagaggaccgtgcaatttttcttacagatattgacaagttgaaaaagatagaaattgcatcgtcatgctcagatttgtaccatgtagttggtgagacctactgggttgctacaagatgtgatagtatggcgtttcgggggaggcgccttgaagggacaagaattaccactcaaaacataggcaagacaggatttgactttgcaattcgaacaccttgcacgccatcgagatgggaggagtatgatgaagaaatgactgcagcctgggaggctatttgtgaggcatattgtaatgacacaaaccccacacgagaccctggtgtgcttgatgctgtgaaggacgcgatattgcggatgacatattactggtacaattttatgcctctttcgagaggctcggctgttgttggctacgtagtgttgctcggtttattcctggcagcaaacatggatattactgccagcattccacccggtgtccaagttgattgggaggcgatcctgtctccagatcccggcacatttgttgacgccgtgaagccctggttgtacccatccacaaaaataagcaggtgcctgaaagattacacggacgtcagctgcgcgttcagcacgacaggttcggttgtagcggccctaacatctgttgacccataggttatttgtccaagtgttataggttgctccagttgttagtgtatttgtttcaaaatacctcagctttgcttagcttgtcagaatttctcagtttgcaaaaagtttgtatgtttctgtgttgtatacagatatgcagtaatgttgtaacttgaaaaaaaataagatttattttcattggaacaagttttttttttttttttgtaataaacagttaaacaccaataagttttgcagttacttcttggatgtttgtatgccatggtatatggtcttgaacacttagcctagaggatttccctcttatttatagagctattactcaaggccttgtggtatttgacatttatcagagtccataagcacgaatccactactttcaccatcatcattgactgacttcgagctctacacatacgcaagtcaag

SEQ ID NO: 23596 - DNA, 3364 bp, Zea Mays
agtactagagggcccacccctacccctgcccccaaatcgccaaatcctccccaccaccgcacgctggtcctgcccgtctcccgcccccgccggccgccggcgactggccgccgccatgggctccgaccgcgccgagctcgcgcgcctctgcagcgcccgcaactggtccaaggccatccgcctcctcgactccatcctggcccgatccccctcctccatccacgacctctgcaaccgggccttctgctactcccagctcgagctccacaagcacgtcgtcaaggattgcgaccgcgcactgctgctcgaccccgccctgctgcaggcctacatcctcaaaggcaaggcactgtcttcattagataaaaaagaggatgctctagctgcttggaagcaaggatatgaaattgctgtccgtgacacaacagacttgaaacaattgcttgatctggaagaattggtttcttctgttaaaatttgcgggacaacccagtctgcggaccatgtcatggatgcatcaacttgtgataccaaagttgttatctcagaagatcgtgttgctgacacgtcgttcgctgcaactacaatggctgatacaaaaactgttgtctgtgaagaggccattggcagttccaaagtttcatcaaatggtgataccaagttgacgaattataataaaaaagcggaccataataaagtctctagcagttcagtgaaagacatcacagggactcaagctcccaagaaggcaccgaagctagataagaaaaacaaagcaaaagctgtgaaagaaataaatggccgagctgaaggtgtaactggcagagctagtactgatgaaagtgaaactatttcactggatcaagcactctttgctacaaaaatttcaaagtcatcaaaatctataagcttggatttccgactttcaagaggcattgcacaggtaaatgaaggaagatatgaccaggcgatatccatttttgatcagatattgcgggaaactcctacgtatcctgaagcactgattggaaggggcacagcttatgcatttcaaagagaattggattctgctatttctgatttcaccaaggctatacaatctagcccatcggctggggaggcatggaagcgacggggacaagctcgtgctgctttaggagagttcaaggaggccattgaagacttgactaaagcattggaatttgaaccaaattctcctgatattttacatgaaagaggaattgtgaacttcaaattcaaggactacaactctgcactcgaagatctttcgacatgtgtgaagcatgacaagaagaacagctccgctcacacttatttaggtcttactctttcagcacttggagagtacaagcgtgctgaagatgagcatgtcattggtttaaagtatgacgagagtttccttgactgttgggctcaccttgcccagctttatcttgatttggcatatccagagaagttgttgaattgccttgagaaagctattcaaattgattcaaggttcgcaaaagcttaccatctgcgtggaattctctaccatggaatgggtcgacataggagtgctattaaagaattatcggttgctttgacatatgaaagttcaagtatagagtgcctatacttacgtgcctcaagccatcatgcaattggagaatataaagctgcgataaaaggttatgatgatgtacttgatttggaacttgattccatggataaatttgtgttgcaatgtttgtccttctaccagaaggaaatggctctgtatattgcttcaaaggccaatttagagttctctcagttcaacattgatgatgatgttgacccactatttaaggaatactggtgcaaacgactacatcccaaaaatgtggctgaaaaggtttatcgccagccaccgttgcggatctcattgagaagtgggcgccttaacaagcaagacttcaaattcacaaagcatcaaacaactcttcttctagctgcagattcaattgggaagaagattcaatacaattgtcatggcttcttaccaaatcaacgtcagtaccgcatggccgggttggctgctattgagattgctcagaaagtgtccaaggcttggcgctttctaaggaatccgaagaacatcgcaaagttagttaggaaaagggataaacttaacatgagccagaacaggggaggttattgtagcactagcactttggctggatctccaacttccagcccaaatgaagacagggtctcctccgggatctctctttcctggcaggatgtctataacattgctgttaagtggagacaaatttctgaaccttgtgatccagttgtttgggtcaataagctaagagttcaattctggatttggttctcataccccaatgcttcttggtcaagcaaaagttattcgctactatccatattaccaaagagtcttggaaactgcgaagactataatgcttgacttgaagtatgtcaataatgcagaggaccgtgcaatttttcttacagatattgacaagttgaaaaagatagaaattgcatcgtcatgctcagatttgtaccatgtagttggtgagacctactgggttgctacaagatgtgatagtatggcgtttcgggggaggcgccttgaagggacaagaattaccactcaaaacataggcaagacaggatttgactttgcaattcgaacaccttgcacgccatcgagatgggaggagtatgatgaagaaatgactgcagcctgggaggctatttgtgaggcatattgtaatgacacaaaccccacacgagaccctggtgtgcttgatgctgtgaaggacgcgatattgcggatgacatattactggtacaattttatgcctctttcgagaggctcggctgttgttggctacgtagtgttgctcggtttattcctggcagcaaacatggatattactgccagcattccacccggtgtccaagttgattgggaggcgatcctgtctccagatcccggcacatttgttgacgccgtgaagccctggttgtacccatccacaaaaataagcaggtgcctgaaagattacacggacgtcagctgcgcgttcagcacgacaggttcggttgtagcggccctaacatctgttgacccataggttatttgtccaagtgttataggttgctccagttgttagtgtatttgtttcaaaatacctcagctttgcttagcttgtcagaatttctcagtttgcaaaaagtttgtatgtttctgtgttgtatacagatatgcagtaatgttgtaacttgaaaaaaaataagatttattttcattggaacaagttttttttttttttttaaatggcccaag

SEQ ID NO: 23597 - DNA, 2563 bp, Zea Mays
tgattggaaggggcacagcttatgcatttcaaagagaattggattctgctatttctgatttcaccaaggctatacaatctagcccatcggctggggaggcatggaagcgacggggacaagctcgtgctgctttaggagagttcaaggaggccattgaagacttgactaaagcattggaatttgaaccaaattctcctgatattttacatgaaagaggaattgtgaacttcaaattcaaggactacaactctgcactcgaagatctttcgacatgtgtgaagcatgacaagaagaacagctccgctcacacttatttaggtcttactctttcagcacttggagagtacaagcgtgctgaagatgagcatgtcattggtttaaagtatgacgagagtttccttgactgttgggctcaccttgcccagctttatcttgatttggcatatccagagaagttgttgaattgccttgagaaagctattcaaattgattcaaggttcgcaaaagcttaccatctgcgtggaattctctaccatggaatgggtcgacataggagtgctattaaagaattatcggttgctttgacatatgaaagttcaagtatagagtgcctatacttacgtgcctcaagccatcatgcaattggagaatataaagctgcgataaaaggttatgatgatgtacttgatttggaacttgattccatggataaatttgtgttgcaatgtttgtccttctaccagcagaaggaaatggctctgtatattgcttcaaaggccaatttagagttctctcagttcaacattgatgatgatgttgacccactatttaaggaatactggtgcaaacgactacatcccaaaaatgtggctgaaaaggtttatcgccagccaccgttgcggatctcattgagaagtgggcgccttaacaagcaagacttcaaattcacaaagcatcaaacaactcttcttctagctgcagattcaattgggaagaagattcaatacaattgtcatggcttcttaccaaatcaacgtcagtaccgcatggccgggttggctgctattgagattgctcagaaagtgtccaaggcttggcgctttctaaggaatccgaagaacatcgcaaagttagttaggaaaagggataaacttaacatgagccagaacaggggaggttattgtagcactagcactttggctggatctccaacttccagcccaaatgaagacagggtctcctccgggatctctctttcctggcaggatgtctataacattgctgttaagtggagacaaatttctgaaccttgtgatccagttgtttgggtcaataagctaagtgaagagttcaattctggatttggttctcataccccaatgcttcttggtcaagcaaaagttattcgctactatccatattaccaaagagtcttggaaactgcgaagactataatgcttgacttgaagtatgtcaataatgcagaggaccgtgcaatttttcttacagatattgacaagttgaaaaagatagaaattgcatcgtcatgctcagatttgtaccatgtagttggtgagacctactgggttgctacaagatgtgatagtatggcgtttcgggggaggcgccttgaagggacaagaattaccactcaaaacataggcaagacaggatttgactttgcaattcgaacaccttgcacgccatcgagatgggaggagtatgatgaagaaatgactgcagcctgggaggctatttgtgaggcatattgtaatgacacaaaccccacacgagaccctggtgtgcttgatgctgtgaaggacgcgatattgcggatgacatattactggtacaattttatgcctctttcgagaggctcggctgttgttggctacgtagtgttgctcggtttattcctggcagcaaacatggatattactgccagcattccacccggtgtccaagttgattgggaggcgatcctgtctccagatcccggcacatttgttgacgccgtgaagccctggttgtacccatccacaaaaataagcaggtgcctgaaagattacacggacgtcagctgcgcgttcagcacgacaggttcggttgtagcggccctaacatctgttgacccataggttatttgtccaagtgttataggttgctccagttgttagtgtatttgtttcaaaatacctcagctttgcttagcttgtcagaatttctcagtttgcaaaaagtttgtatgtttctgtgttgtatacagatatgcagtaatgttgtaacttgaaaaaaaataagatttattttcattggaacaagttttttttttttttttgtaataaacagttaaacaccaataagttttgcagttacttcttggatgtttgtatgccatggtatatggtcttgaacacttagcctagaggatttccctcttatttatagagctattactcaaggccttgtggtatttgacatttatcagagtccataagcacgaatccactactttcaccatcatcattgactgacttcgagctctacacatacgcaagtcaag

SEQ ID NO: 23598 - DNA, 2212 bp, Zea Mays
aagcaccatgtgttaccttggtgttgtgacctacaacaccgagcccagggtccaaaacaggaattaaaacacacaggctttatcttgatttggcatatccagagaagttgttgaattgccttgagaaagctattcaaattgattcaaggttcgcaaaagcttaccatctgcgtggaattctctaccatggaatgggtcgacataggagtgctattaaagaattatcggttgctttgacatatgaaagttcaagtatagagtgcctatacttacgtgcctcaagccatcatgcaattggagaatataaagctgcgataaaaggttatgatgatgtacttgatttggaacttgattccatggataaatttgtgttgcaatgtttgtccttctaccagaaggaaatggctctgtatattgcttcaaaggccaatttagagttctctcagttcaacattgatgatgatgttgacccactatttaaggaatactggtgcaaacgactacatcccaaaaatgtggctgaaaaggtttatcgccagccaccgttgcggatctcattgagaagtgggcgccttaacaagcaagacttcaaattcacaaagcatcaaacaactcttcttctagctgcagattcaattgggaagaagattcaatacaattgtcatggcttcttaccaaatcaacgtcagtaccgcatggccgggttggctgctattgagattgctcagaaagtgtccaaggcttggcgctttctaaggaatccgaagaacatcgcaaagttagttaggaaaagggataaacttaacatgagccagaacaggggaggttattgtagcactagcactttggctggatctccaacttccagcccaaatgaagacagggtctcctccgggatctctctttcctggcaggatgtctataacattgctgttaagtggagacaaatttctgaaccttgtgatccagttgtttgggtcaataagctaagtgaagagttcaattctggatttggttctcataccccaatgcttcttggtcaagcaaaagttattcgctactatccatattaccaaagagtcttggaaactgcgaagactataatgcttgacttgaagtatgtcaataatgcagaggaccgtgcaatttttcttacagatattgacaagttgaaaaagatagaaattgcatcgtcatgctcagatttgtaccatgtagttggtgagacctactgggttgctacaagatgtgatagtatggcgtttcgggggaggcgccttgaagggacaagaattaccactcaaaacataggcaagacaggatttgactttgcaattcgaacaccttgcacgccatcgagatgggaggagtatgatgaagaaatgactgcagcctgggaggctatttgtgaggcatattgtaatgacacaaaccccacacgagaccctggtgtgcttgatgctgtgaaggacgcgatattgcggatgacatattactggtacaattttatgcctctttcgagaggctcggctgttgttggctacgtagtgttgctcggtttattcctggcagcaaacatggatattactgccagcattccacccggtgtccaagttgattgggaggcgatcctgtctccagatcccggcacatttgttgacgccgtgaagccctggttgtacccatccacaaaaataagcaggtgcctgaaagattacacggacgtcagctgcgcgttcagcacgacaggttcggttgtagcggccctaacatctgttgacccataggttatttgtccaagtgttataggttgctccagttgttagtgtatttgtttcaaaatacctcagctttgcttagcttgtcagaatttctcagtttgcaaaaagtttgtatgtttctgtgttgtatacagatatgcagtaatgttgtaacttgaaaaaaaataagatttattttcattggaacaagttttttttttttttttgtaataaacagttaaacaccaataagttttgcagttacttcttggatgtttgtatgccatggtatatggtcttgaacacttagcctagaggatttccctcttatttatagagctattactcaaggccttgtggtatttgacatttatcagagtccataagcacgaatccactactttcaccatcatcattgactgacttcgagctctacacatacgcaagtcaag

SEQ ID NO: 23599 - DNA, 3091 bp, Zea Mays
atgtataggagcgctgctgggtctagggccagcgggcctagcacccacctgtcccccgcagattcgctcgggaatccgtccaagactccaagtagccaaccatatcgcaactgctgctccccgccggcagcgtcagcggcgacttctccctccgctcccctctctctttcgctcgccttatcgcccttctctcgcccgcgacggggaggtccgccgttccgatcactaccccttcgcgccgctgacctcagaggaggaggcatgaggctgctgccgagggaggcggacaaattggcgctgcacaatgccggcttcctcgcgcagaagcgccttgcccggggcctccgcctcaactacaccgaggccgtcgcgctcatcgccgcgcagattcttgagcttattcgcgatggagacaaaaccgtgacagacctcatggacctggggaaacaactattgggcaggagacaagttcttccagctgttccataccttttacatactgtgcaggttgaaggaacatttgtggatggaacaaaactagttactgtacacgaccctatctccttggatgacggaaatttggagctagcattgcatggttcttttctcccagattggaagccattaccattttatagagaccaatccttatctggtttttgataggaaaagggcctatggcatgaggttgaacatacttgctggaacagctgttcggtttgagccaggggatgcaaaaagtgttatacttgtaagcatcggaggtcataaggtaatcaaaggtggaaatggcattgctgatggtcctattgacagttcaagtcttaatgtggtgatgcagaaggttaatgcaaatagttttggacatgaagattatccagatgcaagggaaggtattattggtgatggttcatttgactgtactgttgatcatgagaagtatgcgagcatttatggacctaccaccggtgataagattaggcttggtgataccaatctttatgctgagattgaaaaggacttcgccttttatggtgatgagtgcatatttggcggtggaaaagttctgcgtgatggcatgggacaagcttcagggtacccagaatctttctgcctagatacagttataacaaatgctgttgtgattgattataccggaatatacaaggctgatatcggtataaaaggtggacttatagttgctattggaaaggctggaaaccctgatgtcatggatggtgtccataacaacatgattgttggggtcaatactgaagttattgcatctgaaggcatgattgtcactgctggtggcatagattgccatgtccactttatatgtcctcagttggcagaagaggcaattgcaagcggcatcacgacattggtgggtggtggaaccggaccagcacatggaacttgtgccacaacttgcactccagcaccatctcaattgaaattaatgttgcagtccactgatcaattgccaattaacatgggattcacaggcaagggaaatacttcaaaacctgaaggattggctgaaatcattaaagctggagcaatgggtttgaagctgcatgaagattggggaactaccccatccgcgatagataattgtttatctgttgcagaagattttgatattcaggtcaatatacacacagataccttaaatgaatcaggctgcgtggagcatacaatcgcagcttttaaaggtagagccatacatacatatcacagtgaaggtgctggtggcggtcatgctccagacatcatcaaagtttgtggggtaaaaaatgtgttgccctcttcaacaaatcctacccggccatttacttcgaacactgtagacgagcaccttgatatgctgatggtttgtcaccaccttgataaaaacattccagaagatgtagcatttgccgagtctagaattcgagctgaaacaattgctgctgaggacatattgcatgacatgggagccataagtattatatcatctgattcacaggccatggggcgcgttggagaggtgataacacgaacatggcaaactgcaaacaagatgaaggtacaaagaggtagtttacctggatctggtgacgctaatgccgccccggacagtgacaacctccgtataagaagatacatagcaaaatacacaataaatccagcaatagtgaatgggttttcagactttgttggttctgttgaggtgggaaaattagctgaccttgttctttggaaaccatctttcttcggcgctaaaccagaactggttgtaaagggaggtgcaattgcatgggctaacatgggtgatcccaatgctagcattccaacacctgaacctgttgtgatgcgacctatgtttggtgcatttggaaaggctggaagttccaattcaattgcatttgtgagcaaggctgctaaagaagctggtgtcgcaacggagtacagactagaaaagagggtggaagctgtaggccgtgttcgaggcctgacaaagcttgacatgaagctcaacgacgccctcccgaaaatagaggtcgacccggagacctacacagtgaccgctgatggagaggttttgacatgccaaccagcacccacactgccactgtctcggaattacttcctgttctagaaagccactgcatcagcaaaccaccaccactactcacgccctatgcatgcacatcgtcatatacgagtataaaagatgcaagttcaattctgtacgctaccctctttttaataatatggccaatgagcaaattctttggcagtagaacacttttgccctctgctatctgcagatgctcgcatatttgtgcggaataaaacttggaacggtgtagatttctgttccctgctccaaatgtggctatacatactgttgtatttgccgagttgttatcttctcccatgttgtcaaggttgccacgtatattattcagagtcttcgctccattggtttcaagctgatgctcagaggagtacacgctctcgactacactctcgcccctattgcttcggtgcacaacctgcaggcagcctataaccatatcagcttttatattttagaattaag

SEQ ID NO: 23600 - DNA, 2939 bp, Zea Mays
atgtataggagcgctgctgggtctagggccagcgggcctagcacccacctgtcccccgcagattcgctcgggaatccgtccaagactccaagtagccaaccatatcgcaactgctgctccccgccggcagcgtcagcggcgacttctccctccgctcccctctctctttcgctcgccttatcgcccttctctcgcccgcgacggggaggtccgccgttccgatcactaccccttcgcgccgctgacctcagaggaggaggcatgaggctgctgccgagggaggcggacaaattggcgctgcacaatgccggcttcctcgcgcagaagcgccttgcccggggcctccgcctcaactacaccgaggccgtcgcgctcatcgccgcgcagattcttgagcttattcgcgatggagacaaaaccgtgacagacctcatggacctggggaaacaactattgggcagattggaagccattaccattttatagagaccaatccttatctggtttttgataggaaaagggcctatggcatgaggttgaacatacttgctggaacagctgttcggtttgagccaggggatgcaaaaagtgttatacttgtaagcatcggaggtcataaggtaatcaaaggtggaaatggcattgctgatggtcctattgacagttcaagtcttaatgtggtgatgcagaaggttaatgcaaatagttttggacatgaagattatccagatgcaagggaaggtattattggtgatggttcatttgactgtactgttgatcatgagaagtatgcgagcatttatggacctaccaccggtgataagattaggcttggtgataccaatctttatgctgagattgaaaaggacttcgccttttatggtgatgagtgcatatttggcggtggaaaagttctgcgtgatggcatgggacaagcttcagggtacccagaatctttctgcctagatacagttataacaaatgctgttgtgattgattataccggaatatacaaggctgatatcggtataaaaggtggacttatagttgctattggaaaggctggaaaccctgatgtcatggatggtgtccataacaacatgattgttggggtcaatactgaagttattgcatctgaaggcatgattgtcactgctggtggcatagattgccatgtccactttatatgtcctcagttggcagaagaggcaattgcaagcggcatcacgacattggtgggtggtggaaccggaccagcacatggaacttgtgccacaacttgcactccagcaccatctcaattgaaattaatgttgcagtccactgatcaattgccaattaacatgggattcacaggcaagggaaatacttcaaaacctgaaggattggctgaaatcattaaagctggagcaatgggtttgaagctgcatgaagattggggaactaccccatccgcgatagataattgtttatctgttgcagaagattttgatattcaggtcaatatacacacagataccttaaatgaatcaggctgcgtggagcatacaatcgcagcttttaaaggtagagccatacatacatatcacagtgaaggtgctggtggcggtcatgctccagacatcatcaaagtttgtggggtaaaaaatgtgttgccctcttcaacaaatcctacccggccatttacttcgaacactgtagacgagcaccttgatatgctgatggtttgtcaccaccttgataaaaacattccagaagatgtagcatttgccgagtctagaattcgagctgaaacaattgctgctgaggacatattgcatgacatgggagccataagtattatatcatctgattcacaggccatggggcgcgttggagaggtgataacacgaacatggcaaactgcaaacaagatgaaggtacaaagaggtagtttacctggatctggtgacgctaatgccgccccggacagtgacaacctccgtataagaagatacatagcaaaatacacaataaatccagcaatagtgaatgggttttcagactttgttggttctgttgaggtgggaaaattagctgaccttgttctttggaaaccatctttcttcggcgctaaaccagaactggttgtaaagggaggtgcaattgcatgggctaacatgggtgatcccaatgctagcattccaacacctgaacctgttgtgatgcgacctatgtttggtgcatttggaaaggctggaagttccaattcaattgcatttgtgagcaaggctgctaaagaagctggtgtcgcaacggagtacagactagaaaagagggtggaagctgtaggccgtgttcgaggcctgacaaagcttgacatgaagctcaacgacgccctcccgaaaatagaggtcgacccggagacctacacagtgaccgctgatggagaggttttgacatgccaaccagcacccacactgccactgtctcggaattacttcctgttctagaaagccactgcatcagcaaaccaccaccactactcacgccctatgcatgcacatcgtcatatacgagtataaaagatgcaagttcaattctgtacgctaccctctttttaataatatggccaatgagcaaattctttggcagtagaacacttttgccctctgctatctgcagatgctcgcatatttgtgcggaataaaacttggaacggtgtagatttctgttccctgctccaaatgtggctatacatactgttgtatttgccgagttgttatcttctcccatgttgtcaaggttgccacgtatattattcagagtcttcgctccattggtttcaagctgatgctcagaggagtacacgctctcgactacactctcgcccctattgcttcggtgcacaacctgcaggcagcctataaccatatcagcttttatattttagaattaag

SEQ ID NO: 23601 - DNA, 5097 bp, Zea Mays
atgtataggagcgctgctgggtctagggccagcgggcctagcacccacctgtcccccgcagattcgctcgggaatccgtccaagactccaagtagccaaccatatcgcaactgctgctccccgccggcagcgtcagcggcgacttctccctccgctcccctctctctttcgctcgccttatcgcccttctctcgcccgcgacggggaggtccgccgttccgatcactaccccttcgcgccgctgacctcagaggaggaggcatgaggctgctgccgagggaggcggacaaattggcgctgcacaatgccggcttcctcgcgcagaagcgccttgcccggggcctccgcctcaactacaccgaggccgtcgcgctcatcgccgcgcagattcttgagcttattcgcgatggagacaaaaccgtgacagacctcatggacctggggaaacaactattgggcaggtgggtttgcctacttagtaaatttcttgctgtgctttcctgcatcattacatatttacgtttatctataatgcgtctaccatcaagacctggcattgcttcactcatcagatgataataggagactttatcttcaattgccttcaaattacttttaatgtctgtcaaaaaatttaacagcacctcacttctgaatggatacattaaaatgcctaaatgcatcaagaatagcttctcagatatgtgcttgactgcttgtttcaagtactcaggttattatgtgagattttatgggtgggatgggggatgagatgtagaagacggcctgtgttatttcatacatgcacacatcattgttttgagatgaaatatatttgagatatgcctttttatatgtcacagtacaatgcttgcgacttcatctcaatgaatgtgtcagttgatcatctacctaaacaaaaaaaggaaaaaaacattatgtcttactgaaattcatttatgacctttatcccctgcttctacatggcatcttgcgtttctgtatattgtcttcatgtagttcacttgctgtgatataatcatatagcccttaagctctgatagttttttcttttcgtttgcctaccaggagacaagttcttccagctgttccataccttttacatactgtgcaggtgttctttgctcatagtatataatacttactactttcatccatatgcatccagatttcctatggaagcattacatgggtcagagagtagtgggaaactatgtgtgagatttttgcaattttttgtatcaatttttaccatgtgatctaggttgaaggaacatttgtggatggaacaaaactagttactgtacacgaccctatctccttggatgacggaaatttggagctagcattgcatggttcttttctcccaggtcattgattctaatgagcatgtctggttcaattatgttcatgatttttctaatttatatggttacagacttgattgatgtggttatggagtctgtggagatctgcctttttaagaatgtttttcaagggcagttatgtccctgaaagtctttcatgtattgtgctattcagtaagagttcattaatggaaaacaacaacaacaacaaagcctttattaatgaaaaaaagtaaataaaaaaggactgtacacaatatcatttaaatgttgcagtgccttcacctgaaaagttttccagcgatgacgttgaagaatatcctggtgaaatacattacagttctagtcgcatagtcctaaaccttcatcgcagggctttatctctgaaggttgttaacaaggcagacagacccattcaggtgagcacgcctgggtatttttgtttggaccctggtgcaaacctgcaaagactttgtttcctacttatccttttgctgccaaaataaaaaaaaatgtaagttttttttgttaattttctaaagaggagataggtggcttactcatttgttgaaaattgaaattgcatcccgaatagttaaattcagtcttaatcaatgccatgttggcatcccttctggttaatgttttaacaccccataccacttgtggcgagacatgtttttgaactggcagacatgtaatactgttgttaatactaataaatccagagaacatttgccctgttccaccatgttatgttgaacttgtacgcgtgtttcaaactacgtgtaggtgatggtatgtactgaatgtgacattattatcttagtatctatgtccattttacaaataaatttcaagaataggactatgaaacttttcagaaaacaagatacattttgctcatccattagattgtgtaatgttgactgttgacgtctccctccccttcccttttttttcagggaaacgaccctctttcattgagtcaataattgtattatcttggccttgttcaagtcaaagtcctcttattactaaactttgtttcttgtgatgttactttgatccaactagcattttggatccaatttaaaccatgtttaataagttcaatttacatggcattactccctcatttactatttattgaagatgtaagcgtttttttttaaattacaaacctcttgtaactctcatgaaaatttccaaatattgtttgatcttgcagattggaagccattaccattttatagagaccaatccttatctggtttttgataggaaaagggcctatggcatgaggttgaacatacttgctggaacagctgttcggtttgagccaggggatgcaaaaagtgttatacttgtaagcatcggaggtcataaggtaatcaaaggtggaaatggcattgctgatggtcctattgacagttcaagtcttaatgtggtgatgcagaaggttaatgcaaatagttttggacatgaagattatccagatgcaagggaaggtattattggtgatggttcatttgactgtactgttgatcatgagaagtatgcgagcatttatggacctaccaccggtgataagattaggcttggtgataccaatctttatgctgagattgaaaaggacttcgccttttatggtgatgagtgcatatttggcggtggaaaagttctgcgtgatggcatgggacaagcttcagggtacccagaatctttctgcctagatacagttataacaaatgctgttgtgattgattataccggaatatacaaggctgatatcggtataaaaggtggacttatagttgctattggaaaggctggaaaccctgatgtcatggatggtgtccataacaacatgattgttggggtcaatactgaagttattgcatctgaaggcatgattgtcactgctggtggcatagattgccatgtccactttatatgtcctcagttggcagaagaggcaattgcaagcggcatcacgacattggtgggtggtggaaccggaccagcacatggaacttgtgccacaacttgcactccagcaccatctcaattgaaattaatgttgcagtccactgatcaattgccaattaacatgggattcacaggcaagggaaatacttcaaaacctgaaggattggctgaaatcattaaagctggagcaatgggtttgaagctgcatgaagattggggaactaccccatccgcgatagataattgtttatctgttgcagaagattttgatattcaggtcaatatacacacagataccttaaatgaatcaggctgcgtggagcatacaatcgcagcttttaaaggtagagccatacatacatatcacagtgaaggtgctggtggcggtcatgctccagacatcatcaaagtttgtggggtaaaaaatgtgttgccctcttcaacaaatcctacccggccatttacttcgaacactgtagacgagcaccttgatatgctgatggtttgtcaccaccttgataaaaacattccagaagatgtagcatttgccgagtctagaattcgagctgaaacaattgctgctgaggacatattgcatgacatgggagccataagtattatatcatctgattcacaggccatggggcgcgttggagaggtgataacacgaacatggcaaactgcaaacaagatgaaggtacaaagaggtagtttacctggatctggtgacgctaatgccgccccggacagtgacaacctccgtataagaagatacatagcaaaatacacaataaatccagcaatagtgaatgggttttcagactttgttggttctgttgaggtgggaaaattagctgaccttgttctttggaaaccatctttcttcggcgctaaaccagaactggttgtaaagggaggtgcaattgcatgggctaacatgggtgatcccaatgctagcattccaacacctgaacctgttgtgatgcgacctatgtttggtgcatttggaaaggctggaagttccaattcaattgcatttgtgagcaaggctgctaaagaagctggtgtcgcaacggagtacagactagaaaagagggtggaagctgtaggccgtgttcgaggcctgacaaagcttgacatgaagctcaacgacgccctcccgaaaatagaggtcgacccggagacctacacagtgaccgctgatggagaggttttgacatgccaaccagcacccacactgccactgtctcggaattacttcctgttctagaaagccactgcatcagcaaaccaccaccactactcacgccctatgcatgcacatcgtcatatacgagtataaaagatgcaagttcaattctgtacgctaccctctttttaataatatggccaatgagcaaattctttggcagtagaacacttttgccctctgctatctgcagatgctcgcatatttgtgcggaataaaacttggaacggtgtagatttctgttccctgctccaaatgtggctatacatactgttgtatttgccgagttgttatcttctcccatgttgtcaaggttgccacgtatattattcagagtcttcgctccattggtttcaagctgatgctcagaggagtacacgctctcgactacactctcgcccctattgcttcggtgcacaacctgcaggcagcctataaccatatcagcttttatattttagaattaag

SEQ ID NO: 23602 - DNA, 3057 bp, Zea Mays
atgtataggagcgctgctgggtctagggccagcgggcctagcacccacctgtcccccgcagattcgctcgggaatccgtccaagactccaagtagccaaccatatcgcaactgctgctccccgccggcagcgtcagcggcgacttctccctccgctcccctctctctttcgctcgccttatcgcccttctctcgcccgcgacggggaggtccgccgttccgatcactaccccttcgcgccgctgacctcagaggaggaggcatgaggctgctgccgagggaggcggacaaattggcgctgcacaatgccggcttcctcgcgcagaagcgccttgcccggggcctccgcctcaactacaccgaggccgtcgcgctcatcgccgcgcagattcttgagcttattcgcgatggagacaaaaccgtgacagacctcatggacctggggaaacaactattgggcagcgatgacgttgaagaatatcctggtgaaatacattacagttctagtcgcatagtcctaaaccttcatcgcagggctttatctctgaaggttgttaacaaggcagacagacccattcagattggaagccattaccattttatagagaccaatccttatctggtttttgataggaaaagggcctatggcatgaggttgaacatacttgctggaacagctgttcggtttgagccaggggatgcaaaaagtgttatacttgtaagcatcggaggtcataaggtaatcaaaggtggaaatggcattgctgatggtcctattgacagttcaagtcttaatgtggtgatgcagaaggttaatgcaaatagttttggacatgaagattatccagatgcaagggaaggtattattggtgatggttcatttgactgtactgttgatcatgagaagtatgcgagcatttatggacctaccaccggtgataagattaggcttggtgataccaatctttatgctgagattgaaaaggacttcgccttttatggtgatgagtgcatatttggcggtggaaaagttctgcgtgatggcatgggacaagcttcagggtacccagaatctttctgcctagatacagttataacaaatgctgttgtgattgattataccggaatatacaaggctgatatcggtataaaaggtggacttatagttgctattggaaaggctggaaaccctgatgtcatggatggtgtccataacaacatgattgttggggtcaatactgaagttattgcatctgaaggcatgattgtcactgctggtggcatagattgccatgtccactttatatgtcctcagttggcagaagaggcaattgcaagcggcatcacgacattggtgggtggtggaaccggaccagcacatggaacttgtgccacaacttgcactccagcaccatctcaattgaaattaatgttgcagtccactgatcaattgccaattaacatgggattcacaggcaagggaaatacttcaaaacctgaaggattggctgaaatcattaaagctggagcaatgggtttgaagctgcatgaagattggggaactaccccatccgcgatagataattgtttatctgttgcagaagattttgatattcaggtcaatatacacacagataccttaaatgaatcaggctgcgtggagcatacaatcgcagcttttaaaggtagagccatacatacatatcacagtgaaggtgctggtggcggtcatgctccagacatcatcaaagtttgtggggtaaaaaatgtgttgccctcttcaacaaatcctacccggccatttacttcgaacactgtagacgagcaccttgatatgctgatggtttgtcaccaccttgataaaaacattccagaagatgtagcatttgccgagtctagaattcgagctgaaacaattgctgctgaggacatattgcatgacatgggagccataagtattatatcatctgattcacaggccatggggcgcgttggagaggtgataacacgaacatggcaaactgcaaacaagatgaaggtacaaagaggtagtttacctggatctggtgacgctaatgccgccccggacagtgacaacctccgtataagaagatacatagcaaaatacacaataaatccagcaatagtgaatgggttttcagactttgttggttctgttgaggtgggaaaattagctgaccttgttctttggaaaccatctttcttcggcgctaaaccagaactggttgtaaagggaggtgcaattgcatgggctaacatgggtgatcccaatgctagcattccaacacctgaacctgttgtgatgcgacctatgtttggtgcatttggaaaggctggaagttccaattcaattgcatttgtgagcaaggctgctaaagaagctggtgtcgcaacggagtacagactagaaaagagggtggaagctgtaggccgtgttcgaggcctgacaaagcttgacatgaagctcaacgacgccctcccgaaaatagaggtcgacccggagacctacacagtgaccgctgatggagaggttttgacatgccaaccagcacccacactgccactgtctcggaattacttcctgttctagaaagccactgcatcagcaaaccaccaccactactcacgccctatgcatgcacatcgtcatatacgagtataaaagatgcaagttcaattctgtacgctaccctctttttaataatatggccaatgagcaaattctttggcagtagaacacttttgccctctgctatctgcagatgctcgcatatttgtgcggaataaaacttggaacggtgtagatttctgttccctgctccaaatgtggctatacatactgttgtatttgccgagttgttatcttctcccatgttgtcaaggttgccacgtatattattcagagtcttcgctccattggtttcaagctgatgctcagaggagtacacgctctcgactacactctcgcccctattgcttcggtgcacaacctgcaggcagcctataaccatatcagcttttatattttagaattaag

SEQ ID NO: 23603 - DNA, 3507 bp, Zea Mays
atgtataggagcgctgctgggtctagggccagcgggcctagcacccacctgtcccccgcagattcgctcgggaatccgtccaagactccaagtagccaaccatatcgcaactgctgctccccgccggcagcgtcagcggcgacttctccctccgctcccctctctctttcgctcgccttatcgcccttctctcgcccgcgacggggaggtccgccgttccgatcactaccccttcgcgccgctgacctcagaggaggaggcatgaggctgctgccgagggaggcggacaaattggcgctgcacaatgccggcttcctcgcgcagaagcgccttgcccggggcctccgcctcaactacaccgaggccgtcgcgctcatcgccgcgcagattcttgagcttattcgcgatggagacaaaaccgtgacagacctcatggacctggggaaacaactattgggcaggagacaagttcttccagctgttccataccttttacatactgtgcaggttgaaggaacatttgtggatggaacaaaactagttactgtacacgaccctatctccttggatgacggaaatttggagctagcattgcatggttcttttctcccaggtcattgattctaatgagcatgtctggttcaattatgttcatgatttttctaatttatatggttacagacttgattgatgtggttatggagtctgtggagatctgcctttttaagaatgtttttcaagggcagttatgtccctgaaagtctttcatgtattgtgctattcagtaagagttcattaatggaaaacaacaacaacaacaaagcctttattaatgaaaaaaagtaaataaaaaaggactgtacacaatatcatttaaatgttgcagtgccttcacctgaaaagttttccagcgatgacgttgaagaatatcctggtgaaatacattacagttctagtcgcatagtcctaaaccttcatcgcagggctttatctctgaaggttgttaacaaggcagacagacccattcagattggaagccattaccattttatagagaccaatccttatctggtttttgataggaaaagggcctatggcatgaggttgaacatacttgctggaacagctgttcggtttgagccaggggatgcaaaaagtgttatacttgtaagcatcggaggtcataaggtaatcaaaggtggaaatggcattgctgatggtcctattgacagttcaagtcttaatgtggtgatgcagaaggttaatgcaaatagttttggacatgaagattatccagatgcaagggaaggtattattggtgatggttcatttgactgtactgttgatcatgagaagtatgcgagcatttatggacctaccaccggtgataagattaggcttggtgataccaatctttatgctgagattgaaaaggacttcgccttttatggtgatgagtgcatatttggcggtggaaaagttctgcgtgatggcatgggacaagcttcagggtacccagaatctttctgcctagatacagttataacaaatgctgttgtgattgattataccggaatatacaaggctgatatcggtataaaaggtggacttatagttgctattggaaaggctggaaaccctgatgtcatggatggtgtccataacaacatgattgttggggtcaatactgaagttattgcatctgaaggcatgattgtcactgctggtggcatagattgccatgtccactttatatgtcctcagttggcagaagaggcaattgcaagcggcatcacgacattggtgggtggtggaaccggaccagcacatggaacttgtgccacaacttgcactccagcaccatctcaattgaaattaatgttgcagtccactgatcaattgccaattaacatgggattcacaggcaagggaaatacttcaaaacctgaaggattggctgaaatcattaaagctggagcaatgggtttgaagctgcatgaagattggggaactaccccatccgcgatagataattgtttatctgttgcagaagattttgatattcaggtcaatatacacacagataccttaaatgaatcaggctgcgtggagcatacaatcgcagcttttaaaggtagagccatacatacatatcacagtgaaggtgctggtggcggtcatgctccagacatcatcaaagtttgtggggtaaaaaatgtgttgccctcttcaacaaatcctacccggccatttacttcgaacactgtagacgagcaccttgatatgctgatggtttgtcaccaccttgataaaaacattccagaagatgtagcatttgccgagtctagaattcgagctgaaacaattgctgctgaggacatattgcatgacatgggagccataagtattatatcatctgattcacaggccatggggcgcgttggagaggtgataacacgaacatggcaaactgcaaacaagatgaaggtacaaagaggtagtttacctggatctggtgacgctaatgccgccccggacagtgacaacctccgtataagaagatacatagcaaaatacacaataaatccagcaatagtgaatgggttttcagactttgttggttctgttgaggtgggaaaattagctgaccttgttctttggaaaccatctttcttcggcgctaaaccagaactggttgtaaagggaggtgcaattgcatgggctaacatgggtgatcccaatgctagcattccaacacctgaacctgttgtgatgcgacctatgtttggtgcatttggaaaggctggaagttccaattcaattgcatttgtgagcaaggctgctaaagaagctggtgtcgcaacggagtacagactagaaaagagggtggaagctgtaggccgtgttcgaggcctgacaaagcttgacatgaagctcaacgacgccctcccgaaaatagaggtcgacccggagacctacacagtgaccgctgatggagaggttttgacatgccaaccagcacccacactgccactgtctcggaattacttcctgttctagaaagccactgcatcagcaaaccaccaccactactcacgccctatgcatgcacatcgtcatatacgagtataaaagatgcaagttcaattctgtacgctaccctctttttaataatatggccaatgagcaaattctttggcagtagaacacttttgccctctgctatctgcagatgctcgcatatttgtgcggaataaaacttggaacggtgtagatttctgttccctgctccaaatgtggctatacatactgttgtatttgccgagttgttatcttctcccatgttgtcaaggttgccacgtatattattcagagtcttcgctccattggtttcaagctgatgctcagaggagtacacgctctcgactacactctcgcccctattgcttcggtgcacaacctgcaggcagcctataaccatatcagcttttatattttagaattaag

SEQ ID NO: 23604 - DNA, 4319 bp, Zea Mays
atgtataggagcgctgctgggtctagggccagcgggcctagcacccacctgtcccccgcagattcgctcgggaatccgtccaagactccaagtagccaaccatatcgcaactgctgctccccgccggcagcgtcagcggcgacttctccctccgctcccctctctctttcgctcgccttatcgcccttctctcgcccgcgacggggaggtccgccgttccgatcactaccccttcgcgccgctgacctcagaggaggaggcatgaggctgctgccgagggaggcggacaaattggcgctgcacaatgccggcttcctcgcgcagaagcgccttgcccggggcctccgcctcaactacaccgaggccgtcgcgctcatcgccgcgcagattcttgagcttattcgcgatggagacaaaaccgtgacagacctcatggacctggggaaacaactattgggcaggagacaagttcttccagctgttccataccttttacatactgtgcaggttgaaggaacatttgtggatggaacaaaactagttactgtacacgaccctatctccttggatgacggaaatttggagctagcattgcatggttcttttctcccaggtcattgattctaatgagcatgtctggttcaattatgttcatgatttttctaatttatatggttacagacttgattgatgtggttatggagtctgtggagatctgcctttttaagaatgtttttcaagggcagttatgtccctgaaagtctttcatgtattgtgctattcagtaagagttcattaatggaaaacaacaacaacaacaaagcctttattaatgaaaaaaagtaaataaaaaaggactgtacacaatatcatttaaatgttgcagtgccttcacctgaaaagttttccagcgatgacgttgaagaatatcctggtgaaatacattacagttctagtcgcatagtcctaaaccttcatcgcagggctttatctctgaaggttgttaacaaggcagacagacccattcaggtgagcacgcctgggtatttttgtttggaccctggtgcaaacctgcaaagactttgtttcctacttatccttttgctgccaaaataaaaaaaaatgtaagttttttttgttaattttctaaagaggagataggtggcttactcatttgttgaaaattgaaattgcatcccgaatagttaaattcagtcttaatcaatgccatgttggcatcccttctggttaatgttttaacaccccataccacttgtggcgagacatgtttttgaactggcagacatgtaatactgttgttaatactaataaatccagagaacatttgccctgttccaccatgttatgttgaacttgtacgcgtgtttcaaactacgtgtaggtgatggtatgtactgaatgtgacattattatcttagtatctatgtccattttacaaataaatttcaagaataggactatgaaacttttcagaaaacaagatacattttgctcatccattagattgtgtaatgttgactgttgacgtctccctccccttcccttttttttcagggaaacgaccctctttcattgagtcaataattgtattatcttggccttgttcaagtcaaagtcctcttattactaaactttgtttcttgtgatgttactttgatccaactagcattttggatccaatttaaaccatgtttaataagttcaatttacatggcattactccctcatttactatttattgaagatgtaagcgtttttttttaaattacaaacctcttgtaactctcatgaaaatttccaaatattgtttgatcttgcagattggaagccattaccattttatagagaccaatccttatctggtttttgataggaaaagggcctatggcatgaggttgaacatacttgctggaacagctgttcggtttgagccaggggatgcaaaaagtgttatacttgtaagcatcggaggtcataaggtaatcaaaggtggaaatggcattgctgatggtcctattgacagttcaagtcttaatgtggtgatgcagaaggttaatgcaaatagttttggacatgaagattatccagatgcaagggaaggtattattggtgatggttcatttgactgtactgttgatcatgagaagtatgcgagcatttatggacctaccaccggtgataagattaggcttggtgataccaatctttatgctgagattgaaaaggacttcgccttttatggtgatgagtgcatatttggcggtggaaaagttctgcgtgatggcatgggacaagcttcagggtacccagaatctttctgcctagatacagttataacaaatgctgttgtgattgattataccggaatatacaaggctgatatcggtataaaaggtggacttatagttgctattggaaaggctggaaaccctgatgtcatggatggtgtccataacaacatgattgttggggtcaatactgaagttattgcatctgaaggcatgattgtcactgctggtggcatagattgccatgtccactttatatgtcctcagttggcagaagaggcaattgcaagcggcatcacgacattggtgggtggtggaaccggaccagcacatggaacttgtgccacaacttgcactccagcaccatctcaattgaaattaatgttgcagtccactgatcaattgccaattaacatgggattcacaggcaagggaaatacttcaaaacctgaaggattggctgaaatcattaaagctggagcaatgggtttgaagctgcatgaagattggggaactaccccatccgcgatagataattgtttatctgttgcagaagattttgatattcaggtcaatatacacacagataccttaaatgaatcaggctgcgtggagcatacaatcgcagcttttaaaggtagagccatacatacatatcacagtgaaggtgctggtggcggtcatgctccagacatcatcaaagtttgtggggtaaaaaatgtgttgccctcttcaacaaatcctacccggccatttacttcgaacactgtagacgagcaccttgatatgctgatggtttgtcaccaccttgataaaaacattccagaagatgtagcatttgccgagtctagaattcgagctgaaacaattgctgctgaggacatattgcatgacatgggagccataagtattatatcatctgattcacaggccatggggcgcgttggagaggtgataacacgaacatggcaaactgcaaacaagatgaaggtacaaagaggtagtttacctggatctggtgacgctaatgccgccccggacagtgacaacctccgtataagaagatacatagcaaaatacacaataaatccagcaatagtgaatgggttttcagactttgttggttctgttgaggtgggaaaattagctgaccttgttctttggaaaccatctttcttcggcgctaaaccagaactggttgtaaagggaggtgcaattgcatgggctaacatgggtgatcccaatgctagcattccaacacctgaacctgttgtgatgcgacctatgtttggtgcatttggaaaggctggaagttccaattcaattgcatttgtgagcaaggctgctaaagaagctggtgtcgcaacggagtacagactagaaaagagggtggaagctgtaggccgtgttcgaggcctgacaaagcttgacatgaagctcaacgacgccctcccgaaaatagaggtcgacccggagacctacacagtgaccgctgatggagaggttttgacatgccaaccagcacccacactgccactgtctcggaattacttcctgttctagaaagccactgcatcagcaaaccaccaccactactcacgccctatgcatgcacatcgtcatatacgagtataaaagatgcaagttcaattctgtacgctaccctctttttaataatatggccaatgagcaaattctttggcagtagaacacttttgccctctgctatctgcagatgctcgcatatttgtgcggaataaaacttggaacggtgtagatttctgttccctgctccaaatgtggctatacatactgttgtatttgccgagttgttatcttctcccatgttgtcaaggttgccacgtatattattcagagtcttcgctccattggtttcaagctgatgctcagaggagtacacgctctcgactacactctcgcccctattgcttcggtgcacaacctgcaggcagcctataaccatatcagcttttatattttagaattaag

SEQ ID NO: 23605 - DNA, 3617 bp, Zea Mays
atgtataggagcgctgctgggtctagggccagcgggcctagcacccacctgtcccccgcagattcgctcgggaatccgtccaagactccaagtagccaaccatatcgcaactgctgctccccgccggcagcgtcagcggcgacttctccctccgctcccctctctctttcgctcgccttatcgcccttctctcgcccgcgacggggaggtccgccgttccgatcactaccccttcgcgccgctgacctcagaggaggaggcatgaggctgctgccgagggaggcggacaaattggcgctgcacaatgccggcttcctcgcgcagaagcgccttgcccggggcctccgcctcaactacaccgaggccgtcgcgctcatcgccgcgcagattcttgagcttattcgcgatggagacaaaaccgtgacagacctcatggacctggggaaacaactattgggcaggagacaagttcttccagctgttccataccttttacatactgtgcaggttgaaggaacatttgtggatggaacaaaactagttactgtacacgaccctatctccttggatgacggaaatttggagctagcattgcatggttcttttctcccaggtcattgattctaatgagcatgtctggttcaattatgttcatgatttttctaatttatatggttacagacttgattgatgtggttatggagtctgtggagatctgcctttttaagaatgtttttcaagggcagttatgtccctgaaagtctttcatgtattgtgctattcagtaagagttcattaatggaaaacaacaacaacaacaaagcctttattaatgaaaaaaagtaaataaaaaaggactgtacacaatatcatttaaatgttgcagtgccttcacctgaaaagttttccagcgatgacgttgaagaatatcctggtgaaatacattacagttctagtcgcatagtcctaaaccttcatcgcagggctttatctctgaaggttgttaacaaggcagacagacccattcagattggaagccattaccattttatagagaccaatccttatctggtttttgataggaaaagggcctatggcatgaggttgaacatacttgctggaacagctgttcggtttgagccaggggatgcaaaaagtgttatacttgtaagcatcggaggtcataaggtaatcaaaggtggaaatggcattgctgatggtcctattgacagttcaagtcttaatgtggtgatgcagaaggttaatgcaaatagttttggacatgaagattatccagatgcaagggaaggtattattggtgatggttcatttgactgtactgttgatcatgagaagtatgcgagcatttatggacctaccaccggtgataagattaggcttggtgataccaatctttatgctgagattgaaaaggacttcgccttttatggtgatgagtgcatatttggcggtggaaaagttctgcgtgatggcatgggacaagcttcagggtacccagaatctttctgcctagatacagttataacaaatgctgttgtgattgattataccggaatatacaaggctgatatcggtataaaaggtggacttatagttgctattggaaaggctggaaaccctgatgtcatggatggtgtccataacaacatgattgttggggtcaatactgaagttattgcatctgaaggcatgattgtcactgctggtggcatagattgccatgtccactttatatgtcctcagttggcagaagaggcaattgcaagcggttaggcttcttgacttctaccatatattaggtgcaaccaaatacacttcatttgattatcatggaaatttcaccattttacaaacaaagggtatcaaatcaacactggggcatcacgacattggtgggtggtggaaccggaccagcacatggaacttgtgccacaacttgcactccagcaccatctcaattgaaattaatgttgcagtccactgatcaattgccaattaacatgggattcacaggcaagggaaatacttcaaaacctgaaggattggctgaaatcattaaagctggagcaatgggtttgaagctgcatgaagattggggaactaccccatccgcgatagataattgtttatctgttgcagaagattttgatattcaggtcaatatacacacagataccttaaatgaatcaggctgcgtggagcatacaatcgcagcttttaaaggtagagccatacatacatatcacagtgaaggtgctggtggcggtcatgctccagacatcatcaaagtttgtggggtaaaaaatgtgttgccctcttcaacaaatcctacccggccatttacttcgaacactgtagacgagcaccttgatatgctgatggtttgtcaccaccttgataaaaacattccagaagatgtagcatttgccgagtctagaattcgagctgaaacaattgctgctgaggacatattgcatgacatgggagccataagtattatatcatctgattcacaggccatggggcgcgttggagaggtgataacacgaacatggcaaactgcaaacaagatgaaggtacaaagaggtagtttacctggatctggtgacgctaatgccgccccggacagtgacaacctccgtataagaagatacatagcaaaatacacaataaatccagcaatagtgaatgggttttcagactttgttggttctgttgaggtgggaaaattagctgaccttgttctttggaaaccatctttcttcggcgctaaaccagaactggttgtaaagggaggtgcaattgcatgggctaacatgggtgatcccaatgctagcattccaacacctgaacctgttgtgatgcgacctatgtttggtgcatttggaaaggctggaagttccaattcaattgcatttgtgagcaaggctgctaaagaagctggtgtcgcaacggagtacagactagaaaagagggtggaagctgtaggccgtgttcgaggcctgacaaagcttgacatgaagctcaacgacgccctcccgaaaatagaggtcgacccggagacctacacagtgaccgctgatggagaggttttgacatgccaaccagcacccacactgccactgtctcggaattacttcctgttctagaaagccactgcatcagcaaaccaccaccactactcacgccctatgcatgcacatcgtcatatacgagtataaaagatgcaagttcaattctgtacgctaccctctttttaataatatggccaatgagcaaattctttggcagtagaacacttttgccctctgctatctgcagatgctcgcatatttgtgcggaataaaacttggaacggtgtagatttctgttccctgctccaaatgtggctatacatactgttgtatttgccgagttgttatcttctcccatgttgtcaaggttgccacgtatattattcagagtcttcgctccattggtttcaagctgatgctcagaggagtacacgctctcgactacactctcgcccctattgcttcggtgcacaacctgcaggcagcctataaccatatcagcttttatattttagaattaag

SEQ ID NO: 23606 - DNA, 2414 bp, Zea Mays
ctcacattccatccatgcttatagcaattttcagttcaaagatgctaagactatattcttccaggggatgcaaaaagtgttatacttgtaagcatcggaggtcataaggtaatcaaaggtggaaatggcattgctgatggtcctattgacagttcaagtcttaatgtggtgatgcagaaggttaatgcaaatagttttggacatgaagattatccagatgcaagggaaggtattattggtgatggttcatttgactgtactgttgatcatgagaagtatgcgagcatttatggacctaccaccggtgataagattaggcttggtgataccaatctttatgctgagattgaaaaggacttcgccttttatggtgatgagtgcatatttggcggtggaaaagttctgcgtgatggcatgggacaagcttcagggtacccagaatctttctgcctagatacagttataacaaatgctgttgtgattgattataccggaatatacaaggctgatatcggtataaaaggtggacttatagttgctattggaaaggctggaaaccctgatgtcatggatggtgtccataacaacatgattgttgggttattgcatctgaaggcatgattgtcactgctggtggcatagattgccatgtccactttatatgtcctcagttggcagaagaggcaattgcaagcggcatcacgacattggtgggtggtggaaccggaccagcacatggaacttgtgccacaacttgcactccagcaccatctcaattgaaattaatgttgcagtccactgatcaattgccaattaacatgggattcacaggcaagggaaatacttcaaaacctgaaggattggctgaaatcattaaagctggagcaatgggtttgaagctgcatgaagattggggaactaccccatccgcgatagataattgtttatctgttgcagaagattttgatattcaggtcaatatacacacagataccttaaatgaatcaggctgcgtggagcatacaatcgcagcttttaaaggtagagccatacatacatatcacagtgaaggtgctggtggcggtcatgctccagacatcatcaaagtttgtggggtaaaaaatgtgttgccctcttcaacaaatcctacccggccatttacttcgaacactgtagacgagcaccttgatatgctgatggtttgtcaccaccttgataaaaacattccagaagatgtagcatttgccgagtctagaattcgagctgaaacaattgctgctgaggacatattgcatgacatgggagccataagtattatatcatctgattcacaggccatggggcgcgttggagaggtgataacacgaacatggcaaactgcaaacaagatgaaggtacaaagaggtagtttacctggatctggtgacgctaatgccgccccggacagtgacaacctccgtataagaagatacatagcaaaatacacaataaatccagcaatagtgaatgggttttcagactttgttggttctgttgaggtgggaaaattagctgaccttgttctttggaaaccatctttcttcggcgctaaaccagaactggttgtaaagggaggtgcaattgcatgggctaacatgggtgatcccaatgctagcattccaacacctgaacctgttgtgatgcgacctatgtttggtgcatttggaaaggctggaagttccaattcaattgcatttgtgagcaaggctgctaaagaagctggtgtcgcaacggagtacagactagaaaagagggtggaagctgtaggccgtgttcgaggcctgacaaagcttgacatgaagctcaacgacgccctcccgaaaatagaggtcgacccggagacctacacagtgaccgctgatggagaggttttgacatgccaaccagcacccacactgccactgtctcggaattacttcctgttctagaaagccactgcatcagcaaaccaccaccactactcacgccctatgcatgcacatcgtcatatacgagtataaaagatgcaagttcaattctgtacgctaccctctttttaataatatggccaatgagcaaattctttggcagtagaacacttttgccctctgctatctgcagatgctcgcatatttgtgcggaataaaacttggaacggtgtagatttctgttccctgctccaaatgtggctatacatactgttgtatttgccgagttgttatcttctcccatgttgtcaaggttgccacgtatattattcagagtcttcgctccattggtttcaagctgatgctcagaggagtacacgctctcgactacactctcgcccctattgcttcggtgcacaacctgcaggcagcctataaccatatcagcttttatattttagaattaag

SEQ ID NO: 23607 - DNA, 1797 bp, Zea Mays
attaggtgcaaccaaatacacttcatttgattatcatggaaatttcaccattttacaaacaaagggtatcaaatcaacactggggcatcacgacattggtgggtggtggaaccggaccagcacatggaacttgtgccacaacttgcactccagcaccatctcaattgaaattaatgttgcagtccactgatcaattgccaattaacatgggattcacagggaaatacttcaaaacctgaaggattggctgaaatcattaaagctggagcaatgggtttgaagctgcatgaagattggggaactaccccatccgcgatagataattgtttatctgttgcagaagattttgatattcaggtcaatatacacacagataccttaaatgaatcaggctgcgtggagcatacaatcgcagcttttaaaggtagagccatacatacatatcacagtgaaggtgctggtggcggtcatgctccagacatcatcaaagtttgtggggtaaaaaatgtgttgccctcttcaacaaatcctacccggccatttacttcgaacactgtagacgagcaccttgatatgctgatggtttgtcaccaccttgataaaaacattccagaagatgtagcatttgccgagtctagaattcgagctgaaacaattgctgctgaggacatattgcatgacatgggagccataagtattatatcatctgattcacaggccatggggcgcgttggagaggtgataacacgaacatggcaaactgcaaacaagatgaaggtacaaagaggtagtttacctggatctggtgacgctaatgccgccccggacagtgacaacctccgtataagaagatacatagcaaaatacacaataaatccagcaatagtgaatgggttttcagactttgttggttctgttgaggtgggaaaattagctgaccttgttctttggaaaccatctttcttcggcgctaaaccagaactggttgtaaagggaggtgcaattgcatgggctaacatgggtgatcccaatgctagcattccaacacctgaacctgttgtgatgcgacctatgtttggtgcatttggaaaggctggaagttccaattcaattgcatttgtgagcaaggctgctaaagaagctggtgtcgcaacggagtacagactagaaaagagggtggaagctgtaggccgtgttcgaggcctgacaaagcttgacatgaagctcaacgacgccctcccgaaaatagaggtcgacccggagacctacacagtgaccgctgatggagaggttttgacatgccaaccagcacccacactgccactgtctcggaattacttcctgttctagaaagccactgcatcagcaaaccaccaccactactcacgccctatgcatgcacatcgtcatatacgagtataaaagatgcaagttcaattctgtacgctaccctctttttaataatatggccaatgagcaaattctttggcagtagaacacttttgccctctgctatctgcagatgctcgcatatttgtgcggaataaaacttggaacggtgtagatttctgttccctgctccaaatgtggctatacatactgttgtatttgccgagttgttatcttctcccatgttgtcaaggttgccacgtatattattcagagtcttcgctccattggtttcaagctgatgctcagaggagtacacgctctcgactacactctcgcccctattgcttcggtgcacaacctgcaggcagcctataaccatatcagcttttatattttagaattaag

SEQ ID NO: 23608 - DNA, 1748 bp, Zea Mays
cttcatttgattatcatggaaatttcaccattttacaaacaaagggtatcaaatcaacactggggcatcacgacattggtgggtggtggaaccggaccagcacatggaacttgtgccacaacttgcactccagcaccatctcaattgaaattaatgttgcagtccactgatcaattgccaattaacatgggattcacaggcaagggaaatacttcaaaacctgaaggattggctgaaatcattaaagctggagcaatgggtttgaagctgcatgaagattggggaactaccccatccgcgatagataattgtttatctgttgcagaagattttgatattcaggtcaatatacacacagataccttaaatgaatcaggctgcgtggagcatacaatcgcagcttttaaaggtagagccatacatacatatcacagtgaaggtgctggtggcggtcatgctccagacatcatcaaagtttgtggggtaaaaaatgtgttgccctcttcaacaaatcctacccggccatttacttcgaacactgtagacgagcaccttgatatgctgaagatgtagcatttgccgagtctagaattcgagctgaaacaattgctgctgaggacatattgcatgacatgggagccataagtattatatcatctgattcacaggccatggggcgcgttggagaggtgataacacgaacatggcaaactgcaaacaagatgaaggtacaaagaggtagtttacctggatctggtgacgctaatgccgccccggacagtgacaacctccgtataagaagatacatagcaaaatacacaataaatccagcaatagtgaatgggttttcagactttgttggttctgttgaggtgggaaaattagctgaccttgttctttggaaaccatctttcttcggcgctaaaccagaactggttgtaaagggaggtgcaattgcatgggctaacatgggtgatcccaatgctagcattccaacacctgaacctgttgtgatgcgacctatgtttggtgcatttggaaaggctggaagttccaattcaattgcatttgtgagcaaggctgctaaagaagctggtgtcgcaacggagtacagactagaaaagagggtggaagctgtaggccgtgttcgaggcctgacaaagcttgacatgaagctcaacgacgccctcccgaaaatagaggtcgacccggagacctacacagtgaccgctgatggagaggttttgacatgccaaccagcacccacactgccactgtctcggaattacttcctgttctagaaagccactgcatcagcaaaccaccaccactactcacgccctatgcatgcacatcgtcatatacgagtataaaagatgcaagttcaattctgtacgctaccctctttttaataatatggccaatgagcaaattctttggcagtagaacacttttgccctctgctatctgcagatgctcgcatatttgtgcggaataaaacttggaacggtgtagatttctgttccctgctccaaatgtggctatacatactgttgtatttgccgagttgttatcttctcccatgttgtcaaggttgccacgtatattattcagagtcttcgctccattggtttcaagctgatgctcagaggagtacacgctctcgactacactctcgcccctattgcttcggtgcacaacctgcaggcagcctataaccatatcagcttttatattttagaattaag

SEQ ID NO: 23609 - DNA, 2507 bp, Zea Mays
tttaccaccacctccaaagcccaaagccagagccaagtaataacaactctcgatctttcggaaaaaggtgaggcccaacacctctgcctcgcaccagtaccacaacgccacgacacgccggcgaggtggacgagcggcggcgatggcgggcggcgaccgggagcgagacgcggacgaggagacgaggaatcagatgatgcagaaccttttcggggaccagtcggaggacgaggacgatgcggacgacgacgacgtcgccgagatggtcgatgaggacgacggccaccagccgcagtcgcccccgcagtcgcccccgcagcgccaccaggagctggacgacgatgcctacgacgatgaggaggaggacgcccgcagccacgcgcccgcccgcgcaagcggataccactccgaggaagtggatggtgaggcagagaatggaggggaaggggaaggcgaaagtgaagggcaagttgtaatcgaagaggaaagtgaaggtgaagctcatggtgccgatcttgatcaaggagaaagtgatggggacaaagtccagagctccccagaaagagaactcgatgaccagaggatggaacctgatgcaagaggaatggacagtgaagatgaaggctaccagcagaggacagtatctggcagaagaaggggagttattgcctccgaatcggagggatctgaagatagttactatgctgctggagctcaagaagacgaggaacctcgccaaacaaggaaacaaagctctccgttggaggaagaaagagatcatgaagtagttcgtgatgtgtttggtgatagcgatgaagatgaaccagctccatatcgtgttcgccatgaaatcgatgaagattctcataggtctcacatggaggatgaaggccattatgagaaggacatgcaaccagatgacgttgtggctgacgaagatatgcgatatgaatctgatgataatcgtgaactgaaaccaaaagagaaaccagtcggtccaccactagacttggtggttccatttaagcaaccaccagctcgacctgacaaaatgaatgtgatcaaggtatcaaacattatggggattgaccctaaaccctttgatccaaaaacatatgtggaagaagatgtttttgttacagatgaatctgggactaagaaaaggatacggctagaggacaatattgtgcggtggagaaccattaggaatgcagatggcactacatcttgtgaaagcaatgcacgctttgtaaaatggaaggatgggactatgcagcttctgattggcaatgaggttcttgatatatctgtacatgaggcgcatcatgaccagtcccatctgtttttgaggcatgggaagggaattctacaatcacaaggaaggcttttgcacaaaatgcgatttatgccatcctccctgtcttcaaagtcgcatcgcttattaactgctctggttgattctcagaataagaaaactgttaagatgcaaaaatggtttgagactaaggatcctgagaaagcgaaaatggaaaaagaaagggttttgggccaaaatattcgagcccattcaatccttcaacgcaaaagagaaaaagtgaaccgcaagtacacacagcctgcccgtccaaggcggcagctttctccagggttcttggaagacgctctagatgagttaatcatattttgtcaggatgatgagcctggctatgattctcggcgaatgccaggccgtaggcgttttgaggatgaattggaggctgaagcactagctgagaggcgtatcattaacgcgaagaagtcaaatatgagcagaaatgttccccacaaaccaccgtaccctcctgcccgtccaccgagacgtcaagcggatgaatactcggggagtgagagggaggagtcagagtacgaaacggatggcgaggatattgaacattcactgcctcgtggaagaagggaggacgagctggatgaggaggaagaatacgaggaagatgttgaagaagaagaagcgcctctgtcggatgaagaaatggaggcaccgaaacgtaagagagaatcagggggtggtgggcaaaggcgcgaggagctggtgtctgaggaggacgacgaggaccacgacgattctccgccaaggaagcagccggctgtttcgcatcgtagaaaggctgtcgtgtttgatgacagcgacgaggactaaaatttgtaaaaccgtatgacgacctgacatgatacgcttgctttttctccccatttgtttaagagaatgattagttatttttcgtcatgctggtgtaatatggttgcaattctacctacagaggtgagattgtacatgctttaatgatgcgtgggctacagtgaaaggaaacgcaagcatgaaacgatttttttttctttttggttagaaaggaacagcgaaacatgaagaaatcgataattggattggagcacgttcataatagaaccacaataacgtactggaaataaaaaaaaaaactgaatgctgg

SEQ ID NO: 23610 - DNA, 3016 bp, Zea Mays
caaagcccaaagccagagccaagtaataacaactctcgatctttcggaaaaaggtgaggcccaacacctctgcctcgcaccagtaccacaacgccacgacacgccggcgaggtggacgagcggcggcgatggcgggcggcgaccgggagcgagacgcggacgaggagacgaggaatcagatgatgcagaaccttttcggggaccagtcggaggacgaggacgatgcggacgacgacgacgtcgccgagatggtcgatgaggacgacggccaccagccgcagtcgcccccgcagtcgcccccgcagcgccaccaggagctggacgacgatgcctacgacgatgaggaggaggacgcccgcagccacgcgcccgcccgcgcaagcggataccactccgaggaagtggatggtgaggcagagaatggaggggaaggggaaggcgaaagtgaagggcaagttgtaatcgaagaggaaagtgaaggtgaagctcatggtgccgatcttgatcaaggagaaagtgatggggacaaagtccagagctccccagaaagagaactcgatgaccagaggatggaacctgatgcaagaggaatggacagtgaagatgaaggctaccagcagaggacagtatctggcagaagaaggggagttattgcctccgaatcggagggatctgaagatagttactatgctgctggagctcaagaagacgaggaacctcgccaaacaaggaaacaaagctctccgttggaggaagaaagagatcatgaagtagttcgtgatgtgtttggtgatagcgatgaagatgaaccagctccatatcgtgttcgccatgaaatcgatgaagattctcataggtctcacatggaggatgaaggccattatgagaaggacatgcaaccagatgacgttgtggctgacgaagatatgcgatatgaatctgatgataatcgtgaactgaaaccaaaagagaaaccagtcggtccaccactagacttggtggttccatttaagcaaccaccagctcgacctgacaaaatgaatgtgatcaaggtatcaaacattatggggattgaccctaaaccctttgatccaaaaacatatgtggaagaagatgtttttgttacagatgaatctgggactaagaaaaggatacggctagaggacaatattgtgcggtggagaaccattaggaatgcagatggcactacatcttgtgaaagcaatgcacgctttgtaaaatggaaggatgggactatgcagcttctgattggcaatgaggttcttgatatatctgtacatgaggcgcatcatgaccagtcccatctgtttttgaggcatgggaagggaattctacaatcacaaggaaggcttttgcacaaaatgcgatttatgccatcctccctgtcttcaaagtcgcatcgcttattaactgctctggttgattctcagaataagaaaactgttaagatgcaaaaatggtttgagactaaggatcctgagaaagcgaaaatggaaaaagaaagggttagcaaatcactattacttcattatctggtgtatgtaacacaggatgtgcatgtcttgcttttgtccaatatagctgcttgaactaagatccctagttcaggtgtgcattacttgtgttgtgcttttcctgttcatctgtttctcctgttggttgtcctatacatagttccttacatgtgtagtatttccttgagaaggtttgaactaccccgatgtataaacttattgtttttagttacaaaatcatttcctgaagttcatcttgtatagttttctaaatcagtttaggtctcatcagcttaaagcagtatgagggatctgaaagtaatattggcggtcactttgttgctagtgttattatgatttagtgtgcatgttcaaattagcaaccccaaggtaaagttacattatgtttgtccattcaaatagtagcactcatgtcatgtttcttgctgatctgattttcctttttgttaaggactgatttcatattcatctggacagattttatacttcctactgatacggaaacatgcaggttttgggccaaaatattcgagcccattcaatccttcaacgcaaaagagaaaaagtgaaccgcaagtacacacagcctgcccgtccaaggcggcagctttctccagggttcttggaagacgctctagatgaggatgatgagcctggctatgattctcggcgaatgccaggccgtaggcgttttgaggatgaattggaggctgaagcactagctgagaggcgtatcattaacgcgaagaagtcaaatatgagcagaaatgttccccacaaaccaccgtaccctcctgcccgtccaccgagacgtcaagcggatgaatactcggggagtgagagggaggagtcagagtacgaaacggatggcgaggatattgaacattcactgcctcgtggaagaagggaggacgagctggatgaggaggaagaatacgaggaagatgttgaagaagaagaagcgcctctgtcggatgaagaaatggaggcaccgaaacgtaagagagaatcagggggtggtgggcaaaggcgcgaggagctggtgtctgaggaggacgacgaggaccacgacgattctccgccaaggaagcagccggctgtttcgcatcgtagaaaggctgtcgtgtttgatgacagcgacgaggactaaaatttgtaaaaccgtatgacgacctgacatgatacgcttgctttttctccccatttgtttaagagaatgattagttatttttcgtcatgctggtgtaatatggttgcaattctacctacagaggtgagattgtacatgctttaatgatgcgtgggctacagtgaaaggaaacgcaagcatgaaacgatttttttttctttttggttagaaaggaacagcgaaacatgaagaaatcgataattggattggagcacgttcataatagaaccacaataacgtactggaaataaaaaaaaaaactgaatgctgg

SEQ ID NO: 23611 - DNA, 2472 bp, Zea Mays
aaagcccaaagccagagccaagtaataacaactctcgatctttcggaaaaaggtgaggcccaacacctctgcctcgcaccagtaccacaacgccacgacacgccggcgaggtggacgagcggcggcgatggcgggcggcgaccgggagcgagacgcggacgaggagacgaggaatcagatgatgcagaaccttttcggggaccagtcggaggacgaggacgatgcggacgacgacgacgtcgccgagatggtcgatgaggacgacggccaccagccgcagtcgcccccgcagtcgcccccgcagcgccaccaggagctggacgacgatgcctacgacgatgaggaggaggacgcccgcagccacgcgcccgcccgcgcaagcggataccactccgaggaagtggatggtgaggcagagaatggaggggaaggggaaggcgaaagtgaagggcaagttgtaatcgaagaggaaagtgaaggtgaagctcatggtgccgatcttgatcaaggagaaagtgatggggacaaagtccagagctccccagaaagagaactcgatgaccagaggatggaacctgatgcaagaggaatggacagtgaagatgaaggctaccagcagaggacagtatctggcagaagaaggggagttattgcctccgaatcggagggatctgaagatagttactatgctgctggagctcaagaagacgaggaacctcgccaaacaaggaaacaaagctctccgttggaggaagaaagagatcatgaagtagttcgtgatgtgtttggtgatagcgatgaagatgaaccagctccatatcgtgttcgccatgaaatcgatgaagattctcatgtctcacatggaggatgaaggccattatgagaaggacatgcaaccagatgacgttgtggctgacgaagatatgcgatatgaatctgatgataatcgtgaactgaaaccaaaagagaaaccagtcggtccaccactagacttggtggttccatttaagcaaccaccagctcgacctgacaaaatgaatgtgatcaaggtatcaaacattatggggattgaccctaaaccctttgatccaaaaacatatgtggaagaagatgtttttgttacagatgaatctgggactaagaaaaggatacggctagaggacaatattgtgcggtggagaaccattaggaatgcagatggcactacatcttgtgaaagcaatgcacgctttgtaaaatggaaggatgggactatgcagcttctgattggcaatgaggttcttgatatatctgtacatgaggcgcatcatgaccagtcccatctgtttttgaggcatgggaagggaattctacaatcacaaggaaggcttttgcacaaaatgcgatttatgccatcctccctgtcttcaaagtcgcatcgcttattaactgctctggttgattctcagaataagaaaactgttaagatgcaaaaatggtttgagactaaggatcctgagaaagcgaaaatggaaaaagaaagggttttgggccaaaatattcgagcccattcaatccttcaacgcaaaagagaaaaagtgaaccgcaagtacacacagcctgcccgtccaaggcggcagctttctccagggttcttggaagacgctctagatgaggatgatgagcctggctatgattctcggcgaatgccaggccgtaggcgttttgaggatgaattggaggctgaagcactagctgagaggcgtatcattaacgcgaagaagtcaaatatgagcagaaatgttccccacaaaccaccgtaccctcctgcccgtccaccgagacgtcaagcggatgaatactcggggagtgagagggaggagtcagagtacgaaacggatggcgaggatattgaacattcactgcctcgtggaagaagggaggacgagctggatgaggaggaagaatacgaggaagatgttgaagaagaagaagcgcctctgtcggatgaagaaatggaggcaccgaaacgtaagagagaatcagggggtggtgggcaaaggcgcgaggagctggtgtctgaggaggacgacgaggaccacgacgattctccgccaaggaagcagccggctgtttcgcatcgtagaaaggctgtcgtgtttgatgacagcgacgaggactaaaatttgtaaaaccgtatgacgacctgacatgatacgcttgctttttctccccatttgtttaagagaatgattagttatttttcgtcatgctggtgtaatatggttgcaattctacctacagaggtgagattgtacatgctttaatgatgcgtgggctacagtgaaaggaaacgcaagcatgaaacgatttttttttctttttggttagaaaggaacagcgaaacatgaagaaatcgataattggattggagcacgttcataatagaaccacaataacgtactggaaataaaaaaaaaaactgaatgctgg

SEQ ID NO: 23612 - DNA, 2542 bp, Zea Mays
cgatctttcggaaaaaggtgaggcccaacacctctgcctcgcaccagtaccacaacgccacgacacgccggcgaggtggacgagcggcggcgatggcgggcggcgaccgggagcgagacgcggacgaggagacgaggaatcagatgatgcagaaccttttcggggaccagtcggaggacgaggacgatgcggacgacgacgacgtcgccgagatggtcgatgaggacgacggccaccagccgcagtcgcccccgcagtcgcccccgcagcgccaccaggagctggacgacgatgcctacgacgatgaggaggaggacgcccgcagccacgcgcccgcccgcgcaagcggataccactccgaggaagtggatggtgaggcagagaatggaggggaaggggaaggcgaaagtgaagggcaagttgtaatcgaagaggaaagtgaaggtgaagctcatggtgccgatcttgatcaaggagaaagtgatggggacaaagtccagagctccccagaaagagaactcgatgaccagaggatggaacctgatgcaagaggaatggacagtgaagatgaaggctaccagcagaggacagtatctggcagaagaaggggagttattgcctccgaatcggagggatctgaagatagttactatgctgctggagctcaagaagacgaggaacctcgccaaacaaggaaacaaagctctccgttggaggaagaaagagatcatgaagtagttcgtgatgtgtttggtgatagcgatgaagatgaaccagctccatatcgtgttcgccatgaaatcgatgaagattctcataggtctcacatggaggatgaaggccattatgagaaggacatgcaaccagatgacgttgtggctgacgaagatatgcgatatgaatctgatgataatcgtgaactgaaaccaaaagagaaaccagtcggtccaccactagacttggtggttccatttaagcaaccaccagctcgacctgacaaaatgaatgtgatcaaggtatcaaacattatggggattgaccctaaaccctttgatccaaaaacatatgtggaagaagatgtttttgttacagatgaatctgggactaagaaaaggatacggctagaggacaatattgtgcggtggagaaccattaggaatgcagatggcactacatcttgtgaaagcaatgcacgctttgtaaaatggaaggatgggactatgcagcttctgattggcaatgaggttcttgatatatctgtacatgaggcgcatcatgaccagtcccatctgtttttgaggcatgggaagggaattctacaatcacaaggaaggcttttgcacaaaatgcgatttatgccatcctccctgtcttcaaagtcgcatcgcttattaactgctctggttgattctcagaataagaaaactgttaagatgcaaaaatggtttgagactaaggatcctgagaaagcgaaaatggaaaaagaaagggttagcaaatcactattacttcattatctggtgtatgtaacacaggatgtgcatgtcttgcttttgtccaatatagctgcttgaactaagatccctagttcaggttttgggccaaaatattcgagcccattcaatccttcaacgcaaaagagaaaaagtgaaccgcaagtacacacagcctgcccgtccaaggcggcagctttctccagggttcttggaagacgctctagatgaggatgatgagcctggctatgattctcggcgaatgccaggccgtaggcgttttgaggatgaattggaggctgaagcactagctgagaggcgtatcattaacgcgaagaagtcaaatatgagcagaaatgttccccacaaaccaccgtaccctcctgcccgtccaccgagacgtcaagcggatgaatactcggggagtgagagggaggagtcagagtacgaaacggatggcgaggatattgaacattcactgcctcgtggaagaagggaggacgagctggatgaggaggaagaatacgaggaagatgttgaagaagaagaagcgcctctgtcggatgaagaaatggaggcaccgaaacgtaagagagaatcagggggtggtgggcaaaggcgcgaggagctggtgtctgaggaggacgacgaggaccacgacgattctccgccaaggaagcagccggctgtttcgcatcgtagaaaggctgtcgtgtttgatgacagcgacgaggactaaaatttgtaaaaccgtatgacgacctgacatgatacgcttgctttttctccccatttgtttaagagaatgattagttatttttcgtcatgctggtgtaatatggttgcaattctacctacagaggtgagattgtacatgctttaatgatgcgtgggctacagtgaaaggaaacgcaagcatgaaacgatttttttttctttttggttagaaaggaacagcgaaacatgaagaaatcgataattggattggagcacgttcataatagaaccacaataacgtactggaaataaaaaaaaaaactgaatgctgg

SEQ ID NO: 23613 - DNA, 1204 bp, Zea Mays
aaaaagtatcacatgttcctaatcacgcgtgcatcatggacaaaattcttgaacgctatgagcgatattcctatgctgaaaaggctcttatttcagctgaatctgaaagtgagggaaattggtgccacgaatacaggaaactgaaggccaaaattgagaccatacaaaaatgccacaagcacctgatgggagaggatctagagtctttgaatcccaaagagctccagcaactagagcagcagctggagagctcactgaagcacatcagatcaaggaagagccaccttatggccgagtctatttctgagctacagaagaaggagaggtcactgcaggaggagaacaaggctctgcagaaggaacttgcggagaggcagaaggccgtcgcgagccggcagcagcaggtgcagtgggaccagcagacacatgcccaggcccagacaagctcatcatcgtcctccttcatgatgaggcaggatcagcagggattgccgcctccacacaacatctgcttcccgccgttgacaatgggagatagaggtgaagagctggctgcggcggcgcagcagcagccactgccggggcaggcgcaaccgcagctccgcatcgcaggtctgccaccatggatgctgagccacctcaatgcataaggagagggtcgatggatcatgacgtacgcgtaccatatggttgctgtgcctgcccccatcgatcgcgagcaatggcacgctcatgcaagtgatcattgctccctgttggttaaaccctagcctatgttcatggcgtcagcaactaagctaaactattgttatgtttgcaagaaagggtaaacccgctagctgtgtaatcttgtccagctaccatgtatgcttgttactgcccagttacccttgaaatctaggggcgcttttggtgagagggtgcagtttactttaaacatggttcgtgacttgctgtaaatagtagtattaatcgatttgggcatctagtaagtaaattaagggtgtgtttgatttggcttttactctctaaaagttaaaagctaaattaaagagctggatctagaaaatagacttttctaaaagccgactttgtgatggtgcaaaattgaaagcgtcttagcttttggctaaagagttgtttggtttgactcttttgtcctctaaaaaccaaaagtcaaaccaaagagctagatctaaaaaca

SEQ ID NO: 23614 - DNA, 1904 bp, Zea Mays
aaacgacaggctcacaagtccaaacagaaaccaagcacaaggaagaacagcataccatcttgttccaagagcactgttctttctatctataccatcatataacacacatcaccgctttaaattttgcaaaactcactcgatcaacgtaccaaatcacccgacacgcactcataacctccgttaaatccacaaaacaaattgcacttagaataacgcaacatcaatatttaaaagtgagaaatcaaagctcctcgtctttgcagtcgtctagcgccaagaagcaaggataacgttctagctttgggacataggccgttgaagatatgatcgatcagacggggcctagatctaatctagctagctagcaagtgaccatatcttatcctttgtagccagtacccaccatgccgccgccatgcgtaatgtggcgtcgacgtcacaatatatagggtagcccaccagctagcctccggtcgtggcacgccggccggccggccattgttcgttggcagcgagagttggagcgacgggcaagccaatccagcatgggcggcggcggcggcgtgcatcggcgagcggcggcgctgctcttcgtggtggtgctagccgcggtggatcaggccggcaaaagcgtctgcgaggcgcagctccggcgcgggtactacgccggcgtgtgccccgacgtggagtccatcgtccgcggcgtggtggccaggaaggtccagcagacggcagccacagtcggcgccaccgtgcgcctcttcttccacgactgcttcgtcgagggctgcgacgcgtcggtgatggtggcgtcgacggcgaacaacacggcggagaaggaccacgtcatcaaccagtccctggccggcgatggcttcgacacggtgatcagagccagggcggccgtggacgccgtgccggggtgccgcggcaaggtgtcctgcgccgacgtgctcgccatggccaccagggacgccatcgcgctggtgaacgaatgcgcgcaggccggcgggccgtcgtacgctgtggagcttggtcggctggacgggctgaggtcgacggccagcagcgtcaacgggaggctgccggcgcccttcttcaacctggaccagctgagccagatgttcgccgccaacgggctgtcgcaggccgacatgatcgccctctcagccgggcacacggtggggctggcacactgcggcacgttctcgggacgtctgcgggggccgtcggcgccggaccggacgctggactcggggtacgcggcgcagcttgcggcgtggtgcccggccggggtggacccgcgggtggccgtggccatggaccccgtgacgcccgtcgccttcgacaaccagttcttccgcaacctgcaggccgggaagggccttctggcgtcggaccaggtgctgcacgcggaccctaggtccaggcccaccgtcgacgcgctggcccagagcagcgtggcgttcgagcgggccttcgtggaggccatgacgaagatgggccgcgtcggcgtcaagacggcccgggaccggcagggcaacgtccgccgcgactgtgccgtgctcggctgattaattaataatacagacaggcctttcgatgtttttattcagtttgctccggactttttaacgtacgtgcgtacgcacggcggattgccacatgcatgcactgatacgtatctatacgtatcggatcgtgtcgtctactactacagctgggtacgtacgtcactggtgaattgaagtttacacgtagctagattgattgattaggtcctttggcattgggaaggaacgaaacaacctaccacactagtctcacctaatactgattctagcgcgtccgtatatctaatctaacgactttatacgcaaaagaaatgttatggatttatggcc

SEQ ID NO: 23615 - DNA, 4528 bp, Zea Mays
atggctgtaggtaataaggctgtggcggctgtggttatggtcgtgacgatcctgtcatcggcggccgccgtccatctggctccgcccacgcccacggcggtgatcagaaagcttctgcagcaggaggaggacgactgcttgccacccatgattattggcagttgctgcaccggatgcggtcttttcccttttcatggtcctgtaggacgctgctgtgatcctgataacaacgtctgcacgctggtgcccggcgatggcagcgatttcgaagcttgcgtgcctcgtgatattcttgtagtggctccagactttgggtacctctgtgacacaaacaaagatagtgttcacgcacaacgtatccgcaagacccagcaggcaccaattgctacctggacaaggagaatcagacacacattggaatgtctttctcctagagttggaggagcactcaagtcgcaccttgacgtcgccaccatactgtccaagtactgtgcgtacctggtggtctcagcaccaaagttgcttcctgggaaccactatgactctagccttgtgtttgatgcagtcgcagtggaggccgcgcagtttctgcggggagtggaagacgggtatgaagccttgagaagcttgcctgaatcaacagaaacagaattatccatcctccggaggggggtgaagctggcgaggcagctcgaggagatggagtgtgacaggtgttggaaggtgctcgcggatttctggtcagagatgttgctctacatcgcgccatcggagaatgtgaaggagcacatcgaggcactggcaaatggaggggagttcataacacactggtgggcgttgctcacccacgctggcattctagataggaatgtccacagtgcgtgacatagaaaatccatctacaaactcaggccacaaatcaacagccaatgggaatatctgagaaaccttcacgttagagagagatgcaagcagcaaaccgcggcttcggagacgaggagaagagcagggtagggtaggtgtgcttgtgacaagagctgaaggctgcaatgcacatgctctctgctgaagcagcaaaccgcggcgaggtagcagggatatggtggcttcagtcggcggcgatggttgggtcgtctgcaggagattacgacatggtcgatcgtctaagggcttcggccttggatcgcttccaaacagtggatcgtcgggctttgcgtggtcggggccccagacttgatcgtggtcgcggctcatggcgtggccgtggtgggcgctttggtgggcgctcgtttctggaatctgatagaagagtcatccgagacatgcctgaatcgagcagaggggtcgtgtcatccaatgcttttgatgaagatgctaaaaagagagcagcagacacagtagatgacggcgccctggctgatggcaagggcaagaaacgccgtgaggatctctgctgtgagatttgtgagggagaccatgtgccgcttgactgtcaggtatacaatggtcctaaaccccatgccattctttgcggttttgggagtggtgaatctgggttctttcaaattcccaactttggttcaaaggggttgatcccgctgaaagaaagttcaactgcttttatcactgccaaggaaggcaccattacggcagagttagtaaagtctgagttggctcgtctcattccggtgagatggacttgggctgtccaaagtcatgcgaatggtttcgttgtaccttttccgtccaaagtcgaattacaacggatggtggccatgaaatttgttcatgctgtagatggtaaaagcataatggtcattcaagaacttgagcagaaaatagagcccgttcaacatttggaaaaggcttgggtcaatatctacggagtgccgtatgaaattcgatcttttcttcctctttgggcggtgggcaccattataggtgctacccagaaagtcgatctaagatatacaaaacagatgggtgttgttcggctcttagttggtgtaacaaacgtcgacaagatcccagaatcggttgacatagtggtcggggaaggcttgtatgaaattttctttaaaattgataaggtttgcaaagatggagtttggtcagaatattattacccttctgataagaaagatgatgattttgaatccaaggatgaggattttgatgggctcgatgatatccagcctaagtttgatgataccaccagggacactgtgatgaaagatgtgtccggtagcaaagttgataattcttctaatgtccaacatgctactcagcagaattgtgatattcgtcaaaccgatgcgctagaaaaatgcttagttgctgttaataggtcttcagtttttagggagaatgttgcagcaccaactgctgttgcgcatggggtcgtttatgataataagtggacagaggctgaaggcacaattattctgaacgccaagcaaactgcacaaaagagagatatgccacagatttacccagttgctgctcctagggctgcagagtctagaaaaaataatgatgtaccttttgatgtagtgagcaggactgttggtagagaggggcatgtagatgccgatgcatttaacctgaacaccatatgccatgaatctgggaaaaaggcagctgcaccttttgttgtagtgtgcacagctgatgcgagtgaggggtctgttgatgccaattcaatctgcctgaattcctttcctggtgttcctgcgagtgcagcagctgtttatccaatttcattggaagacatcaacacagacctcaacagtgtggcgattgaattttcgccagcaacaaatattcatgcagctattccaaatgtatcagttgagcagatacatgagcatgtccggggagctgagcactcggtggctcagctcacctctcccggtggtgcagatgggagtggggctcttgttgaaaatttctcactccaagacatggagactttaatatcgtgcatacatgcatggaccatggtggtggtaccttcaatatgataacttctttgtcagaggtaccgagagttactttacaacatttatgcaaacaatttaagattaaagctaatataaaaaatgatgaaatggtacaggcgctcaatcagttggcccagtcaaatgaccaaatcttgatttctcttcaagattattttaaatcaaaatctctttctcaaagaccaatggcccgagaagatcttactcaggtcttgggcaagcgggtggtttctgatgaggacactttaagcaaggctcagcgtcttgcggcaaagcgcaatttagaaatcagtgagtattcatttcttccttttaagcctaaagttattgctaccaagttaaataatgttgggattcgcttgggcagaaatgataaagaggttcttacctcagctatttctattaagaatatagaggtcgatcgactcatggcttctagtatttcatccccatccattcgtcgtgctgttttaaatgaagaagatgataatgacattgatgaacatctttcacatgctattaagcgatgggatgaaaattctgagcatgatgatctagagtggggatacgaccttagtgctgttccatgccgtaagaaggcgaatcactttacttatgcatggagggttcctcggccttctaaaaaacccatcacaccatctaaaattagtttaaaatgaagggaattttttggaatagcagaggtctcgctgacttggctaaacataattaccttgcgtcgttatctaaaaaatatcgacttgactttttagcgatctttgagacgggcagggactttttctcggagtccactttgcgccatttaagtggtggtatagattttctttggcatactatgccacctagagggagatctggtggtatgattttaggtgtaaatccagctgttttagacgttggagctatcgatgagggggatcattactctaaatttctccttagaaataaatcagatgattttaaatggtccctttatgcagtgtacggcccgactcaggacaatctcaagaatgcttttttagcagagatggttaatgtagctggtgcggaactgaacccttttattatagggggagatttcaatataatgaggcggccagaggataaaaataaagataacttcaatccccgatggcctaatctatttaatgctgtcatagagagccttgagataaaagaaattgaattaaaggtcgtcaatttacttggtcaaacaacttagaccctccaacacttgaaaaactagatagagtttttatgagtatcgattgggaactaaaataccctaatgccactgttgaagcgcttcatagatcacgctcgggccatacaccattattactcatcgacaagattgcctcacaatttggcactcgatcgttgtttaaatttgagttaggatggcttattagggatgggttccatgatatggttgcatcgatttggcagcagcatacgaggggatattcagcgatggagaaatggca

SEQ ID NO: 23616 - DNA, 1114 bp, Zea Mays
atggctgtaggtaataaggctgtggcggctgtggttatggtcgtgacgatcctgtcatcggcggccgccgtccatctggctccgcccacgcccacggcggtgatcagaaagcttctgcagcaggaggaggacgactgcttgccacccatgattattggcagttgctgcaccggatgcggtcttttcccttttcatggtcctgtaggacgctgctgtgatcctgataacaacgtctgcacgctggtgcccggcgatggcagcgatttcgaagcttgcgtgcctcgtgatattcttgtagtggctccagactttgggtacctctgtgacacaaacaaagatagtgttcacgcacaacgtatccgcaagacccagcaggcaccaattgctacctggacaaggagaatcagacacacattggaatgtctttctcctagagttggaggagcactcaagtcgcaccttgacgtcgccaccatactgtccaatcgcagtggaggccgcgcagtttctgcggggagtggaagacgggtatgaagccttgagaagcttgcctgaatcaacagaaacagaattatccatcctccggaggggggtgaagctggcgaggcagctcgaggagatggagtgtgacaggtgttggaaggtgctcgcggatttctggtcagagatgttgctctacatcgcgccatcggagaatgtgaaggagcacatcgaggcactggcaaatggaggggagttcataacacactggtgggcgttgctcacccacgctggcattctagataggaatgtccacagtgcgtgacatagaaaatccatctacaaactcaggccacaaatcaacagccaatgggaatatctgagaaaccttcacgttagagagagatgcaagcagcaaaccgcggcttcggagacgaggagaagagcagggtagggtaggtgtgcttgtgacaagagctgaaggctgcaatgcacatgctctctgctgaagcagcaaaccgcggcgaggtagcagggatatggtggcttcagtcggcggcgatggttgggtcgtctgcaggagattacgacatggtcgatcgtctaaggttcttttcagggcaacatactggct

SEQ ID NO: 23617 - DNA, 2422 bp, Zea Mays
atggctgtaggtaataaggctgtggcggctgtggttatggtcgtgacgatcctgtcatcggcggccgccgtccatctggctccgcccacgcccacggcggtgatcagaaagcttctgcagcaggaggaggacgactgcttgccacccatgattattggcagttgctgcaccggatgcggtcttttcccttttcatggtcctgtaggacgctgctgtgatcctgataacaacgtctgcacgctggtgcccggcgatggcagcgatttcgaagcttgcgtgcctcgtgatattcttgtagtggctccagactttgggtacctctgtgacacaaacaaagatagtgttcacgcacaacgtatccgcaagacccagcaggcaccaattgctacctggacaaggagaatcagacacacattggaatgtctttctcctagagttggaggagcactcaagtcgcaccttgacgtcgccaccatactgtccaagtacttcgcagtggaggccgcgcagtttctgcggggagtggaagacgggtatgaagccttgagaagcttgcctgaatcaacagaaacagaattatccatcctccggaggggggtgaagctggcgaggcagctcgaggagatggagtgtgacaggtgttggaaggtgctcgcggatttctggtcagagatgttgctctacatcgcgccatcggagaatgtgaaggagcacatcgaggcactggcaaatggaggggagttcataacacactggtgggcgttgctcacccacgctggcattctagataggaatgtccacacaaaccgcggcgaggtagcagggatatggtggcttcagtcggcggcgatggttgggtcgtctgcaggagattacgacatggtcgatcgtctaaggtaagtactcccgttcgtgttgcaggcagttctgcgtcttcgtcagggcttcggccttggatcgcttccaaacagtggatcgtcgggctttgcgtggtcggggccccagacttgatcgtggtcgcggctcatggcgtggccgtggtgggcgctttggtgggcgctcgtttctggaatctgatagaagagtcatccgagacatgcctgaatcgagcagaggggtcgtgtcatccaatgcttttgatgaagatgctaaaaagagagcagcagacacagtagatgacggcgccctggctgatggcaagggcaagaaacgccgtgaggatctctgctgtgagatttgtgagggagaccatgtgccgcttgactgtcaggtatacaatggtcctaaaccccatgccattctttgcggttttgggagtggtgaatctgggttctttcaaattcccaactttggttcaaaggggttgatcccgctgaaagaaagttcaactgcttttatcactgccaaggaaggcaccattacggcagagttagtaaagtctgagttggctcgtctcattccggtgagatggacttgggctgtccaaagtcatgcgaatggtttcgttgtaccttttccgtccaaagtcgaattacaacggatggtggccatgaaatttgttcatgctgtagatggtaaaagcataatggtcattcaagaacttgagcagaaaatagagcccgttcaacatttggaaaaggcttgggtcaatatctacggagtgccgtatgaaattcgatcttttcttcctctttgggcggtgggcaccattataggtgctacccagaaagtcgatctaagatatacaaaacagatgggtgttgttcggctcttagttggtgtaacaaacgtcgacaagatcccagaatcggttgacatagtggtcggggaaggcttgtatgaaattttctttaaaattgataaggtttgcaaagatggagtttggtcagaatattattacccttctgataagaaagatgatgattttgaatccaaggatgaggattttgatgggctcgatgatatccagcctaagtttgatgataccaccagggacactgtgatgaaagatgtgtccggtagcaaagttgataattcttctaatgtccaacatgctactcagcagaattgtgatattcgtcaaaccggtgtgccttctgactttggttctttggctcaaagtactgaaagttttattcctcatattaatacatcttctcttgattgctcagatgcgctagaaaaatgcttagttgctgttaataggtcttcagtttttagggagaatgttgcagcaccaactgctgttgcgcatggggtcgtttatgataataagtggacagaggctgaaggcacaattattctgaacgccaagcaaactgcacaaaagagaggtgaattttctaggaccggtgggccttcttcttacttggcttctatggttcaacttaatgaaggttcttttcagggcaacatactggct

SEQ ID NO: 23618 - DNA, 255 bp, Zea Mays
ggacgtttctacaaacaaagtagcttcgcccctgtgcttgctataggatccaaataacacccttggagcagctgacttgactttgtgtctgctgcagtaggcgcttgtataaagtgtgtcctttacgaagccagagagcacattgctatctggagcacacagggctttaggaggtaggtaggaagggagatcagttcgtcgacccatcccggggatggctaactgcacggttcttttcagggcaacatactggct

SEQ ID NO: 23619 - DNA, 4255 bp, Zea Mays
tctggagcacacagggctttaggaggtaggtaggaagggagatcagttcgtcgacccatcccggggatggctaactgcacggcacaatatgctcctctcagacccagcaggcaccaattgctacctggacaaggagaatcagacacacattggaatgtctttctcctagagttggaggagcactcaagtcgcaccttgacgtcgccaccatactgtccaagtactgtgcgtacctggtggtctcagcaccaaagttgcttcctgggaaccactatgactctagccttgtgtttgatgcagtcgcagtggaggccgcgcagtttctgcggggagtggaagacgggtatgaagccttgagaagcttgcctgaatcaacagaaacagaattatccatcctccggaggggggtgaagctggcgaggcagctcgaggagatggagtgtgacaggtgttggaaggtgctcgcggatttctggtcagagatgttgctctacatcgcgccatcggagaatgtgaaggagcacatcgaggcactggcaaatggaggggagttcataacacactggtgggcgttgctcacccacgctggcattctagataggaatgtccacacaaaccgcggcgaggtagcagggatatggtggcttcagtcggcggcgatggttgggtcgtctgcaggagattacgacatggtcgatcgtctaagggcttcggccttggatcgcttccaaacagtggatcgtcgggctttgcgtggtcggggccccagacttgatcgtggtcgcggctcatggcgtggccgtggtgggcgctttggtgggcgctcgtttctggaatctgatagaagagtcatccgagacatgcctgaatcgagcagaggggtcgtgtcatccaatgcttttgatgaagatgctaaaaagagagcagcagacacagtagatgacggcgccctggctgatggcaagggcaagaaacgccgtgaggatctctgctgtgagatttgtgagggagaccatgtgccgcttgactgtcaggtatacaatggtcctaaaccccatgccattctttgcggttttgggagtggtgaatctgggttctttcaaattcccaactttggttcaaaggggttgatcccgctgaaagaaagttcaactgcttttatcactgccaaggaaggcaccattacggcagagttagtaaagtctgagttggctcgtctcattccggtgagatggacttgggctgtccaaagtcatgcgaatggtttcgttgtaccttttccgtccaaagtcgaattacaacggatggtggccatgaaatttgttcatgctgtagatggtaaaagcataatggtcattcaagaacttgagcagaaaatagagcccgttcaacatttggaaaaggcttgggtcaatatctacggagtgccgtatgaaattcgatcttttcttcctctttgggcggtgggcaccattataggtgctacccagaaagtcgatctaagatatacaaaacagatgggtgttgttcggctcttagttggtgtaacaaacgtcgacaagatcccagaatcggttgacatagtggtcggggaaggcttgtatgaaattttctttaaaattgataaggtttgcaaagatggagtttggtcagaatattattacccttctgataagaaagatgatgattttgaatccaaggatgaggattttgatgggctcgatgatatccagcctaagtttgatgataccaccagggacactgtgatgaaagatgtgtccggtagcaaagttgataattcttctaatgtccaacatgctactcagcagaattgtgatattcgtcaaaccggtgtgccttctgactttggttctttggctcaaagtactgaaagttttattcctcatattaatacatcttctcttgattgctcagatgcgctagaaaaatgcttagttgctgttaataggtcttcagtttttagggagaatgttgcagcaccaactgctgttgcgcatggggtcgtttatgataataagtggacagaggctgaaggcacaattattctgaacgccaagcaaactgcacaaaagagaggtgaattttctaggaccggtgggccttcttcttacttggcttctatggttcaacttaatgaaggtagtaattctaatattaattcgcattctcttcattgctcagatatgccacagatttacccagttgctgctcctagggctgcagagtctagaaaaaataatgatgtaccttttgatgtagtgagcaggactgttggtagagaggggcatgtagatgccgatgcatttaacctgaacaccatatgccatgaatctgggaaaaaggcagctgcaccttttgttgtagtgtgcacagctgatgcgagtgaggggtctgttgatgccaattcaatctgcctgaattcctttcctggtgttcctgcgagtgcagcagctgtttatccaatttcattggaagacatcaacacagacctcaacagtgtggcgattgaattttcgccagcaacaaatattcatgcagctattccaaatgtatcagttgagcagatacatgagcatgtccggggagctgagcactcggtggctcagctcacctctcccggtggtgcagatgggagtggggctcttgttgaaaatttctcactccaagacatggagactttaatatcgtgcatacatgcatggaccatggtggtggtaccttcaatatgataacttctttgtcagaggtaccgagagttactttacaacatttatgcaaacaatttaagattaaagctaatataaaaaatgatgaaatggtacaggcgctcaatcagttggcccagtcaaatgaccaaatcttgatttctcttcaagattattttaaatcaaaatctctttctcaaagaccaatggcccgagaagatcttactcaggtcttgggcaagcgggtggtttctgatgaggacactttaagcaaggctcagcgtcttgcggcaaagcgcaatttagaaatcagtgagtattcatttcttccttttaagcctaaagttattgctaccaagttaaataatgttgggattcgcttgggcagaaatgataaagaggttcttacctcagctatttctattaagaatatagaggtcgatcgactcatggcttctagtatttcatccccatccattcgtcgtgctgttttaaatgaagaagatgataatgacattgatgaacatctttcacatgctattaagcgatgggatgaaaattctgagcatgatgatctagagtggggatacgaccttagtgctgttccatgccgtaagaaggcgaatcactttacttatgcatggagggttcctcggccttctaaaaaacccatcacaccatctaaaattagtttaaaatgaagggaattttttggaatagcagaggtctcgctgacttggctaaacataattaccttgcgtcgttatctaaaaaatatcgacttgactttttagcgatctttgagacgggcagggactttttctcggagtccactttgcgccatttaagtggtggtatagattttctttggcatactatgccacctagagggagatctggtggtatgattttaggtgtaaatccagctgttttagacgttggagctatcgatgagggggatcattactctaaatttctccttagaaataaatcagatgattttaaatggtccctttatgcagtgtacggcccgactcaggacaatctcaagaatgcttttttagcagagatggttaatgtagctggtgcggaactgaacccttttattatagggggagatttcaatataatgaggcggccagaggataaaaataaagataacttcaatccccgatggcctaatctatttaatgctgtcatagagagccttgagataaaagaaattgaattaaaggtcgtcaatttacttggtcaaacaacttagaccctccaacacttgaaaaactagatagagtttttatgagtatcgattgggaactaaaataccctaatgccactgttgaagcgcttcatagatcacgctcgggccatacaccattattactcatcgacaagattgcctcacaatttggcactcgatcgttgtttaaatttgagttaggatggcttattagggatgggttccatgatatggttgcatcgatttggcagcagcatacgaggggatattcagcgatggagaaatggca

SEQ ID NO: 23620 - DNA, 5069 bp, Zea Mays
ctcaaagattgcattgcagggatctgaatccttcgcattcatcgtacgagagtgacgacgaactgaagacgatcctgttcatcagttagttgggcgaaaagttagctgtagcagctgactgccatttttctgtcgctcccagccgactccggactggatttttggcagcaggtgctctaggccatctgggtcgctggattccatttgcacggtcaagaagatccatggccgctctctctttctgacccatggccccacctggaggccggtgcagagcacggagcggtagatcctttcctcacctgctgcgccgccggcccggacaccaccatggaagcagatccgccgccggagagtgcgacggaggaggaggcgggcacgacagtcctggggtaggagatccctaaagtaagtaccaaatcaccagcagattttagtccatggacaccagctttaggagtggcagaacatgcatcacttgctaagctagcaatctgaattttttttcgtgaccttcatatcgttggtgctctacagagaaagagaacttacatatatatatatatatatggtgatggctaggggtgtttgtttgggattataatctacccagattatgtaatccttattttggacagcttataatcctaaacaaagaaagtcaaacatgtgaatccggtgaactggtagcaaactgtaaacaaagaaagccaactggttcaacggtcaagggctggtaagccaactggtagcaaactgtaaacaaagaaagcaaaaggtaaaaccagaacaatccggtgaagccaaaaaccactacaaaaagtcaaacatgtgaatggactattgactatatgtcagtttagttattcttagaaatcttacctatctggcccgtttttttttaaaaaaaatccctttttcctctccatggagtttcccatcacaagcatagattacgcagtttcagcaacgtcaaagcacacagagtttcctgctgaggagagcgagatagagctcccaaatggaagctttcctttccgctgtcctgggtgagctgacgagtcgatccataaatttcatcatcaacaagtgctcgaagccacctgcaatggctgtggaggaaagcctgcaaagggctcttcttcaggcacgggccatcatcgaggaggcagtgggacgtcgcatcacaaaccaagccatgatccagcagctgggcatgctgagggacaccatgcaccgaggctattacgcacttgatgcgttcaggtaccagcctcgctatggagaggacggaaacgttccagctgttaggcgctttatttccctatcaaaggtacactctgtgaaggatccctatttctcctgccgaactgcacagttccgtgaacaactacaggatgcgctagacaggctgagctccatgattgttgatctgaatgagttggtggtgttcttggcgagctaccctcgtctgtatcgccagccttacaacatgcatatcctactcggtaactgcatgtttggtcgccaagtggaagcagaacttgtcactgagttcctgttgcacacgcagcctcatagtctccaagaattggaggtcctgccgattgtcggtccactcagagttggcaagagtaccctcgtcgctcatgtttgcaaggatgaaagggtccgcgagtatttctcagaaattttgtggctgtacgaccatgattttacagatgacgagctagctttcaaacaaggatgtgcaatggaaaatcaaatttcgaacctgaacaaagacaagagagtgctagttgttgtagaactatctggagatctctatgaagatgcttggaataggttgtatcttgcttccaaacagagcatctgtagcgggagtaaaatcatagtcacaagccgttcagacaagattgtaaggtttgggacaacacgggctctaactcttaagcttttgtcccatgaggcatactggtatttcttcaaggtacttacgtttggaagcaatgatcccaacacgcacccaaggcttgcccaactggccatggagatagccagaaagctaaattgttcaattaatggtgcatatgtcacctcttatttgttgagggacaattttaacgtacacttttggtgtaaggttctgagctttttgagctggtgcatccagaagcatatctccaaatttggggtgcatccttctgttctttttagtcaaaatgtacctgtagagcttggtagaatggctgcgccttctgaagatttcatgctttgtgatcagtatcaccggtcttcccaagaagaggttccagagataagaatccaagatgtgatgtatggaagcatcaagagacatggaaaatttgatgtattagtatggagatctcagatacccccctactacagctatgtcaatgcttgtgtgattcaagagcgaaaaaatacaggtggaaagaggaagcgttgcatcaacgatggagccacagtctcttaattttgtcatttcctggtttatgctagaacatatatattttgattcacttttgggggtaggatgtcataagttacgggcctacattttattatcataaatgaagtgcttatttacataataatgcatgagcctgaggcatatattttcatgaaacatggtgaatcctttcctgtcgttggtttagtccagatagccgcgtcagcctaggcttcagtgctcaagcctgtgttttttactttatattttgagttcaacccatgtcacacccggatttaaggaacataataatgcatgagcctgaggcatatattttcatcaaacatggtgaatcctttcctgtcgttggtttagtccagatagccgcgtcagcctaggcttcagtgctcaagcctgtgttttttactttatattttgagttcaacccatgtcacacccggatttaaggaacataataatgcatgagcctgaggcatatattttcatcaaacatggtgaatcctttcctgtcgttggtttagtccagatagccgcgtcagcctaggcttcagtgctcaagcctgtgttttttactttatattttgagttcaactcatgtcacacccggatttaaggaacataataatgcatgagcctgaggcatatattttcatcaaacatggtgaatcctttcctgtcgttggtttagtccagatagccgcgtcagcctaggcttcagtgctcaagcctgtgttttttactttatattttgagttcaacccatgtcacacccggatttaaggaataaagccaggtgtgtctcatatatgcgccaaagaaaaacatcacatataatgacaaaatgtatagagataaatgtcacaaatattattattacatagcggaagtcttacaaaaataaatgagaacaataaagcgaactaagtattattccttggcgccatcaagctgactgggagacgtcatctagataagctcgtactcctcgtaatagggctcctcctggatcgcttgttcttctcctggtatgggtttatatatcgcaagagtgagctcacaaaagatcatagctcaacaagttgtgaggaataacgtgcatgaactcacgaaaggtgggaattcatgtgaagtgtaaggttgatcaacaaataagggttaaagctgagcattgcttttaataagttggtcagattttactagcagttactaaatgtaagtagataccaaaccagagtaataataaatcaaaattaataataaaccataatgtgatgcaaatgacaaattgaatttaattccataaattaataatgcgaaagtcctgagctgctcatgaccgcgagcatggcgtataccagttttacactctgtagaggttgtaccctttacccacaagtcatattactcatctgccacggggttgtacggatctcatacacctctaccaaggaagcgaggcagggtaacactacgaggcctttacaaagttacactagcttcagaaaactcgttacaatttctaggaagagcaatgcaggaatctcccgtttgatcgctatcgcagcaaaatcaacacgagaacctccttacacgcccactcccctactgctcttgccctttcgggtaaggtagttctccactagctttcctaattagtcagccaagggcgttccataccacccttgtggtggcacgtgtttatcaagttaagctccatgttccaattaacataatagtcttatcatgaacaaaaatagaacaataataaggaatgatcatgtgtagtagttatctcaacacccaaaaccatatgtagcaataacaaagactaccaaaaaaattcaggggtaaacaaggtgtaaagatgaccaaactagggtcccatcgaaattaaacctatgcatgccaaaatgattatagagaacattattgagtaaatgaaagtggtcaagagcacaacttgctttagactcgagattcccaggtaccaacttgctattcaagtgactcgtaacctcgccgctattcgtagcaatacaaacaaacatggtataggcaaaattaacattacaccaaacaaaagaacaagctttataataatgttatacgtgttactacgaggtcgcaggttcgagaatcactagattctgagttatggttgggaaggtatgattttctaaagtcataggtgattaaaaataaaactatattttgttaatataagtcatgtgggaaaagatatagctaactcaacttttaatccaggttataacttgattagggatttcattttaatcagattataattatagagagattaacctaaattagtggagttaatctactgaatatagattgaacacttgtctaattataaacatatggaatatggtacacatgatgttgctactgcgtagaaaatatttttatgaagctaacgtgacttgaatggactaatttggagtcaaatcgcaaaagttatggattaaggaagtgctagagctatttaatatcaattccatactgagataagtttcaggggtttatctgtgaattccagggaccaaggtgtaag

SEQ ID NO: 23621 - DNA, 1071 bp, Zea Mays
attgcattgcagggatctgaatccttcgcattcatcgtacgagagtgacgacgaactgaagacgatcctgttcatcagttagttgggcgaaaagttagctgtagcagctgactgccatttttctgtcgctcccagccgactccggactggatttttggcagcaggtgctctaggccatctgggtcgctggattccatttgcacggtcaagaagatccatggccgctctctctttctgacccatggccccacctggaggccggtgcagagcacggagcggtagatcctttcctcacctgctgcgccgccggcccggacaccaccatggaagcagatccgccgccggagagtgcgacggaggaggaggcgggcacgacagtcctggggtaggagatccctaaatgtggttctcggcgtgcgcttcatccatggtacatgagcgtgagcacgaggcacacaggtgggctgcgcggctgaaggttacatgggccgacgggtcagctttgggcccaggacgaatgatggaacagccgattgcaagccaagcagaatcccattggttcaagaagatttgtgtggattcaggccgttgaatagcgtagcacactacgtccagttaggtatcccacacctaccttggcgatatttgttttgatgccggtgaagggcggtaagagtttggcctatcagatgtgttggtggttctcatcagatcttagtagcaaatttgtttattaggagaagcaatttattgacttttgatgacctcttgttttggtctgttgtgtagtcatagtccaacacttcgttcagaacttcagatggtgaagatttgtaaggttgtacctattctttttttttatgcagccaaagaaataaaaagtcaacggaatgcgatcaagtgaaggtgaaaggtgtccccatggtcatacatgtgaactgactattgactctctcaatttatttagttggttctggtaaccttatctgaacctgcttcttgagaccaatatgcccatgttctctccttagagatttagtgagaagcacataataaaggatttcagagtcg

SEQ ID NO: 23622 - DNA, 1089 bp, Zea Mays
attgcattgcagggatctgaatccttcgcattcatcgtacgagagtgacgacgaactgaagacgatcctgttcatcagttagttgggcgaaaagttagctgtagcagctgactgccatttttctgtcgctcccagccgactccggactggatttttggcagcaggtgctctaggccatctgggtcgctggattccatttgcacggtcaagaagatccatggccgctctctctttctgacccatggccccacctggaggccggtgcagagcacggagcggtagatcctttcctcacctgctgcgccgccggcccggacaccaccatggaagcagatccgccgccggagagtgcgacggaggaggaggcgggcacgacagtcctggggtaggagatccctaaatgtggttctcggcgtgcgcttcatccatggtacatgagcgtgagcacgaggcacacaggtgggctgcgcggctgaaggttacatgggccgacgggtcagctttgggcccaggacgaatgatggaacagccgattgcaagccaagcagaatcccattggttcaagaagatttgtgtggattcaggccgttgaatagcgtagcacactacgtccagttaggtctgttttacttgcgaggtatcccacacctaccttggcgatatttgttttgatgccggtgaagggcggtaagagtttggcctatcagatgtgttggtggttctcatcagatcttagtagcaaatttgtttattaggagaagcaatttattgacttttgatgacctcttgttttggtctgttgtgtagtcatagtccaacacttcgttcagaacttcagatggtgaagatttgtaaggttgtacctattctttttttttatgcagccaaagaaataaaaagtcaacggaatgcgatcaagtgaaggtgaaaggtgtccccatggtcatacatgtgaactgactattgactctctcaatttatttagttggttctggtaaccttatctgaacctgcttcttgagaccaatatgcccatgttctctccttagagatttagtgagaagcacataataaaggatttcagagtcg

SEQ ID NO: 23623 - DNA, 868 bp, Zea Mays
catggtacatgagcgtgagcacgaggcacacaggtgggctgcgcggctgaaggttacatgggccgacgggtcagctttgggcccaggacgaatgatggaacagccgattgcaagccaagcagaatcccattggttcaagaagatttgtgtggattcaggccgttgaatagcgtagcacactacgtccagttaggtgagttgccctatgttgaattatgagatatatgtgttatgtatcggtcattgatctagaaagccatgtccttttgctgatctagaaagtcatgtcgttctttatatagtccagaaaagcattctagtctgctaaaatgcagaaatcctagctagtaggattgcatggtacaagtattacattcagtggatcctaattaaactaggtctgttttacttgcgaggtatcccacacctaccttggcgatatttgttttgatgccggtgaagggcggtaagagtttggcctatcagatgtgttggtggttctcatcagatcttagtagcaaatttgtttattaggagaagcaatttattgacttttgatgacctcttgttttggtctgttgtgtagtcatagtccaacacttcgttcagaacttcagatggtgaagatttgtaaggttgtacctattctttttttttatgcagccaaagaaataaaaagtcaacggaatgcgatcaagtgaaggtgaaaggtgtccccatggtcatacatgtgaactgactattgactctctcaatttatttagttggttctggtaaccttatctgaacctgcttcttgagaccaatatgcccatgttctctccttagagatttagtgagaagcacataataaaggatttcagagtcg

SEQ ID NO: 23624 - DNA, 1483 bp, Zea Mays
ccctacagccagattttcagaaaagctggtcagaaaaaagctgaaccaaacaggccctagatctctcgtcctcccgcggtcccgccgtcccgattcaccacattcagctcgccgtgttgcgctcactcaaccaaatccaatcccggcggagggaagcgtcgtctaaattccaaccctaggccatggcgaatgcggcttcatccgcatcgtcgccgggggcaggtccctcctcctcgccgcaggccggtggagacgggggaggggacgcgcacacgccgcggcagcggcagggccggcccccgcgcgccggctccgacccgctcctcatcgtctgcggctgcttcagcgtcgtcacggtcgccaccgcgcttctctgcgtcgccgtcaacgtcgtctccgccgtccagtccttccgcgccggctccgatatattcgggggcatattccggtgctacgcggtcgtcttctcgctattcgtcgccgtcctcgagaccgagtgggggttcatcatccgtttctggaagatatttgaatactggcctgcacggggaatgctccagatctttgttgctgtcatgacgaaggcatacccaagtattgaaaggaatgatctcaaattgctccaggagattgccagctacatgcttcttgcatgtggagctgtctatgttgtctcggggatattgtgcattggtgtgctaaaacgttctaggcagcagaaagcaatatcacgggagcaagcagccaaagacctgcaagagttggagaaacggagagaggaacttgaggcattgttacttgctgaacggtcggagttggtttgaaggctgaccaccgtgatctaacaatttatcttctgttgtagataaatgctttcttttttctttttctaatgatagcatactgcttggtcatggccctgagtcattcatccagaagtcacttgattgaagtgtatcttcttctttagtttctggattgcagcttccctcttggtttcagctgaattgtgggcttcttggtttcagagcattgtattgattcatcgtctggggctgtaagattgcagcatgaatttgatgtagcaccctgacttgtgtcgtccaatcctgtcgtggtgagtgacagacacacagagacagagacaagttcaaagtaggcgcacgctgaaggagacagaagaatgcctggagaatatcctcctccggctccgctgtggataagagcacgcaggcaggacccagttgccactacacaaagattactctgaccgccagccagcgatagggacgccggagttgttaatgccgccacccccggcagcgtgcactgcatgcaggcttgccgcttgcagcacgggggagtcgcagaggaaggaggcctgcatctgcatgccaagaacgcccgccgtcggcaacggtgaggttcttggcgtgcgactgtgcggacggttgggggcagcagatgaacagaaaggctgctg

SEQ ID NO: 23625 - DNA, 1126 bp, Zea Mays
cgattcaccacattcagctcgccgtgttgcgctcactcaaccaaatccaatcccggcggagggaagcgtcgtctaaattccaaccctaggccatggcgaatgcggcttcatccgcatcgtcgccgggggcaggtccctcctcctcgccgcaggccggtggagacgggggaggggacgcgcacacgccgcggcagcggcagggccggcccccgcgcgccggctccgacccgctcctcatcgtctgcggctgcttcagcgtcgtcacggtcgccaccgcgcttctctgcgtcgccgtcaacgtcgtctccgccgtccagtccttccgcgccggctccgatatattcgggggcatattccggtgctacgcggtcgtcttctcgctattcgtcgccgtcctcgagaccgagtgggggttcatcatccgtttctggaagatatttgaatactggcctgcacggggaatgctccagatctttgttgctgtcatgacgaaggcatacccaagtattgaaaggaatgatctcaaattgctccaggagattgccagctacatgcttcttgcatgtggagctgtctatgttgtctcggggatattgtgcattggtgtgctaaaacgttctaggcagcagaaagcaatatcacgggagcaagcagccaaagacctgcaagagttggagaaacggagagaggaacttgaggcattgttacttgctgaacggtcggagttggtttgaaggctgaccaccgtgatctaacaatttatcttctgttgtagataaatgctttcttttttctttttctaatgatagcatactgcttggtcatggccctgagtcattcatccagaagtcacttgattgaagtgtatcttcttctttagtttctcttccctcttggtttcagctgaattgtgggcttcttggtttcagagcattgtattgattcatcgtctggggctgtaagattgcagcatgaatttgatgtagcaccctgacttgtgtcgtccaatcctgtcgtgtacgcataaatgcattgctgaataattcacctgatttttgcacttaatgtctcttgtgatgtggtaactcagtccttgagccataattatgattatgttttcatgtat

SEQ ID NO: 23626 - DNA, 2445 bp, Zea Mays
cgattcaccacattcagctcgccgtgttgcgctcactcaaccaaatccaatcccggcggagggaagcgtcgtctaaattccaaccctaggccatggcgaatgcggcttcatccgcatcgtcgccgggggcaggtccctcctcctcgccgcaggccggtggagacgggggaggggacgcgcacacgccgcggcagcggcagggccggcccccgcgcgccggctccgacccgctcctcatcgtctgcggctgcttcagcgtcgtcacggtcgccaccgcgcttctctgcgtcgccgtcaacgtcgtctccgccgtccagtccttccgcgccggctccgatatattcgggggcatattccggtgctacgcggtcgtcttctcgctattcgtcgccgtcctcgagaccgagtgggggttcatcatccgtttctggaagatatttgaatactggcctgcacggggaatgctccagatcttgtaagtgtttttttacttctgtatgaccatatattttcttcttctaattttgtttccaaaactcagcactcaatctgtgtttatatatttgaatgcacaattgagtaaaccacttatgcttggtgctcatccagatacgggatgtgattgttattctttttttttcaagtaattcagaaaaatagatatcagatgaagttgtagatgtgacagtgaggcattgatttgtattgttcagttgtttgttttgttaaacaaaaaaattatctgcttacaatgtcaacttgctttcgccataaacctggaccaagatttgatgagcaacaacaatcatgtgctggattgtattacattcatattccttttacttttggttgctggcagtgttgctgtcatgacgaaggcatacccaagtattgaaaggaatgatctcaaattgctccaggagattgccagctacatgcttcttgcatgtggagctgtctatgttgtctcggggatattgtgcattggtgtgctaaaacgttctaggcagcagaaagcaatatcacgggagcaagcagccaaagacctgcaagtaagtacttggttcatacttcaaatgtgacatcatggaatcctttgattggatatttctttgttttgagctattgtcttttcggtctttaagataccctttctgtggcttgtgcctaaatttactcactgttgctcagtttcatcttcagtagttcaattattccgctttcagttactgtgtcataagattattctttttcttcagccctgtttgttttcttcccatgtatagttcaggaggtgtagctcattagaaaatagaaatataaaaatctggcttaaaaaatggtgcccctctttaacccaaaatgatcaccctgttctgcagtgttgtttatgcgtgttgaatttagaatgctatgttataattatcccgggccatattgcatcaagtataatatgtgctaacaggagaactgcatctggtttctaaaagagagtatgcacaacctgcaaaatcgataatggtgccacagaccattattattttgttgatcatagccaaccaaagtccattggatagtgtattgccaaaaccgctccacttagtttcgaggttcagggtgcagcctataaatagcacaggcatatttttgggtctgtacattgttactgccagctcatctttcctcattttctcaattcgtatggtgtttcaggagttggagaaacggagagaggaacttgaggcattgttacttgctgaacggtcggagttggtttgaaggctgaccaccgtgatctaacaatttatcttctgttgtagataaatgctttcttttttctttttctaatgatagcatactgcttggtcatggccctgagtcattcatccagaagtcacttgattgaagtgtatcttcttctttagtttctgtgagtatggatcctttgttatgtttataccaagtcaacagattctaaattgtctctactctacatattgatgtggctttgcaatcgctagattctaaacttattatctctattctacatgctgatgttgctttgcagtgacttgggcctcacatttgacgttttgcattatagtgatattttgcatcggatccacttttcttaattattaccgatacagagttgcatatgtttctgttgttaacaccatgctttttacggacagggattgcagcttccctcttggtttcagctgaattgtgggcttcttggtttcagagcattgtattgattcatcgtctggggctgtaagattgcagcatgaatttgatgtagcaccctgacttgtgtcgtccaatcctgtcgtgtacgcataaatgcattgctgaataattcacctgatttttgcacttaatgtctcttgtgatgtggtaactcagtccttgagccataattatgattatgttttcatgtat

SEQ ID NO: 23627 - DNA, 1777 bp, Zea Mays
cgattcaccacattcagctcgccgtgttgcgctcactcaaccaaatccaatcccggcggagggaagcgtcgtctaaattccaaccctaggccatggcgaatgcggcttcatccgcatcgtcgccgggggcaggtccctcctcctcgccgcaggccggtggagacgggggaggggacgcgcacacgccgcggcagcggcagggccggcccccgcgcgccggctccgacccgctcctcatcgtctgcggctgcttcagcgtcgtcacggtcgccaccgcgcttctctgcgtcgccgtcaacgtcgtctccgccgtccagtccttccgcgccggctccgatatattcgggggcatattccggtgctacgcggtcgtcttctcgctattcgtcgccgtcctcgagaccgagtgggggttcatcatccgtttctggaagatatttgaatactggcctgcacggggaatgctccagatcttgtaagtgtttttttacttctgtatgaccatatattttcttcttctaattttgtttccaaaactcagcactcaatctgtgtttatatatttgaatgcacaattgagtaaaccacttatgcttggtgctcatccagatacgggatgtgattgttattctttttttttcaagtaattcagaaaaatagatatcagatgaagttgtagatgtgacagtgaggcattgatttgtattgttcagttgtttgttttgttaaacaaaaaaattatctgcttacaatgtcaacttgctttcgccataaacctggaccaagatttgatgagcaacaacaatcatgtgctggattgtattacattcatattccttttacttttggttgctggcagtgttgctgtcatgacgaaggcatacccaagtattgaaaggaatgatctcaaattgctccaggagattgccagctacatgcttcttgcatgtggagctgtctatgttgtctcggggatattgtgcattggtgtgctaaaacgttctaggcagcagaaagcaatatcacgggagcaagcagccaaagacctgcaagagttggagaaacggagagaggaacttgaggcattgttacttgctgaacggtcggagttggtttgaaggctgaccaccgtgatctaacaatttatcttctgttgtagataaatgctttcttttttctttttctaatgatagcatactgcttggtcatggccctgagtcattcatccagaagtcacttgattgaagtgtatcttcttctttagtttctggattgcagcttccctcttggtttcagctgaattgtgggcttcttggtttcagagcattgtattgattcatcgtctggggctgtaagattgcagcatgaatttgatgtagcaccctgacttgtgtcgtccaatcctgtcgtggtgagtgacagacacacagagacagagacaagttcaaagtaggcgcacgctgaaggagacagaagaatgcctggagaatatcctcctccggctccgctgtggataagagcacgcaggcaggacccagttgccactacacaaagattactctgaccgccagccagcgatagggacgccggagttgttaatgccgccacccccggcagcgtgcactgcatgcaggcttgccgcttgcagcacgggggagtcgcagaggaaggaggcctgcatctgcatgccaagaacgcccgccgtcggcaacggtgaggttcttggcgtgcgactgtgcggacggttgggggcagcagatgaacagaaaggctgctg

SEQ ID NO: 23628 - DNA, 1658 bp, Zea Mays
cgattcaccacattcagctcgccgtgttgcgctcactcaaccaaatccaatcccggcggagggaagcgtcgtctaaattccaaccctaggccatggcgaatgcggcttcatccgcatcgtcgccgggggcaggtccctcctcctcgccgcaggccggtggagacgggggaggggacgcgcacacgccgcggcagcggcagggccggcccccgcgcgccggctccgacccgctcctcatcgtctgcggctgcttcagcgtcgtcacggtcgccaccgcgcttctctgcgtcgccgtcaacgtcgtctccgccgtccagtccttccgcgccggctccgatatattcgggggcatattccggtgctacgcggtcgtcttctcgctattcgtcgccgtcctcgagaccgagtgggggttcatcatccgtttctggaagatatttgaatactggcctgcacggggaatgctccagatctttgttgctgtcatgacgaaggcatacccaagtattgaaaggaatgatctcaaattgctccaggagattgccagctacatgcttcttgcatgtggagctgtctatgttgtctcggggatattgtgcattggtgtgctaaaacgttctaggcagcagaaagcaatatcacgggagcaagcagccaaagacctgcaagagttggagaaacggagagaggaacttgaggcattgttacttgctgaacggtcggagttggtttgaaggctgaccaccgtgatctaacaatttatcttctgttgtagataaatgctttcttttttctttttctaatgatagcatactgcttggtcatggccctgagtcattcatccagaagtcacttgattgaagtgtatcttcttctttagtttctgtgagtatggatcctttgttatgtttataccaagtcaacagattctaaattgtctctactctacatattgatgtggctttgcaatcgctagattctaaacttattatctctattctacatgctgatgttgctttgcagtgacttgggcctcacatttgacgttttgcattatagtgatattttgcatcggatccacttttcttaattattaccgatacagagttgcatatgtttctgttgttaacaccatgctttttacggacagggattgcagcttccctcttggtttcagctgaattgtgggcttcttggtttcagagcattgtattgattcatcgtctggggctgtaagattgcagcatgaatttgatgtagcaccctgacttgtgtcgtccaatcctgtcgtggtgagtgacagacacacagagacagagacaagttcaaagtaggcgcacgctgaaggagacagaagaatgcctggagaatatcctcctccggctccgctgtggataagagcacgcaggcaggacccagttgccactacacaaagattactctgaccgccagccagcgatagggacgccggagttgttaatgccgccacccccggcagcgtgcactgcatgcaggcttgccgcttgcagcacgggggagtcgcagaggaaggaggcctgcatctgcatgccaagaacgcccgccgtcggcaacggtgaggttcttggcgtgcgactgtgcggacggttgggggcagcagatgaacagaaaggctgctg

SEQ ID NO: 23629 - DNA, 207 bp, Zea Mays
tcagttatttagcactactgggctggggtgatggtactgaaaatgagttcttcactatcgatgacctagtccataaattcactataaatcgtgtcaataaaagtggagcagtctttgatgcaacaaaattgaagtaagttctatatgccaagtttctctgtattgaagatataactatcaagatcatataatgctcaaaatattcag

SEQ ID NO: 23630 - DNA, 3829 bp, Zea Mays
aaaataaagcccccgactcagaatggaggcggtcgtcgtcgtggccgcggccgtcgccgtcgccgtccacccgctccgcgccccgccctcgcgtccccgcctccaatgccattaaccctacgcgcacggcggctagtgtttcgttccctcgtcctcctcccacccctggccgtgacgatgccgtcctggtggaagcgctccaagtccgcgttccaccgctcgcccgtcaccccgttctcctccgcatccacgccgtcctctcccgcgcgggcgtccacctcgtgcgtccagcccggaggccgcgccgggagaagggacctcctcgcgccgcccaagctcacccgccagcgaaagctgcgccacgtcgacgacctctacgtcgcgctcggggacctccgcgtcgacgtctccgacaggtcgtcctcctcctctccgccgcagcagaggcgcctcgccaccgcctccgaggccatcgagatcccggtacccaccctcgtctccagggtgacaagccagattgcacaaaagtttcctgagcacaatgaattattaccaaatggaataaaacgggctacctttagtcaccacaggaatgcattccgtgagaagttccaggataagagttcggcagaaattattaactttcagttgaacattcctgctaaaagcgctccgagcagtggcttttcgagtcctgtgtgcagccctcgaagatttagcaatgctgacttctcatctaccgtggcacctgctcaaggaccccttgcgtggtcctctccatctatccaatcgacagattttatgggagtttcatcctgtcctgaaaaatacacgggggttccagaccaaacttctttctctagcggattgagaagtcctattcttatgccaaggattaccagtgctcctccatcacctatgcactctaaattgtacccagataacaatatttcacgcattgaaggaaatgggagtgtcagctttcacccattaccgctcccccctggtgctttaagtccaatgcaaacaggttttaccactcaatctgctccaaaagttgaaatgccctcagtggctggtcagtggcaaaaaggaaaacttctaggtagcggcacatttggttgtgtgtatgaagctaccaataggcacactggagctctctgtgcaatgaaagaagttaacataattcctgatgatgctaaatctgctgagtccttgaagcaattagagcaggaagtaaagttcctaagccaatttaagcatgaaaacatagtgcagtattatggcagtgatattattgaagatcgtttttacatttacctggaatacgttcacccaggttcaattaataagtatgtcaaacaacattatggagcaatgacagaatcagttattcgcaacttcacccgccacattctaaggggtctagcatttttgcatggccaaaagattatgcatagggatatcaaaggagcaaatctgctagttgatgttcagggtgtagtcaaattggctgactttggaatggcaaagcatttaagtactgcggcccctaatctttcactgaagggaacgccatactggatggccccagagatggttcaagctacactaatgaaagatgtaggctatgatctcgctgttgacatatggagtcttggctgcaccatcatagagatgttcgatggaaagcctccttggagtgatcttgaagggccagctgcgatgtttaaggtgttacataaagacccaccaattcctgaaaatttgtccaatgagggcaaagaatttttacagtgctgtttcaagaggactcctgcagagaggccaaccgcaagcgagctgttggaccatccattcatccgcaattcaagtcactacaacaaacatggttccatacattcatttgcagggattaaagtcaatgatacaacttacagttcaagagacaactggccagcttcgaagagtgactcaaacatgaaaggaaaaaataccaatgttaaactagtaagcctgctcgttctcaacctcacgtacgctcccagcccaggagtccgctcctcccaggcacaagcaaagcagccgctcgcggagcttcccggcgaccctcccgacagtgtgctctctgctagtggctccagctccttcgccctctccttcactccatgggataattcaaagaacctgcataaaatagatgttaccgtcaactcttatttcgccgttcttgatggtaaaaaggtgtacaatcgaggcagaacaataaatttggttgtgaatccagaacactatacacttattgatttagagaaagatgtggattcatatttcaaatggggtagctgccaaaagccaattttctgggttgttgaaaagggtgacaaatggcaatgtaagttgacttcagatgctcagcttagtgacctggtaagttcattcgatctggtgaagttatttatgacaatgggaagatgtaaggagggagaggagacgctgcatgttgtgaccgatgtggtgggcaaggagatgctagctgcagcatatccggtgggcaaggagatggatgtagacaatattgtctatgaagagatgcatgtagatgaggtgattggcacaacagacaatggagaggagggtatgcatgaagacatggacaagcaaccagaatggagagaagtgcctgaatatggtcaaacaactgcaggggcaccagtggttgatctgatggataaaattagagagaagatcatggaaaagattgccacaaggcaagatattgccaatagacttgaaggtcatatccttccaagtgtgctacatgagctaaacatgaaaagtagagggcttaattatgattttagcaaaagtgggttactagcagccgagatttctggaacaacaaatgaagggaagacatggaggtatggtgttgaccttaacaaaagaacttgtggctgtggacaatgggaggtgtctggaaaaccatgcactcatgctatcttttcacttggaaaatttagacagaaagagttaaaaatcgaggattttgtggatgattactactcagtagagaggtttaaacttgcttatcaatttgaggtcattccaatgggtgacaaatctcaatggccaaagaatgaccccggttttgaaatggtccctccaccattagaaaggcctgctgggagaccaaggaagcagagaattaaggctagtggagagccaggaaaaagaggtccatatcaatgtaaaaggtgcttcaagtttggacatatagagaagggatgcaatgcaactcaagctgaactagagcaggagcttccaccacctcgtccaaaaaaacaaaaaaagcaaagcaaaaccaaatccgaagcttatgaaaactccacaaaaggtgctgagccatcaaacattgatgttgatccaaaactaacttcaagcccaggtgttacgacaagaaggatggcgtccctctctccggcaagagcaagtccatgtgttaccacaaggaggatggcgtccctgtctccaaccagtccgggtgtgtcaacaagaaggatggcatttatctcacctggaggaatcaaccgcaggcttatcattgattagttgtattagtgcaatgttagcatgtactgtaacttagtttatggcatgctccatggctagcttttgggcatttgtctagttaccatgtgaactagggtctctgtgaactatgaacagcttgtagtcttatgccaagtcgttatgcacggacaaaattagtattatatcatattttaatgtgtttatggtctctttgatctgttatattctacgttgg

SEQ ID NO: 23631 - DNA, 3848 bp, Zea Mays
aaaataaagcccccgactcagaatggaggcggtcgtcgtcgtggccgcggccgtcgccgtcgccgtccacccgctccgcgccccgccctcgcgtccccgcctccaatgccattaaccctacgcgcacggcggctagtgtttcgttccctcgtcctcctcccacccctggccgtgacgatgccgtcctggtggaagcgctccaagtccgcgttccaccgctcgcccgtcaccccgttctcctccgcatccacgccgtcctctcccgcgcgggcgtccacctcgtgcgtccagcccggaggccgcgccgggagaagggacctcctcgcgccgcccaagctcacccgccagcgaaagctgcgccacgtcgacgacctctacgtcgcgctcggggacctccgcgtcgacgtctccgacaggtcgtcctcctcctctccgccgcagcagaggcgcctcgccaccgcctccgaggccatcgagatcccggtacccaccctcgtctccagggtgacaagccagattgcacaaaagtttcctgagcacaatgaattattaccaaatggaataaaacgggctacctttagtcaccacaggaatgcattccgtgagaagttccaggataagagttcggcagaaattattaactttcagttgaacattcctgctaaaagcgctccgagcagtggcttttcgagtcctgtgtgcagccctcgaagatttagcaatgctgacttctcatctaccgtggcacctgctcaaggaccccttgcgtggtcctctccatctatccaatcgacagattttatgggagtttcatcctgtcctgaaaaatacacgggggttccagaccaaacttctttctctagcggattgagaagtcctattcttatgccaaggattaccagtgctcctccatcacctatgcactctaaattgtacccagataacaatatttcacgcattgaaggaaatgggagtgtcagctttcacccattaccgctcccccctggtgctttaagtccaatgcaaacaggttttaccactcaatctgctccaaaagttgaaatgccctcagtggctggtcagtggcaaaaaggaaaacttctaggtagcggcacatttggttgtgtgtatgaagctaccaataggcacactggagctctctgtgcaatgaaagaagttaacataattcctgatgatgctaaatctgctgagtccttgaagcaattagagcaggaagtaaagttcctaagccaatttaagcatgaaaacatagtgcagtattatggcagtgatattattgaagatcgtttttacatttacctggaatacgttcacccaggttcaattaataagtatgtcaaacaacattatggagcaatgacagaatcagttattcgcaacttcacccgccacattctaaggggtctagcatttttgcatggccaaaagattatgcatagggatatcaaaggagcaaatctgctagttgatgttcagggtgtagtcaaattggctgactttggaatggcaaagcatttaagtactgcggcccctaatctttcactgaagggaacgccatactggatggccccagagatggttcaagctacactaatgaaagatgtaggctatgatctcgctgttgacatatggagtcttggctgcaccatcatagagatgttcgatggaaagcctccttggagtgatcttgaagggccagctgcgatgtttaaggtgttacataaagacccaccaattcctgaaaatttgtccaatgagggcaaagaatttttacagtgctgtttcaagaggactcctgcagagaggccaaccgcaagcgagctgttggaccatccattcatccgcaattcaagtcactacaacaaacatggttccatacattcatttgcagggattaaagtcaatgatacaacttacagttcaagagacaactggccagcttcgaagagtgactcaaacatgaaaggaaaaaataccaatgttaaactagtaagcctgctcgttctcaacctcacgtacgctcccagcccaggagtccgctcctcccaggcacaagcaaagcagccgctcgcggagcttcccggcgaccctcccgacagtgtgctctctgctagtggctccagctccttcgccctctccttcactccatgtgctcattaatctgaaattggttggggatttgagctgggatggatcctgcttgtgtttcagaaggggataattcaaagaacctgcataaaatagatgttaccgtcaactcttatttcgccgttcttgatggtaaaaaggtgtacaatcgaggcagaacaataaatttggttgtgaatccagaacactatacacttattgatttagagaaagatgtggattcatatttcaaatggggtagctgccaaaagccaattttctgggttgttgaaaagggtgacaaatggcaatgtaagttgacttcagatgctcagcttagtgacctggtaagttcattcgatctggtgaagttatttatgacaatgggaagatgtaaggagggagaggagacgctgcatgttgtgaccgatgtggtgggcaaggagatgctagctgcagcatatccggtgggcaaggagatggatgtagacaatattgtctatgaagagatgcatgtagatgaggtgattggcacaacagacaatggagaggagggtatgcatgaagacatggacaagcaaccagaatggagagaagtgcctgaatatggtcaaacaactgcaggggcaccagtggttgatctgatggataaaattagagagaagatcatggaaaagattgccacaaggcaagatattgccaatagacttgaaggtcatatccttccaagtgtgctacatgagctaaacatgaaaagtagagggcttaattatgattttagcaaaagtgggttactagcagccgagatttctggaacaacaaatgaagggaagacatggaggtatggtgttgaccttaacaaaagaacttgtggctgtggacaatgggaggtgtctggaaaaccatgcactcatgctatcttttcacttggaaaatttagacagaaagagttaaaaatcgaggattttgtggatgattactactcagtagagaggtttaaacttgcttatcaatttgaggtcattccaatgggtgacaaatctcaatggccaaagaatgaccccggttttgaaatggtccctccaccattagaaaggcctgctgggagaccaaggaagcagagaattaaggctagtggagagccaggaaaaagaggtccatatcaatgtaaaaggtgcttcaagtttggacatatagagaagggatgcaatgcaactcaagctgaactagagcaggagcttccaccacctcgtccaaaaaaacaaaaaaagcaaagcaaaaccaaatccgaagcttatgaaaactccacaaaagcccaggtgttacgacaagaaggatggcgtccctctctccggcaagagcaagtccatgtgttaccacaaggaggatggcgtccctgtctccaaccagtccgggtgtgtcaacaagaaggatggcatttatctcacctggaggaatcaaccgcaggcttatcattgattagttgtattagtgcaatgttagcatgtactgtaacttagtttatggcatgctccatggctagcttttgggcatttgtctagttaccatgtgaactagggtctctgtgaactatgaacagcttgtagtcttatgccaagtcgttatgcacggacaaaattagtattatatcatattttaatgtgtttatggtctctttgatctgttatattctacgttgg

SEQ ID NO: 23632 - DNA, 2260 bp, Zea Mays
gctgaaccaaacaggcccattaccctcctgagatttcgcgctccgttcacccaaaatttccccatctccgacctcccccttcctctccccctgccgctccccgcgccgagaaggagaaccccagccgccgcgcagcgcgccgcccatggcctcctcgtcggagaacgcggctgtgccgccggaggaggagccccaggccccgccgccgccggacacagagcctaccgaggcggcgcccggcgaggcggaggatgagccgcaaaccctagagcgggcgcaggagctcttcgacaggggttccaaggccatcgaggatgaggacttcgtcgacgccgtagactgtctcagccgagcgctcgagatcagggcttcacattatggagagctcgcaccggagtgtgccagcacatacttcaaatatggatgtgccctgctatacaaagctcaggaggagagtgatgttttgggaaatgttcccaagagcttgccaaatgaagactcagtgaagagtacagctactaaagatgacagtggaacctcaaaggtctctggtaccgatgcggaggatgctgcgtcatcagaaaaagttgatgctgaagaaggtcacaactcaaatggcaaaaatcaggagaatgggaatggtgaagttgagaaagatgatgacgacgtcgacgatgatgagaagatgggagatgaagaggataatgatttggatctttcttggaaaatgttggacattgctagggcaatagttgagaagagccaagataacactatggagaaagtaaaaatatattctgctcttgctgaagtggcaacggaaagagaggacatggacaactcactcagtgactatatgaaagctttatccatgttggagcatttggttgagcctgaccatcgtcgagttgtggaattgtatcctctttgtcatagttacactattttgtctgctaaagagagatattacaacctgcagtcagaattatatgacattaggatcatcaaattgacttgaatgtaattcttacgtcatatataatgactggagtctggaggtagtattattacataaataagcatctgcaacctggtcgtgccttgctctatttttcatgcctttattttatagttatttgtagcctgataaacttataatttgggttggtaaagaatgccttttttatattcaataaattagttcagttgttttggtggaatgcgtatccataacattatttacttgaacgcacatgctactttagatgatatgattgcttcccagggtcagtttgttgatcttcctttgttatttgccttaatccagtcttagaaacttccgcatttgtttggtttatgaactagtttccaagatcggagaagcaatttcatactgtgcaaaagcaatttcgctatgcaagtcacgcatacagagcctgaaaagttccaaggatgctttgttggctggtatagatggtgatgcatctgctgctgaagctgaaggaggctcagaaaaatctgccattgaaaaagagctagagcagcttactagcatattgcctgatcttgagaagaagcttgaggacctgtctgaagcaaacccaagcgctgacatggatgagatggtgaaggcaatcgtgtccagggtaactgatgtgatgccaaaagctgcatcttttacttcttcccagatggcaacctcaagcaatggattcgactcctcggttatgtctacggcagcgacaaccggaagctctggaagcaccgtgactgaccttggggttgtaggcagaggcgtcaaacgagctagcatcaagccgatctctgctgaacctgctgctaagaaacctgcacttgattcaccatctcaacaaggtgacagcagcatcaactctgaggttgttcctgcaacgcagactggagacgagtcagtatctaagtaaattacaatttcattagccctactgtaatgttaacttgctggaacatattagctgctatgtaaacgcttaagaagggactgctggggccatagactcatcgtgagctgaccattgaaatgttaaattgctgagatcatcatggcggtaaatcatgtctgctatatcaaatatgcttggtgagatgtgtactttctgatttttttgatgtatctgaccgtagtagcccatcacttgcctatccactgctgtggctgtgctacgataggacatttcgtttgttaccatgatgttgtcttctgaaattcagtatctctcga

SEQ ID NO: 23633 - DNA, 2722 bp, Zea Mays
gctaaactccgtcgcgaacaagaacaaaccaaattgaactcagcacgcgcacaagtccgcggccgcccgcacaccgccagccagccagccacccgcccacctctagcccctaggctcccctcccgcaaaaccctagcgctctctctctctctctgtctgccggcgcgatggaggatgctgccgagagccgcaagctcttcgtcggcgggatcccggccggggcgcaggaggcagacctgcgggcccacttcgcgcgcttcggcgaggtgcgctccgtcgtcgtcatgcgcgacagggagacgggccacggccggggcttcggcttcgtcgagtttgaggacaaggcagccgccgccgccgccgccgcgctgggcgacgcggacaggcccaggcacttcctctgcgggcgcgcggtggacgttaagagggccagggcaagagctccacgaaaccagcgcgagcagcactcccagcctcatcaggtcgaacaaggcttagaccaggggaaccaggacaatcagtaccccatggggaacggcaccgcggacagtggtgacaacgtgaactacggttcaaaaaaggtcttcgttggcggactgcaggatgacaccactgaggaggagttccgggcctactttgagacgtttggcactgtaacggatgtcgcggtgatatatgacagcgcaacgaaccggtcgagggggttcggcttcgtcacctttgattcggaggaagcagtagggaaggtgatgcggcagagctttcacgacttgaacgggaccaaggtagaagccaagattgctatccccaaggacgagcagtattaccgcaacagagggcgtggcgcacgctcctctggtgggagggtccctgctggctatgaaggctccatgtaccaaccgccatacaatgctggatatggctcctacaatggctacatgccacaacctgttcacgtgcagccctactttcctgccccctattttcctgtggcgggttatccctatgggagtggatacccaagccaagtcgtcatggcaaacgctcctgatatgatgtcaagatgggttcctccagcttatggaaattatcctcaaatgtatccatggtacattctatacagagctggttatggtggtccagccacctcttttcagcatggaattaatggtggaggagctgataacaaaaaggatcaaactaatgtagatatgcagcaagctgacaacacttctagcgttacaacgatgttggaacatatgaagctaggttcacaatgactttcaggtgcgtgtattctgataccctactggttaaattttatcactcgttattggtaggaattactgcagtgtacttatttttttaaactatggttgttatatgttcgttgaaattgatagaatattcaagtcttcccatgaaattagcgcatagtctgccaatttttcaatagcatttttcgtcatttgcattttcatgtttgcattagctaattgaaaatggagtggttatcatgattctgctatcatcatctaagattctaagaatccaagtgcttcaaatataataccatggtgaattctagcaatgtaacttggcaccctaaacggttactatatagtatatactgcatttaacgctacctattcaattaggtaatgaaacaaatgttgacatccacagttcagtgtttgctttcaatatttgagacattgatttgcagttcaatacagcagtgaatttggtttatcagttggcaaaatgataattcctttactttatggacacgtgttagagatggaaagttgtatgtaggactctaggagggtgcattctagctgccctgaagcaaaaacaattgttcagtttatgtataatacctttttgttatccatgtcctgtacatcttcctttactgcataaaaattaaatggaatagtttgtttccccatttgttgcatacagtgagatattcatggatcttacttctggagttctggttatctacaaaattgattagattaaagtagtgatgttatattcttagtacagagggaaagggaatcatagtttggcatgaaagtcggttcttactataacagcatactgaagtaactgaaccaaaataacttattttgtatatattggatggatgcaccttgcaccgaacatgtgactgtggagtaaacttatagattaataggcgattctgtggtgatttatcttgcaaaattgtatcctgtcatgaggcgactgaactggctatgagaagctgaagcttgaacttgagctaggaccctttttctgtttgggatccggttttgctggtgcatagttaagcttgaggttgctccagataaggcaaaactgctggtgcatagtagtactccctccatctgactaatacttctacaatggtgacactggagtacaacaattgtttgggaactcgcaactgtgaagacgacttggacttagattctttggttgacaagtatatcattagaattcttccagcttacctacgattcctattcctcccgcctgtaaactagtaaaagcatgctgcaagttgttactggctcccctcccctcttgtaccaatgttaaattcttacgtcgtttaatgcatcagaatcatactgttaaaatatacttgtttgctgcatgctttgacagattgttaccagaatgatggaatcatccatctatctcaaaa

SEQ ID NO: 23634 - DNA, 1152 bp, Zea Mays
cttcgtgtaggctcaccattgcgtctaaatcgcttcgtttttgctgccatctggctcggtggacgttaagagggccagggcaagagctccacgaaaccagcgcgagcagcactcccagcctcatcaggtcgaacaaggcttagaccaggggaaccaggacaatcagtaccccatggggaacggcaccgcggacagtggtgacaacgtgaactacggttcaaaaaaggtcttcgttggcggactgcaggatgacaccactgaggaggagttccgggcctactttgagacgtttggcactgtaacggatgtcgcggtgatatatgacagcgcaacgaaccggtcgagggggttcggcttcgtcacctttgattcggaggaagcagtagggaaggtgatgcggcagagctttcacgacttgaacgggaccaaggtagaagccaagattgctatccccaaggacgagcagtattaccgcaacagagggcgtggcgcacgctcctctggtgggagggtccctgctggctatgaaggctccatgtaccaaccgccatacaatgctggatatggctcctacaatggctacatgccacaacctgttcacgtgcagccctactttcctgccccctattttcctgtggcgggttatccctatgggagtggatacccaagccaagtcgtcatggcaaacgctcctgatatgatgtcaagatgggttcctccagcttatggaaattatcctcaaatgtatccatgatatgcagcaagctgacaacacttctagcgttacaacgatgttggaacatatgaagctaggttcacaatgactttcaggactaatacttctacaatggtgacactggagtacaacaattgtttgggaactcgcaactgtgaagacgacttggacttagattctttggttgacaagtatatcattagaattcttccagcttacctacgattcctattcctcccgcctgtaaactagtaaaagcatgctgcaagttgttactggctcccctcccctcttgtaccaatgttaaattcttacgtcgtttaatgcatcagaatcatactgttaaaatatacttgtttgctgcatgctttgacagattgttaccagaatgatggaatcatccatctatctcaaaa

SEQ ID NO: 23635 - DNA, 419 bp, Zea Mays
tgaggcatgtgtgaagagaatgttatctatccatccaagtccaaccatttctcactctctcttttggtagggtgatgcagcatgttgtgtgtgtaaatgttggaaggagagggagcaagtctcattccttttgctgcgctggactccccctttaaagccacgcgcgcccacacaagcgcaaacacacttgcccacctcctctcctctactctgcttcacgcctcgccggccgatctagctagctatcgcagaccccgccggcccggccctcatcgatctctcgtcgcggcaatggccatcacaccgcgcgctccccgatgattgatccactccggtcgccattcccgccgccatcatcagctcctactatatattagcccgacgaccccgttcatcttcctcttgtagttttgtccagc

SEQ ID NO: 23636 - DNA, 1721 bp, Zea Mays
ggagcttctggagatttcacgccgctcctccctctccatcgccgccctcccccacctcgtcctcatcgcgcgtcatgcctccgggctccggccctccgcgaccctactccacctcccctggccggctttcgctgccgctggcagacgctctcgccgccgctgcagacgcttcaccaccaccgtcacacgatcgtcgccgtcatcgcgccgcccgaggtgctcgaggtcgctgcagccacgacacgtccaatctgagggctccggggttggaggagatggtctcgacgacgcgacggagatcgaggagcccgagcaatggctcagcggcggcggacggcggccgcccgatgtgcttgaggtcgccacggccgcgacgcgcccaagccgagggccccgaggctagaggagatggcctcgacgacgcgacggagatcgaggagccagaggaacggctcagcggcggcggatggcggtcgcccgaggtgctctgctcgaggtgctgacgatgcgagaaacgacaacaactgtttctctgataccctcattacctgcaacttgacacgcagtacaacaagcagcccataacatgtaacagtaaccatctctggtttcaaaatactcatcacgcttatctttgggaaattctttgactacacctcaagtagtcctgaaagatgtcctgattgggatgaaggctcgaggcaacaggaggtttctaatcccatctgaagtaaggctacatcagtgagacattgcagcccataccagaagaggaggaataaggtgtgttcaaggagcagaattcattatcgaacattgccaccaaggagaacaaacctgataacggaagaatcagattgtggatgaacattggcctttgtttcaggacacgaagttgtcatcctatttactccaaagaaaagacgtcactacaagacaggtatgcgttcaaaagttccttatgcacatatggtttttttttccatgcagccacctctacaaattttatccattttcctttcccaacttccaaagattagacactgaattgtgtattactgcttctgcgcatgcatatgcacatacatgttccttctgtgactatgatttcttttttgtgtactcacttttacaaattgcatccattttccttcacatttccaacaattacagtcattcgtatttataccagattttttttcaaaaaatgctgtgtattttaatacctcaaaaaaatactatcattgtcatttaaatcataaatgttttctaagcgcgcggggcgcgcatcagttactagtactaataatcaattagaagagttggcggactggacgagaagagttaataagcaagaggggacaggagagacgttggagttgacaggaagcgcgcgggccccaccctcacgcctggcgatgcttatggtccatcgtcctccatgctcgtgctgacgaattttttgtattttagcccttaaacagaagtaaaatcacgtttagacctaaaaaaattttaaatgcagttttggacccttagctcggcgccatagcctgtggcgccgagctaacacagctcggcgccacagcctatgacgccgagcttcgtgacgtgtcatcccgcgtggcacctagctcggcgccacagatcttggcgccgagctaggaaatatccgcccgacgcctttctctctgcccgtttcgtctgttcttcagttttcg

SEQ ID NO: 23637 - DNA, 1297 bp, Zea Mays
tcgcccgaggtgctctgctcgaggtgctgacgatgcgagaaacgacaacaactgtttctctgataccctcattacctgcaacttgacacgcagtacaacaagcagcccataacatgtaacagtaaccatctctggtttcaaaatactcatcacgcttatctttgggaaattctttgactacacctcaagtagtcctgaaagatgtcctgattgggatgaaggctcgaggcaacaggaggtttctaatcccatctgaagtaaggctacatcagtgagacattgcagcccataccagaagagactaaggcagagtctactgtctcatgccagagagccactggtgtttgaggaggaataaggtgtgttcaaggagcagaattcattatcgaacattgccaccaaggagaacaaacctgataacggaagaatcagattgtggatgaacattggcctttgtttcaggacacgaagttgtcatcctatttactccaaagaaaagacgtcactacaagacaggtatgcgttcaaaagttccttatgcacatatggtttttttttccatgcagccacctctacaaattttatccattttcctttcccaacttccaaagattagacactgaattgtgtattactgcttctgcgcatgcatatgcacatacatgttccttctgtgactatgatttcttttttgtgtactcacttttacaaattgcatccattttccttcacatttccaacaattacagtcattcgtatttataccagattttttttcaaaaaatgctgtgtattttaatacctcaaaaaaatactatcattgtcatttaaatcataaatgttttctaagcgcgcggggcgcgcatcagttactagtactaataatcaattagaagagttggcggactggacgagaagagttaataagcaagaggggacaggagagacgttggagttgacaggaagcgcgcgggccccaccctcacgcctggcgatgcttatggtccatcgtcctccatgctcgtgctgacgaattttttgtattttagcccttaaacagaagtaaaatcacgtttagacctaaaaaaattttaaatgcagttttggacccttagctcggcgccatagcctgtggcgccgagctaacacagctcggcgccacagcctatgacgccgagcttcgtgacgtgtcatcccgcgtggcacctagctcggcgccacagatcttggcgccgagctaggaaatatccgcccgacgcctttctctctgcccgtttcgtctgttcttcagttttcg

SEQ ID NO: 23638 - DNA, 2033 bp, Zea Mays
caactgctggcctcggcagctcggaggccctcttctccggtgagatgtgacgcgagaaaaaggggtcgccaccagccagggccaggcagccatccaatcttcacacaggggcagagggcggtcgcgcacacctttcccttcccccctctcgttcccctctccttcccattaatatctagccgcaccttccctctctcacctcctcatcctcctccaactgtgagcgtacgttccacggccgccgccattagtgttgagagagggagagaagctacagggaccggacgcctccttccttgctgaccggcgagctttattttcaggcccctcgctcgctagggttccatcatcccgcccgctgttccttttcgtccatggatcagaacttcgggaacctcgggaccggagccgggagcagcggcgggtgcgggggctccaactccaactccaaggcggtggcggcggtgtcgtcctcgtccttcctgcagctgccgctgtcgacggcggcggcggcgtcccccgcgtactacggcgcgccgctcgcgctcctgcaccacggcaccaccgcgggcccgtcgtcgtcgcagcagcagcagcaccagtcgccgtacgccaagcacggcgccgagatgtcggcggcggaggccgacgccataaaggccaagatcgtggcgcacccgcagtactcggcgctcctcgccgcctacctcgactgccagaaagtgggcgcgccgccggacctgctggagaggctgacggccatggcggcgaagctggacgcgcgcccgccgggccgccacgggccgcgcgacccggagctggaccagttcatggaggcgtactgcaacatgctcgtcaagtaccgggaggagctgacccggccgatcgacgaggccatggagttcctcaagcgggtggaggcgcagctcgactccatcgccggcggcggctcctcctcctccgcgcgcctctcgctcgccggcggcagcccagcgtggtcgaaactgacgagacactttgaaattcgacgacgacagaacaaaacctctggctggaaagtggaaacacgtgaccttaccaaaagctcctctcttttttttttcttcttcttctgcagatggtaagtcatcagaaggggccggctcttcggaagacgacgacatggatccgagcggccgcgagaacgagccgccggagatcgacccgcgcgcggaggacaaggagctcaagtaccagctcctgaagaagtacagcgggtacctgagcagcctgaggcaggagttctccaagaagaagaagaaagggaagctgccgaaggaggccaggcagaagctcctccactggtgggagctgcactacaagtggccgtacccttcggagacggagaagatcgcgctggcagaggcgactggcctggaccagaagcagatcaacaactggttcatcaaccagcggaagcggcactggaagccgtcggaggacatgccattcgtcatgatggaaggcttccacccgcagaccgcggccgcgctgtacctggacggcggcgcgttcatggccgacggcatgacgacgtatcgcctcggttcatgaaccgccgtggacaatccaaaaccaccgggcgaccgtgtcggagtgtttctgcgtaccaggaagatgcgatgcgagggacgttgttaattatgggggggttttgctgccggtttccgcgctgatcgccaccaaccaaggcggggtgcggtcagtgatctagtggcgctcgatctaagttgtctgtggcttctgtaatgttgttgttgatttcggcttgtaatctagctaggtattgtttcgaacttgagttgaaagtctgcaagtatcctgcagtgcagtgcaggcgattaattgggcgagcatgcagtcgcttgcctgtttgtatgattgattgcatggtttggatcggtggaacatgcatggtaaggcgtggcctgtctgaatcaacaaagatggctttgtcttttacggtgaactgcagaatgaacagacgattagct

SEQ ID NO: 23639 - DNA, 2023 bp, Zea Mays
ctcttctccggtgagatgtgacgcgagaaaaaggggtcgccaccagccagggccaggcagccatccaatcttcacacaggggcagagggcggtcgcgcacacctttcccttcccccctctcgttcccctctccttcccattaatatctagccgcaccttccctctctcacctcctcatcctcctccaactgtgagcgtacgttccacggccgccgccattagtgttgagagagggagagaagctacagggaccggacgcctccttccttgctgaccggcgagctttattttcaggcccctcgctcgctagggttccatcatcccgcccgctgttccttttcgtccatggatcagaacttcgggaacctcgggaccggagccgggagcagcggcgggtgcgggggctccaactccaactccaaggcggtggcggcggtgtcgtcctcgtccttcctgcagctgccgctgtcgacggcggcggcggcgtcccccgcgtactacggcgcgccgctcgcgctcctgcaccacggcaccaccgcgggcccgtcgtcgtcgcagcagcagcagcaccagtcgccgtacgccaagcacggcgccgagatgtcggcggcggaggccgacgccataaaggccaagatcgtggcgcacccgcagtactcggcgctcctcgccgcctacctcgactgccagaaagtgggcgcgccgccggacctgctggagaggctgacggccatggcggcgaagctggacgcgcgcccgccgggccgccacgggccgcgcgacccggagctggaccagttcatggaggcgtactgcaacatgctcgtcaagtaccgggaggagctgacccggccgatcgacgaggccatggagttcctcaagcgggtggaggcgcagctcgactccatcgccggcggcggctcctcctcctccgcgcgcctctcgctcgccgctctcttgatcggtggcaggcggcagcccagcgtggtcgaaactgacgagacactttgaaattcgacgacgacagaacaaaacctctggctggaaagtggaaacacgtgaccttaccaaaagctcctctcttttttttttcttcttcttctgcagatggtaagtcatcagaaggggccggctcttcggaagacgacgacatggatccgagcggccgcgagaacgagccgccggagatcgacccgcgcgcggaggacaaggagctcaagtaccagctcctgaagaagtacagcgggtacctgagcagcctgaggcaggagttctccaagaagaagaagaaagggaagctgccgaaggaggccaggcagaagctcctccactggtgggagctgcactacaagtggccgtacccttcggagacggagaagatcgcgctggcagaggcgactggcctggaccagaagcagatcaacaactggttcatcaaccagcggaagcggcactggaagccgtcggaggacatgccattcgtcatgatggaaggcttccacccgcagaccgcggccgcgctgtacctggacggcggcgcgttcatggccgacggcatgacgacgtatcgcctcggttcatgaaccgccgtggacaatccaaaaccaccgggcgaccgtgtcggagtgtttctgcgtaccaggaagatgcgatgcgagggacgttgttaattatgggggggttttgctgccggtttccgcgctgatcgccaccaaccaaggcggggtgcggtcagtgatctagtggcgctcgatctaagttgtctgtggcttctgtaatgttgttgttgatttcggcttgtaatctagctaggtattgtttcgaacttgagttgaaagtctgcaagtatcctgcagtgcagtgcaggcgattaattgggcgagcatgcagtcgcttgcctgtttgtatgattgattgcatggtttggatcggtggaacatgcatggtaaggcgtggcctgtctgaatcaacaaagatggctttgtcttttacggtgaactgcagaatgaacagacgattagct

SEQ ID NO: 23640 - DNA, 1698 bp, Zea Mays
cacacaggggcagagggcggtcgcgcacacctttcccttcccccctctcgttcccctctccttcccattaatatctagccgcaccttccctctctcacctcctcatcctcctccaactgtgagcgcccctcgctcgctagggttccatcatcccgcccgctgttccttttcgtccatggatcagaacttcgggaacctcgggaccggagccgggagcagcggcgggtgcgggggctccaactccaactccaaggcggtggcggcggtgtcgtcctcgtccttcctgcagctgccgctgtcgacggcggcggcggcgtcccccgcgtactacggcgcgccgctcgcgctcctgcaccacggcaccaccgcgggcccgtcgtcgtcgcagcagcagcagcaccagtcgccgtacgccaagcacggcgccgagatgtcggcggcggaggccgacgccataaaggccaagatcgtggcgcacccgcagtactcggcgctcctcgccgcctacctcgactgccagaaagtgggcgcgccgccggacctgctggagaggctgacggccatggcggcgaagctggacgcgcgcccgccgggccgccacgggccgcgcgacccggagctggaccagttcatggaggcgtactgcaacatgctcgtcaagtaccgggaggagctgacccggccgatcgacgaggccatggagttcctcaagcgggtggaggcgcagctcgactccatcgccggcggcggctcctcctcctccgcgcgcctctcgctcgccgatggtaagtcatcagaaggggccggctcttcggaagacgacgacatggatccgagcggccgcgagaacgagccgccggagatcgacccgcgcgcggaggacaaggagctcaagtaccagctcctgaagaagtacagcgggtacctgagcagcctgaggcaggagttctccaagaagaagaagaaagggaagctgccgaaggaggccaggcagaagctcctccactggtgggagctgcactacaagtggccgtacccttcggagacggagaagatcgcgctggcagaggcgactggcctggaccagaagcagatcaacaactggttcatcaaccagcggaagcggcactggaagccgtcggaggacatgccattcgtcatgatggaaggcttccacccgcagaccgcggccgcgctgtacctggacggcggcgcgttcatggccgacggcatgacgacgtatcgcctcggttcatgaaccgccgtggacaatccaaaaccaccgggcgaccgtgtcggagtgtttctgcgtaccaggaagatgcgatgcgagggacgttgttaattatgggggggttttgctgccggtttccgcgctgatcgccaccaaccaaggcggggtgcggtcagtgatctagtggcgctcgatctaagttgtctgtggcttctgtaatgttgttgttgatttcggcttgtaatctagctaggtattgtttcgaacttgagttgaaagtctgcaagtatcctgcagtgcagtgcaggcgattaattgggcgagcatgcagtcgcttgcctgtttgtatgattgattgcatggtttggatcggtggaacatgcatggtaaggcgtggcctgtctgaatcaacaaagatggctttgtcttttacggtgaactgcagaatgaacagacgattagct

SEQ ID NO: 23641 - DNA, 2584 bp, Zea Mays
gtaagaaacaagtacgtaaccagggccgtaacccgccttccttgaggcagacgcacgaaacgagctgtcggtcgtcggtcttggtctgattcctcttcttccgcgccgcctgtccggccggcagcggcagccatggcctcgaacaggagcagcagcacggttgtgggcgagatgcagagcagattggaccgggtgcggcgccagctctcctccacctccacccgccacctcctccagggccctctcttgaagcggtccgacacgctaagaaagtggaatgagcgctgggtcatccttgatccagcaactggaaagatagaatacaaggtcaataggagtgacaaagatgttaggggagtagtcgtgttcgattcaacaagcacagtgactttgtcgcctacgaactttcatggactggcaaaatacgatggatgctgtttctatattggaactccacagaaaaaggaatactttctttgtgcagaaactcccagcgctgcaagagcatgggtatccactttacatgcgactcagttggtgctacaggctcataaggaggccgtgaattcattgggtgagaatggtcctgcaaaattgggaacagttgcaactgttgtggctgtagccaatgccactgcaattgaagcaacaaaggaggtagaagccgcaatgaagatttccctacgggcagctttgggctcaactacacataaacttaccaaaggtcaattagatgatctcacaataatgatgacaatggcaatgcatctgcaaccaacaggagacccttcgagttaaagacgacgaactacaccaattattgcaggatattcgtgcacgcgattctaccatcaatgaaattgcggataaattacaggagactgcagaagcagctgaaacagctgcttctgcagcacgttcaattgatgaagagagaagattttttacgttagaacttgaacggctgaaacaagaccacgagaaacaagttgaagcatctttgcttaggttaagggaatcggaggagaaagcaaagcttcttgttgaagagagagatcgcttgcttacagagagagattccgctcttcaagaagctcagatgtggcgctcggagctaggaaaagctagaggaaacgctgtaattctagaagcggctgttgtcagagccgaagagaaagctagggtctcagcagcagatgctgacatccgcataaaagaagccatgaaccgacttgagtctgccaccaaagaaaaggaggatctcctagcccttgtggatgctctacaatcccaaatacaaaggtctgccgtccacaattctatccgactcacttctgtttccatccagtcggaagtttctcgaaaccggatccttctagagccagcttgatgagggacatattttttcaggcaagagactagcacgatacaggtctgcgaagagagctcggaactctgctcgactgcctcgaagcacatggaggatgataacgttgacaaagcttgcgtaagcgatccggattcagtaccggttacggagaacgttgttgagttggacgacgagggagtcgacatccctacggtcggggacaccgaatgggacgatccccgttcttccgaagtgtctgatgtaagggaagtaaccacagaacccgaagaaaacagcttggatattcctgtcgatacttgatgtccaaccccttctgtgagaagaatcgcttagaaggcttaagctggacgccggccattcttgttcgccgtggtgagttgtgttagtagatcctcgttttagttcattgttacattcttgttcaagtttcggcatgagttactgaatttgagtccatttagacttgtgtgccctgtctctcctgaaataaaaaagcgcaactgtgttgagtctgcaagtgtacacctgaactcactctcatgtttagaaggtcatctttggcattttccccttgttattcaggaaattcttgttgtatcctgcaaactgagctagtaaaatttgcactgattctttctatctacgatctatctatataaacactgtaaattttgcaattttttttgtctttcgtttgagatggtatatgcagctactgcaaaggtaaagcgacgctgcccgcaatagtgtggtcagcaagaagaaatagtctgttatgtgctaaaccattacaaggatggagaagaaaggttcaactacacgcgcaggcaggtcgaatctccattggaagaacaagaggcaaaaaggcacaccgaaagtccggtcttccagataatgttcttgagtgtcaaaactgaaagcaccttgtgtaccattataacacatcacattagaaattactgtaggtctcaagacaacagattagtcatgttgacttgaaggtacgtgcaggaccggaacagcttgctgacgtggacagctgacaggggcagagctagccacgtgtgtcgaccgtgacagcgtccaggtccagcagcagaaaccacgtggagtctccgcgtcacaggcaaatatatgcgtctgttccgctgactgaaacgtgaaactcagggtttctaaacaagttttccaatc

SEQ ID NO: 23642 - DNA, 2355 bp, Zea Mays
cttggtctgattcctcttcttccgcgccgcctgtccggccggcagcggcagccatggcctcgaacaggagcagcagcacggttgtgggcgagatgcagagcagattggaccgggtgcggcgccagctctcctccacctccacccgccacctcctccagggccctctcttgaagcggtccgacacgctaagaaagtggaatgagcgctgggtcatccttgatccagcaactggaaagatagaatacaaggtcaataggagtgacaaagatgttaggggagtagtcgtgttcgattcaacaagcacagtgactttgtcgcctacgaactttcatggactggcaaaatacgatggatgctgtttctatattggaactccacagaaaaaggaatactttctttgtgcagaaactcccagcgctgcaagagcatggtgcgactcagttggtgctacaggctcataaggaggccgtgaattcattgggtgagaatggtcctgcaaaattgggaacagttgcaactgttgtggctgtagccaatgccactgcaattgaagcaacaaaggaggtagaagccgcaatgaagatttccctacgggcagctttgggctcaactacacataaacttaccaaaggtcaattagatgatctcacaataatgatggagacccttcgagttaaagacgacgaactacaccaattattgcaggatattcgtgcacgcgattctaccatcaatgaaattgcggataaattacaggagactgcagaagcagctgaaacagctgcttctgcagcacgttcaattgatgaagagagaagattttttacgttagaacttgaacggctgaaacaagaccacgagaaacaagttgaagcatctttgcttaggttaagggaatcggaggagaaagcaaagcttcttgttgaagagagagatcgcttgcttacagagagagattccgctcttcaagaagctcagatgtggcgctcggagctaggaaaagctagaggaaacgctgtaattctagaagcggctgttgtcagagccgaagagaaagctagggtctcagcagcagatgctgacatccgcataaaagaagccatgaaccgacttgagtctgccaccaaagaaaaggaggatctcctagcccttgtggatgctctacaatcccaaatacaaaggcaagagactagcacgatacaggtctgcgaagagagctcggaactctgctcgactgcctcgaagcacatggaggatgataacgttgacaaagcttgcgtaagcgatccggattcagtaccggttacggagaacgttgttgagttggacgacgagggagtcgacatccctacggtcggggacaccgaatgggacgatccccgttcttccgaagtgtctgatgtaagggaagtaaccacagaacccgaagaaaacagcttggatattcctgtcgatacttgatgtccaaccccttctgtgagaagaatcgcttagaaggcttaagctggacgccggccattcttgttcgccgtggtgagttgtgttagtagatcctcgttttagttcattgttacattcttgttcaagtttcggcatgagttactgaatttgagtccatttagacttgtgtgccctgtctctcctgaaataaaaaagcgcaactgtgttgagtctgcaagtgtacacctgaactcactctcatgtttagaaggtcatctttggcattttccccttgttattcaggaaattcttgttgtatcctgcaaactgagctagtaaaatttgcactgattctttctatctacgatctatctatataaacactgtaaattttgcaattttttttgtctttcgtttgagatggtatatgcagctactgcaaaggtaaagcgacgctgcccgcaatagtgtggtcagcaagaagaaatagtctgttatgtgctaaaccattacaaggatggagaagaaaggttcaactacacgcgcaggcaggtcgaatctccattggaagaacaagaggcaaaaaggcacaccgaaagtccggtcttccagataatgttcttgagtgtcaaaactgaaagcaccttgtgtaccattataacacatcacattagaaattactgtaggtctcaagacaacagattagtcatgttgacttgaaggtacgtgcaggaccggaacagcttgctgacgtggacagctgacaggggcagagctagccacgtgtgtcgaccgtgacagcgtccaggtccagcagcagaaaccacgtggagtctccgcgtcacaggcaaatatatgcgtctgttccgctgactgaaacgtgaaactcagggtttctaaacaagttttccaatc

SEQ ID NO: 23643 - DNA, 2332 bp, Zea Mays
cttggtctgattcctcttcttccgcgccgcctgtccggccggcagcggcagccatggcctcgaacaggagcagcagcacgattggaccgggtgcggcgccagctctcctccacctccacccgccacctcctccagggccctctcttgaagcggtccgacacgctaagaaagtggaatgagcgctgggtcatccttgatccagcaactggaaagatagaatacaaggtcaataggagtgacaaagatgttaggggagtagtcgtgttcgattcaacaagcacagtgactttgtcgcctacgaactttcatggactggcaaaatacgatggatgctgtttctatattggaactccacagaaaaaggaatactttctttgtgcagaaactcccagcgctgcaagagcatggtgcgactcagttggtgctacaggctcataaggaggccgtgaattcattgggtgagaatggtcctgcaaaattgggaacagttgcaactgttgtggctgtagccaatgccactgcaattgaagcaacaaaggaggtagaagccgcaatgaagatttccctacgggcagctttgggctcaactacacataaacttaccaaaggtcaattagatgatctcacaataatgatggagacccttcgagttaaagacgacgaactacaccaattattgcaggatattcgtgcacgcgattctaccatcaatgaaattgcggataaattacaggagactgcagaagcagctgaaacagctgcttctgcagcacgttcaattgatgaagagagaagattttttacgttagaacttgaacggctgaaacaagaccacgagaaacaagttgaagcatctttgcttaggttaagggaatcggaggagaaagcaaagcttcttgttgaagagagagatcgcttgcttacagagagagattccgctcttcaagaagctcagatgtggcgctcggagctaggaaaagctagaggaaacgctgtaattctagaagcggctgttgtcagagccgaagagaaagctagggtctcagcagcagatgctgacatccgcataaaagaagccatgaaccgacttgagtctgccaccaaagaaaaggaggatctcctagcccttgtggatgctctacaatcccaaatacaaaggcaagagactagcacgatacaggtctgcgaagagagctcggaactctgctcgactgcctcgaagcacatggaggatgataacgttgacaaagcttgcgtaagcgatccggattcagtaccggttacggagaacgttgttgagttggacgacgagggagtcgacatccctacggtcggggacaccgaatgggacgatccccgttcttccgaagtgtctgatgtaagggaagtaaccacagaacccgaagaaaacagcttggatattcctgtcgatacttgatgtccaaccccttctgtgagaagaatcgcttagaaggcttaagctggacgccggccattcttgttcgccgtggtgagttgtgttagtagatcctcgttttagttcattgttacattcttgttcaagtttcggcatgagttactgaatttgagtccatttagacttgtgtgccctgtctctcctgaaataaaaaagcgcaactgtgttgagtctgcaagtgtacacctgaactcactctcatgtttagaaggtcatctttggcattttccccttgttattcaggaaattcttgttgtatcctgcaaactgagctagtaaaatttgcactgattctttctatctacgatctatctatataaacactgtaaattttgcaattttttttgtctttcgtttgagatggtatatgcagctactgcaaaggtaaagcgacgctgcccgcaatagtgtggtcagcaagaagaaatagtctgttatgtgctaaaccattacaaggatggagaagaaaggttcaactacacgcgcaggcaggtcgaatctccattggaagaacaagaggcaaaaaggcacaccgaaagtccggtcttccagataatgttcttgagtgtcaaaactgaaagcaccttgtgtaccattataacacatcacattagaaattactgtaggtctcaagacaacagattagtcatgttgacttgaaggtacgtgcaggaccggaacagcttgctgacgtggacagctgacaggggcagagctagccacgtgtgtcgaccgtgacagcgtccaggtccagcagcagaaaccacgtggagtctccgcgtcacaggcaaatatatgcgtctgttccgctgactgaaacgtgaaactcagggtttctaaacaagttttccaatc

SEQ ID NO: 23644 - DNA, 2346 bp, Zea Mays
cttggtctgattcctcttcttccgcgccgcctgtccggccggcagcggcagccatggcctcgaacaggagcagcagcacgattggaccgggtgcggcgccagctctcctccacctccacccgccacctcctccagggccctctcttgaagcggtccgacacgctaagaaagtggaatgagcgctgggtcatccttgatccagcaactggaaagatagaatacaaggtcaataggagtgacaaagatgttaggggagtagtcgtgttcgattcaacaagcacagtgactttgtcgcctacgaactttcatggactggcaaaatacgatggatgctgtttctatattggaactccacagaaaaaggaatactttctttgtgcagaaactcccagcgctgcaagagcatgggtatccactttacatgcgactcagttggtgctacaggctcataaggaggccgtgaattcattgggtgagaatggtcctgcaaaattgggaacagttgcaactgttgtggctgtagccaatgccactgcaattgaagcaacaaaggaggtagaagccgcaatgaagatttccctacgggcagctttgggctcaactacacataaacttaccaaaggtcaattagatgatctcacaataatgatggagacccttcgagttaaagacgacgaactacaccaattattgcaggatattcgtgcacgcgattctaccatcaatgaaattgcggataaattacaggagactgcagaagcagctgaaacagctgcttctgcagcacgttcaattgatgaagagagaagattttttacgttagaacttgaacggctgaaacaagaccacgagaaacaagttgaagcatctttgcttaggttaagggaatcggaggagaaagcaaagcttcttgttgaagagagagatcgcttgcttacagagagagattccgctcttcaagaagctcagatgtggcgctcggagctaggaaaagctagaggaaacgctgtaattctagaagcggctgttgtcagagccgaagagaaagctagggtctcagcagcagatgctgacatccgcataaaagaagccatgaaccgacttgagtctgccaccaaagaaaaggaggatctcctagcccttgtggatgctctacaatcccaaatacaaaggcaagagactagcacgatacaggtctgcgaagagagctcggaactctgctcgactgcctcgaagcacatggaggatgataacgttgacaaagcttgcgtaagcgatccggattcagtaccggttacggagaacgttgttgagttggacgacgagggagtcgacatccctacggtcggggacaccgaatgggacgatccccgttcttccgaagtgtctgatgtaagggaagtaaccacagaacccgaagaaaacagcttggatattcctgtcgatacttgatgtccaaccccttctgtgagaagaatcgcttagaaggcttaagctggacgccggccattcttgttcgccgtggtgagttgtgttagtagatcctcgttttagttcattgttacattcttgttcaagtttcggcatgagttactgaatttgagtccatttagacttgtgtgccctgtctctcctgaaataaaaaagcgcaactgtgttgagtctgcaagtgtacacctgaactcactctcatgtttagaaggtcatctttggcattttccccttgttattcaggaaattcttgttgtatcctgcaaactgagctagtaaaatttgcactgattctttctatctacgatctatctatataaacactgtaaattttgcaattttttttgtctttcgtttgagatggtatatgcagctactgcaaaggtaaagcgacgctgcccgcaatagtgtggtcagcaagaagaaatagtctgttatgtgctaaaccattacaaggatggagaagaaaggttcaactacacgcgcaggcaggtcgaatctccattggaagaacaagaggcaaaaaggcacaccgaaagtccggtcttccagataatgttcttgagtgtcaaaactgaaagcaccttgtgtaccattataacacatcacattagaaattactgtaggtctcaagacaacagattagtcatgttgacttgaaggtacgtgcaggaccggaacagcttgctgacgtggacagctgacaggggcagagctagccacgtgtgtcgaccgtgacagcgtccaggtccagcagcagaaaccacgtggagtctccgcgtcacaggcaaatatatgcgtctgttccgctgactgaaacgtgaaactcagggtttctaaacaagttttccaatc

SEQ ID NO: 23645 - DNA, 3420 bp, Zea Mays
cctttcgacatgtcattttcaggttgcttgcctcctgcaatccccctcttgcacagttgcacacaccaacacagatcttgagagctcgcgagcatggatctggtgtctggggcgattggcaagctcgcccccaagctcctccagcttctgcaagatgagtacaacctgcagaagggagtgaggcatcaaatccagtttctttcggaggagctggagagcatccatggcgccctccgcaaggtggctgccgtgccaccggaccagctggatgagcagaggatgggcaagctgttcgtagatgccaaggctcgccgcgacatcgcaagcgccattgaggccatcaaggggcagctacagcaggtgtccgagcggcgtgataggtgcaaagtcgatgatattgtggccaagcttgccgcaagctcaacaattgatcctcgtctcgaggccatgtacagagaggtgacacaacttgtcggcatcgacggggcaatgggtgagctgataccgatgttgtccctcacgggggatgatgtgtccaacaaggagcttaaggtagtctcggttcttggaattggaggattgggcaagaccactcttgctaaagtggtgtatgataagctcaagtcccagttcgattgtggggcttttgttcccgttggccgaaatcctgacttgaagaaagtcttcagggatatccttatggatcttgatgaacacagatacacggatctcaacatgttaatattggatgaaaggcagctcattaacaaactccgagacttcctcgagagtaacaggtacatcattgttattgacgacgtatgggaagcaaaatcttgggaaacattaagattggctttcattgacaataataaaggcagtagaataatctcaactacccgtaaatctgaagtcactagtggtaacaaggtttacaagccaaaaccactttcagatgataactccaaacgattattttatacgaggatatttggtggagaagacaaatgccctgacaatgaagtggatgaggtatctaataaaattctaaggaaatgtggaggaataccactagctatcatcacaatggctagtttattggtgggtaagtcatggggacaatggtttgaggtctgcaactctattggttttggcgataaagatattgagcaagtagacaaaactatgtcaatattgtctcttagctactatgatcttccctgtcatctaaggacttgcttattatatctaagttcattcccagaggattacattattgataagaattctttgatatggaagtggatagctgaaaattttgtccataagaaaccaggagtttggttatttgaggttggagagggatacttcaatgatcttgtcaacagaagcatgatccaggcagtggcatcaaaagacagcagtataatagatggttgccgcgtgcatgatatggtgcttgatctcctccgttctttggcacgcgaagaaaacttcgtgactgtcttatataatgatgaggacatgttgtcagaaataagcagcacgcgtaggttagcccaccaaaagagtacaatggatgctcatctgcacaattataagcagggcatgcaacatttgaggtcattaacagtctacaggtgtggtgctgataaggagctctcgtttcttctgagctttaagctcttgcgagtcctagatttagagaatgtatatactacgagctggcacaatgctaggcatattgggaatctaattcatctgaggtaccttgggttaaaacacacatatatgcctgagctaccagaagaaataggagctctgaagtttctgcagacactggacctggtggagaatttcttcatggaggaactgccatcgagcatagggcagctaacacagttggtgtgcctacgtgcttcagggttgataacaagcatgccccgtggggtaatcaaaacgctcacggccctggaggagttggcagtacaatgtcaattcaacgagcgtttctgcaggtaccaagggcaattcaaggaactaggcagcctgagtgaacttagggtgctaaagattaaggtcattagcacgatggaacagagcatactgccagatcttatgcaatctctaggaaatctccataagatccagagtctaaaactggagagtcatcctggttgcggtcgtgccgacaatgcaatgtttgatgcaatggcgctaccgggacatctcagacatttgcttgtgtcagagtactttgtccatttgtacaggctaccgtcgtgcattaatcccctatgccttgttaaactctcccacctggaattatatgtgatcgatatggacgagcatagtatgcaaatcctcggggagttggccgagctccgccatcttgtgctgtcaacgagatccacagtaagagttaataacgttgccgctgatggtttcttccacaagttgagatcctgcaagttttatacctcgatggtcctgtttgtgctcaacgaggactcgagtgtctcgtttaccctgtggaacgggacagatgatctagtgctgagctatggaaagaaggatggtgagtgtccaagtgcgccggccgtcatgccaaacctagaagagcttctgtttagcgcccagccgaagtggtccctgatgaaatgccaaggtagccatggcaacctcggcctggagcacctccgttcgcttcagaaagtcacagcggtgatcagctgcgaactgtatatgtttgaggcggagaagatggaagcagagctcggcatcagctgcgaccggtatttcgttgaggcgtgggtgatggacgcggaggatgggctgagagatgcgatcggtgttcatcccaaccaccctactcttgttctcggtcgcaagaatgaaggtgtcctcgcaagtgatgtgtcggacgatactgatgctgattcagccacaagaagaacatgaggttggacatggattattatagggagtggctcctggataaagaccttctctaatagcgaaagtgtacgcggcgtaaaagagcaacccgaaggtgataggagtaagcgctgaagctattgccagagaggttcggcttgatatggtaacaaagaccaaggacaataccaacttaaagggtgaaaaagaccacttattccgtgataatttatattacaattacgagtaaatatcaagggcatgaatgtaattttgtttgggctgtgtcccgtgcctataaatatatgaacagtagtaccgtattgttcaggctggattgtaatcactcccacgtcattctcgctcttacaccttttggcaagccgaaagtacaattataatacaactattggcaatgtttattcatgctcaatagagatgataataatgataaatcattggtatatgacaattattatcttt

SEQ ID NO: 23646 - DNA, 3406 bp, Zea Mays
cctttcgacatgtcattttcaggttgcttgcctcctgcaatccccctcttgcacagttgcacacaccaacacagatcttgagagctcgcgagcatggatctggtgtctggggcgattggcaagctcgcccccaagctcctccagcttctgcaagatgagtacaacctgcagaagggagtgaggcatcaaatccagtttctttcggaggagctggagagcatccatggcgccctccgcaaggtggctgccgtgccaccggaccagctggatgagcagaggatgggcaagctgttcgtagatgccaaggctcgccgcgacatcgcaagcgccattgaggccatcaaggggcagctacagcaggtgtccgagcggcgtgataggtgcaaagtcgatgatattgtggccaagcttgccgcaagctcaacaattgatcctcgtctcgaggccatgtacagagaggtgacacaacttgtcggcatcgacggggcaatgggtgagctgataccgatgttgtccctcacgggggatgatgtgtccaacaaggagcttaaggtagtctcggttcttggaattggaggattgggcaagaccactcttgctaaagtggtgtatgataagctcaagtcccagttcgattgtggggcttttgttcccgttggccgaaatcctgacttgaagaaagtcttcagggatatccttatggatcttgatgaacacagatacacggatctcaacatgtacatcattgttattgacgacgtatgggaagcaaaatcttgggaaacattaagattggctttcattgacaataataaaggcagtagaataatctcaactacccgtaaatctgaagtcactagtggtaacaaggtttacaagccaaaaccactttcagatgataactccaaacgattattttatacgaggatatttggtggagaagacaaatgccctgacaatgaagtggatgaggtatctaataaaattctaaggaaatgtggaggaataccactagctatcatcacaatggctagtttattggtgggtaagtcatggggacaatggtttgaggtctgcaactctattggttttggcgataaagatattgagcaagtagacaaaactatgtcaatattgtctcttagctactatgatcttccctgtcatctaaggacttgcttattatatctaagttcattcccagaggattacattattgataagaattctttgatatggaagtggatagctgaaaattttgtccataagaaaccaggagtttggttatttgaggttggagagggatacttcaatgatcttgtcaacagaagcatgatccaggcagtggcatcaaaagacagcagtataatagatggttgccgcgtgcatgatatggtgcttgatctcctccgttctttggcacgcgaagaaaacttcgtgactgtcttatataatgatgaggacatgttgtcagaaataagcagcacgcgtaggttagcccaccaaaagagtacaatggatgctcatctgcacaattataagcagggcatgcaacatttgaggtcattaacagtctacaggtgtggtgctgataaggagctctcgtttcttctgagctttaagctcttgcgagtcctagatttagagaatgtatatactacgagctggcacaatgctaggcatattgggaatctaattcatctgaggtaccttgggttaaaacacacatatatgcctgagctaccagaagaaataggagctctgaagtttctgcagacactggacctggtggagaatttcttcatggaggaactgccatcgagcatagggcagctaacacagttggtgtgcctacgtgcttcagggttgataacaagcatgccccgtggggtaatcaaaacgctcacggccctggaggagttggcagtacaatgtcaattcaacgagcgtttctgcaggtaccaagggcaattcaaggaactaggcagcctgagtgaacttagggtgctaaagattaaggtcattagcacgatggaacagagcatactgccagatcttatgcaatctctaggaaatctccataagatccagagtctaaaactggagagtcatcctggttgcggtcgtgccgacaatgcaatgtttgatgcaatggcgctaccgggacatctcagacatttgcttgtgtcagagtactttgtccatttgtacaggctaccgtcgtgcattaatcccctatgccttgttaaactctcccacctggaattatatgtgatcgatatggacgagcatagtatgcaaatcctcggggagttggccgagctccgccatcttgtgctgtcaacgagatccacagtaagagttaataacgttgccgctgatggtttcttccacaagttgagatcctgcaagttttatacctcgatggtcctgtttgtgctcaacgaggactcgagtgtctcgtttaccctgtggaacgggacagatgatctagtgctgagctatggaaagaaggatggtgagtgtccaagtgcgccggccgtcatgccaaacctagaagagcttctgtttagcgcccagccgaagtggtccctgatgaaatgccaaggtagccatggcaacctcggcctggagcacctccgttcgcttcagaaagtcacagcggtgatcagctgcgaactgtatatgtttgaggcggagaagatggaagcagagctcggcatcagctgcgaccggtatttcgttgaggcgtgggtgatggacgcggaggatgggctgagagatgcgatcggtgttcatcccaaccaccctactcttgttctcggtcgcaagaatgaaggtgtcctcgcaagtgatgtgtcggacgatactgatgctgattcagccacaagaagaacatgagggtgagggctcttctgttcacctaaacgcgtgtaaacagccgactacacgcgttcaaacactaaacgggagtggctcctggataaagaccttctctaatagcgaaagtgtacgcggcgtaaaagagcaacccgaaggtgataggagtaagcgctgaagctattgccagagaggttcggcttgatatggtaacaaagaccaaggacaataccaacttaaagggtgaaaaagaccacttattccgtgataatttatattacaattacgagtaaatatcaagggcatgaatgtaattttgtttgggctgtgtcccgtgcctataaatatatgaacagtagtaccgtattgttcaggctggattgtaatcactcccacgtcattctcgctcttacaccttttggcaagccgaaagtacaattataatacaactattggcaatgtttattcatgctcaatagagatgataataatgataaatcattggtatatgacaattattatcttt

SEQ ID NO: 23647 - DNA, 3466 bp, Zea Mays
cctttcgacatgtcattttcaggttgcttgcctcctgcaatccccctcttgcacagttgcacacaccaacacagatcttgagagctcgcgagcatggatctggtgtctggggcgattggcaagctcgcccccaagctcctccagcttctgcaagatgagtacaacctgcagaagggagtgaggcatcaaatccagtttctttcggaggagctggagagcatccatggcgccctccgcaaggtggctgccgtgccaccggaccagctggatgagcagaggatgggcaagctgttcgtagatgccaaggctcgccgcgacatcgcaagcgccattgaggccatcaaggggcagctacagcaggtgtccgagcggcgtgataggtgcaaagtcgatgatattgtggccaagcttgccgcaagctcaacaattgatcctcgtctcgaggccatgtacagagaggtgacacaacttgtcggcatcgacggggcaatgggtgagctgataccgatgttgtccctcacgggggatgatgtgtccaacaaggagcttaaggtagtctcggttcttggaattggaggattgggcaagaccactcttgctaaagtggtgtatgataagctcaagtcccagttcgattgtggggcttttgttcccgttggccgaaatcctgacttgaagaaagtcttcagggatatccttatggatcttgatgaacacagatacacggatctcaacatgttaatattggatgaaaggcagctcattaacaaactccgagacttcctcgagagtaacaggtacatcattgttattgacgacgtatgggaagcaaaatcttgggaaacattaagattggctttcattgacaataataaaggcagtagaataatctcaactacccgtaaatctgaagtcactagtggtaacaaggtttacaagccaaaaccactttcagatgataactccaaacgattattttatacgaggatatttggtggagaagacaaatgccctgacaatgaagtggatgaggtatctaataaaattctaaggaaatgtggaggaataccactagctatcatcacaatggctagtttattggtgggtaagtcatggggacaatggtttgaggtctgcaactctattggttttggcgataaagatattgagcaagtagacaaaactatgtcaatattgtctcttagctactatgatcttccctgtcatctaaggacttgcttattatatctaagttcattcccagaggattacattattgataagaattctttgatatggaagtggatagctgaaaattttgtccataagaaaccaggagtttggttatttgaggttggagagggatacttcaatgatcttgtcaacagaagcatgatccaggcagtggcatcaaaagacagcagtataatagatggttgccgcgtgcatgatatggtgcttgatctcctccgttctttggcacgcgaagaaaacttcgtgactgtcttatataatgatgaggacatgttgtcagaaataagcagcacgcgtaggttagcccaccaaaagagtacaatggatgctcatctgcacaattataagcagggcatgcaacatttgaggtcattaacagtctacaggtgtggtgctgataaggagctctcgtttcttctgagctttaagctcttgcgagtcctagatttagagaatgtatatactacgagctggcacaatgctaggcatattgggaatctaattcatctgaggtaccttgggttaaaacacacatatatgcctgagctaccagaagaaataggagctctgaagtttctgcagacactggacctggtggagaatttcttcatggaggaactgccatcgagcatagggcagctaacacagttggtgtgcctacgtgcttcagggttgataacaagcatgccccgtggggtaatcaaaacgctcacggccctggaggagttggcagtacaatgtcaattcaacgagcgtttctgcaggtaccaagggcaattcaaggaactaggcagcctgagtgaacttagggtgctaaagattaaggtcattagcacgatggaacagagcatactgccagatcttatgcaatctctaggaaatctccataagatccagagtctaaaactggagagtcatcctggttgcggtcgtgccgacaatgcaatgtttgatgcaatggcgctaccgggacatctcagacatttgcttgtgtcagagtactttgtccatttgtacaggctaccgtcgtgcattaatcccctatgccttgttaaactctcccacctggaattatatgtgatcgatatggacgagcatagtatgcaaatcctcggggagttggccgagctccgccatcttgtgctgtcaacgagatccacagtaagagttaataacgttgccgctgatggtttcttccacaagttgagatcctgcaagttttatacctcgatggtcctgtttgtgctcaacgaggactcgagtgtctcgtttaccctgtggaacgggacagatgatctagtgctgagctatggaaagaaggatggtgagtgtccaagtgcgccggccgtcatgccaaacctagaagagcttctgtttagcgcccagccgaagtggtccctgatgaaatgccaaggtagccatggcaacctcggcctggagcacctccgttcgcttcagaaagtcacagcggtgatcagctgcgaactgtatatgtttgaggcggagaagatggaagcagagctcggcatcagctgcgaccggtatttcgttgaggcgtgggtgatggacgcggaggatgggctgagagatgcgatcggtgttcatcccaaccaccctactcttgttctcggtcgcaagaatgaaggtgtcctcgcaagtgatgtgtcggacgatactgatgctgattcagccacaagaagaacatgagggtgagggctcttctgttcacctaaacgcgtgtaaacagccgactacacgcgttcaaacactaaacgggagtggctcctggataaagaccttctctaatagcgaaagtgtacgcggcgtaaaagagcaacccgaaggtgataggagtaagcgctgaagctattgccagagaggttcggcttgatatggtaacaaagaccaaggacaataccaacttaaagggtgaaaaagaccacttattccgtgataatttatattacaattacgagtaaatatcaagggcatgaatgtaattttgtttgggctgtgtcccgtgcctataaatatatgaacagtagtaccgtattgttcaggctggattgtaatcactcccacgtcattctcgctcttacaccttttggcaagccgaaagtacaattataatacaactattggcaatgtttattcatgctcaatagagatgataataatgataaatcattggtatatgacaattattatcttt

SEQ ID NO: 23648 - DNA, 3426 bp, Zea Mays
cctttcgacatgtcattttcaggttgcttgcctcctgcaatccccctcttgcacagttgcacacaccaacacagatcttgagagctcgcgagcatggatctggtgtctggggcgattggcaagctcgcccccaagctcctccagcttctgcaagatgagtacaacctgcagaagggagtgaggcatcaaatccagtttctttcggaggagctggagagcatccatggcgccctccgcaaggtggctgccgtgccaccggaccagctggatgagcagaggatgggcaagctgttcgtagatgccaaggctcgccgcgacatcgcaagcgccattgaggccatcaaggggcagctacagcaggtgtccgagcggcgtgataggtgcaaagtcgatgatattgtggccaagcttgccgcaagctcaacaattgatcctcgtctcgaggccatgtacagagaggtgacacaacttgtcggcatcgacggggcaatgggtgagctgataccgatgttgtccctcacgggggatgatgtgtccaacaaggagcttaaggtagtctcggttcttggaattggaggattgggcaagaccactcttgctaaagtggtgtatgataagctcaagtcccagttcgattgtggggcttttgttcccgttggccgaaatcctgacttgaagaaagtcttcagggatatccttatggatcttgatgaacacagatacacggatctcaacatgtacatcattgttattgacgacgtatgggaagcaaaatcttgggaaacattaagattggctttcattgacaataataaaggcagtagaataatctcaactacccgtaaatctgaagtcactagtggtaacaaggtttacaagccaaaaccactttcagatgataactccaaacgattattttatacgaggatatttggtggagaagacaaatgccctgacaatgaagtggatgaggtatctaataaaattctaaggaaatgtggaggaataccactagctatcatcacaatggctagtttattggtgggtaagtcatggggacaatggtttgaggtctgcaactctattggttttggcgataaagatattgagcaagtagacaaaactatgtcaatattgtctcttagctactatgatcttccctgtcatctaaggacttgcttattatatctaagttcattcccagaggattacattattgataagaattctttgatatggaagtggatagctgaaaattttgtccataagaaaccaggagtttggttatttgaggttggagagggatacttcaatgatcttgtcaacagaagcatgatccaggcagtggcatcaaaagacagcagtataatagatggttgccgcgtgcatgatatggtgcttgatctcctccgttctttggcacgcgaagaaaacttcgtgactgtcttatataatgatgaggacatgttgtcagaaataagcagcacgcgtaggttagcccaccaaaagagtacaatggatgctcatctgcacaattataagcagggcatgcaacatttgaggtcattaacagtctacaggtgtggtgctgataaggagctctcgtttcttctgagctttaagctcttgcgagtcctagatttagagaatgtatatactacgagctggcacaatgctaggcatattgggaatctaattcatctgaggtaccttgggttaaaacacacatatatgcctgagctaccagaagaaataggagctctgaagtttctgcagacactggacctggtggagaatttcttcatggaggaactgccatcgagcatagggcagctaacacagttggtgtgcctacgtgcttcagggttgataacaagcatgccccgtggggtaatcaaaacgctcacggccctggaggagttggcagtacaatgtcaattcaacgagcgtttctgcaggtaccaagggcaattcaaggaactaggcagcctgagtgaacttagggtgctaaagattaaggtcattagcacgatggaacagagcatactgccagatcttatgcaatctctaggaaatctccataagatccagagtctaaaactggagagtcatcctggttgcggtcgtgccgacaatgcaatgtttgatgcaatggcgctaccgggacatctcagacatttgcttgtgtcagagtactttgtccatttgtacaggctaccgtcgtgcattaatcccctatgccttgttaaactctcccacctggaattatatgtgatcgatatggacgagcatagtatgcaaatcctcggggagttggccgagctccgccatcttgtgctgtcaacgagatccacagtaagagttaataacgttgccgctgatggtttcttccacaagttgagatcctgcaagttttatacctcgatggtcctgtttgtgctcaacgaggactcgagtgtctcgtttaccctgtggaacgggacagatgatctagtgctgagctatggaaagaaggatggtgagtgtccaagtgcgccggccgtcatgccaaacctagaagagcttctgtttagcgcccagccgaagtggtccctgatgaaatgccaaggtagccatggcaacctcggcctggagcacctccgttcgcttcagaaagtcacagcggtgatcagctgcgaactgtatatgtttgaggcggagaagatggaagcagagctcggcatcagctgcgaccggtatttcgttgaggcgtgggtgatggacgcggaggatgggctgagagatgcgatcggtgttcatcccaaccaccctactcttgttctcggtcgcaagaatgaaggtgtcctcgcaagtgatgtgtcggacgatactgatgctgattcagccacaagaagaacatgagggtgagggctcttctgttcacctaaacgcgtgtaaacagccgactacacgcgttcaaacactaaacgttggacatggattattatagggagtggctcctggataaagaccttctctaatagcgaaagtgtacgcggcgtaaaagagcaacccgaaggtgataggagtaagcgctgaagctattgccagagaggttcggcttgatatggtaacaaagaccaaggacaataccaacttaaagggtgaaaaagaccacttattccgtgataatttatattacaattacgagtaaatatcaagggcatgaatgtaattttgtttgggctgtgtcccgtgcctataaatatatgaacagtagtaccgtattgttcaggctggattgtaatcactcccacgtcattctcgctcttacaccttttggcaagccgaaagtacaattataatacaactattggcaatgtttattcatgctcaatagagatgataataatgataaatcattggtatatgacaattattatcttt

SEQ ID NO: 23649 - DNA, 4703 bp, Zea Mays
cctttcgacatgtcattttcaggttgcttgcctcctgcaatccccctcttgcacagttgcacacaccaacacagatcttgagagctcgcgagcatggatctggtgtctggggcgattggcaagctcgcccccaagctcctccagcttctgcaagatgagtacaacctgcagaagggagtgaggcatcaaatccagtttctttcggaggagctggagagcatccatggcgccctccgcaaggtggctgccgtgccaccggaccagctggatgagcagaggatgggcaagctgttcgtagatgccaaggctcgccgcgacatcgcaagcgccattgaggccatcaaggggcagctacagcaggtgtccgagcggcgtgataggtgcaaagtcgatgatattgtggccaagcttgccgcaagctcaacaattgatcctcgtctcgaggccatgtacagagaggtgacacaacttgtcggcatcgacggggcaatgggtgagctgataccgatgttgtccctcacgggggatgatgtgtccaacaaggagcttaaggtagtctcggttcttggaattggaggattgggcaagaccactcttgctaaagtggtgtatgataagctcaagtcccagttcgattgtggggcttttgttcccgttggccgaaatcctgacttgaagaaagtcttcagggatatccttatggatcttgatgaacacagatacacggatctcaacatgtacatcattgttattgacgacgtatgggaagcaaaatcttgggaaacattaagattggctttcattgacaataataaaggcagtagaataatctcaactacccgtaaatctgaagtcactagtggtaacaaggtttacaagccaaaaccactttcagatgataactccaaacgattattttatacgaggatatttggtggagaagacaaatgccctgacaatgaagtggatgaggtatctaataaaattctaaggaaatgtggaggaataccactagctatcatcacaatggctagtttattggtgggtaagtcatggggacaatggtttgaggtctgcaactctattggttttggcgataaagatattgagcaagtagacaaaactatgtcaatattgtctcttagctactatgatcttccctgtcatctaaggacttgcttattatatctaagttcattcccagaggattacattattgataagaattctttgatatggaagtggatagctgaaaattttgtccataagaaaccaggagtttggttatttgaggttggagagggatacttcaatgatcttgtcaacagaagcatgatccaggcagtggcatcaaaagacagcagtataatagatggttgccgcgtgcatgatatggtgcttgatctcctccgttctttggcacgcgaagaaaacttcgtgactgtcttatataatgatgaggacatgttgtcagaaataagcagcacgcgtaggttagcccaccaaaagagtacaatggatgctcatctgcacaattataagcagggcatgcaacatttgaggtcattaacagtctacaggtgtggtgctgataaggagctctcgtttcttctgagctttaagctcttgcgagtcctagatttagagaatgtatatactacgagctggcacaatgctaggcatattgggaatctaattcatctgaggtaccttgggttaaaacacacatatatgcctgagctaccagaagaaataggagctctgaagtttctgcagacactggacctggtggagaatttcttcatggaggaactgccatcgagcatagggcagctaacacagttggtgtgcctacgtgcttcagggttgataacaagcatgccccgtggggtaatcaaaacgctcacggccctggaggagttggcagtacaatgtcaattcaacgagcgtttctgcaggtaccaagggcaattcaaggaactaggcagcctgagtgaacttagggtgctaaagattaaggtcattagcacgatggaacagagcatactgccagatcttatgcaatctctaggaaatctccataagatccagagtctaaaactggagagtcatcctggttgcggtcgtgccgacaatgcaatgtttgatgcaatggcgctaccgggacatctcagacatttgcttgtgtcagagtactttgtccatttgtacaggctaccgtcgtgcattaatcccctatgccttgttaaactctcccacctggaattatatgtgatcgatatggacgagcatagtatgcaaatcctcggggagttggccgagctccgccatcttgtgctgtcaacgagatccacagtaagagttaataacgttgccgctgatggtttcttccacaagttgagatcctgcaagttttatacctcgatggtcctgtttgtgctcaacgaggactcgagtgtctcgtttaccctgtggaacgggacagatgatctagtgctgagctatggaaagaaggatggtgagtgtccaagtgcgccggccgtcatgccaaacctagaagagcttctgtttagcgcccagccgaagtggtccctgatgaaatgccaaggtagccatggcaacctcggcctggagcacctccgttcgcttcagaaagtcacagcggtgatcagctgcgaactgtatatgtttgaggcggagaagatggaagcagagctcggcatcagctgcgaccggtatttcgttgaggcgtgggtgatggacgcggaggatgggctgagagatgcgatcggtgttcatcccaaccaccctactcttgttctcggtcgcaagaatgaaggtgtcctcgcaagtgatgtgtcggacgatactgatgctgattcagccacaagaagaacatgagggtgagggctcttctgttcacctaaacgcgtgtaaacagccgactacacgcgttcaaacactaaacggtatgtttgcttacagcttaggccctagtcactaaattaaacaccaaacacgtctaaatggtcaaaccagtttaaaatagtttaaacggtggcattaaacagtggctaaacgggtgtaaacgccaaaacatgtgttgcaacggcagtttcatttacaggccgtaagcaatggtacgctttcccggcccatttggtgctggttaggttaagggtaaatgggtcggttcggttaagggtggattaaagggcattagagagaattaatctcttgctagttaaatttgaataagccgagatttaatctcctaaatccctcttcaatccgaatgtcgtaaccgaacaggaccttaagggattttttcaacacgttatcaccagtctagcggcttttcaatgggttccatgtcgtatatagatagagatgcgtttggtttaatttattctctgtttctacattcaaaaagcaaaagttaaactccgtttggcgcagctccttgtgacgaataatgactccactcggcgatctgatgcgtgcctcctctcagtctctcactactccggcccgttcaaccaacaccctcaccatacaaagttacaaaccaagcaacaaagccacagcaccagagatattttctaatgtttatgtgaattaattagtttatagttagactaatagatatattcgagacctcttacaggcgatcgtttgaactcttccaaaacaataacatatgcatattgatcatggtggagaataatatatgtaaaaataataatatgcatgtggcatctttaatggtgaagcatgcatttccatattcatgaaatatatgacagtcaaccacaaaaatcgttgtagtgcggttaatttgcatataaacaatcttagagacaatacaaacaaatcttatataatctattgtttcacaacaggttgaacaaaacaacttctaattttttttcaaagtcattagattttttataatagatagctcataggaggttttgttttttcgcagtagaccgctgaaccaagcacactctaggccagtcgatcgacgtgctcttgaaagcgaatttcttatgtgcacttagctttgggcatattttcgaataacactatgcatcctaatttagtttgagatatgtatgagtgcatattttcatctaacaacattgtttgtctagttgtcaaaactcatcaaaagacatgtactcctccattatattccacagctagactagacactagagaacgtctaaccatatgttttcagttggacatggattattatagggagtggctcctggataaagaccttctctaatagcgaaagtgtacgcggcgtaaaagagcaacccgaaggtgataggagtaagcgctgaagctattgccagagaggttcggcttgatatggtaacaaagaccaaggacaataccaacttaaagggtgaaaaagaccacttattccgtgataatttatattacaattacgagtaaatatcaagggcatgaatgtaattttgtttgggctgtgtcccgtgcctataaatatatgaacagtagtaccgtattgttcaggctggattgtaatcactcccacgtcattctcgctcttacaccttttggcaagccgaaagtacaattataatacaactattggcaatgtttattcatgctcaatagagatgataataatgataaatcattggtatatgacaattattatcttt

SEQ ID NO: 23650 - DNA, 3486 bp, Zea Mays
cctttcgacatgtcattttcaggttgcttgcctcctgcaatccccctcttgcacagttgcacacaccaacacagatcttgagagctcgcgagcatggatctggtgtctggggcgattggcaagctcgcccccaagctcctccagcttctgcaagatgagtacaacctgcagaagggagtgaggcatcaaatccagtttctttcggaggagctggagagcatccatggcgccctccgcaaggtggctgccgtgccaccggaccagctggatgagcagaggatgggcaagctgttcgtagatgccaaggctcgccgcgacatcgcaagcgccattgaggccatcaaggggcagctacagcaggtgtccgagcggcgtgataggtgcaaagtcgatgatattgtggccaagcttgccgcaagctcaacaattgatcctcgtctcgaggccatgtacagagaggtgacacaacttgtcggcatcgacggggcaatgggtgagctgataccgatgttgtccctcacgggggatgatgtgtccaacaaggagcttaaggtagtctcggttcttggaattggaggattgggcaagaccactcttgctaaagtggtgtatgataagctcaagtcccagttcgattgtggggcttttgttcccgttggccgaaatcctgacttgaagaaagtcttcagggatatccttatggatcttgatgaacacagatacacggatctcaacatgttaatattggatgaaaggcagctcattaacaaactccgagacttcctcgagagtaacaggtacatcattgttattgacgacgtatgggaagcaaaatcttgggaaacattaagattggctttcattgacaataataaaggcagtagaataatctcaactacccgtaaatctgaagtcactagtggtaacaaggtttacaagccaaaaccactttcagatgataactccaaacgattattttatacgaggatatttggtggagaagacaaatgccctgacaatgaagtggatgaggtatctaataaaattctaaggaaatgtggaggaataccactagctatcatcacaatggctagtttattggtgggtaagtcatggggacaatggtttgaggtctgcaactctattggttttggcgataaagatattgagcaagtagacaaaactatgtcaatattgtctcttagctactatgatcttccctgtcatctaaggacttgcttattatatctaagttcattcccagaggattacattattgataagaattctttgatatggaagtggatagctgaaaattttgtccataagaaaccaggagtttggttatttgaggttggagagggatacttcaatgatcttgtcaacagaagcatgatccaggcagtggcatcaaaagacagcagtataatagatggttgccgcgtgcatgatatggtgcttgatctcctccgttctttggcacgcgaagaaaacttcgtgactgtcttatataatgatgaggacatgttgtcagaaataagcagcacgcgtaggttagcccaccaaaagagtacaatggatgctcatctgcacaattataagcagggcatgcaacatttgaggtcattaacagtctacaggtgtggtgctgataaggagctctcgtttcttctgagctttaagctcttgcgagtcctagatttagagaatgtatatactacgagctggcacaatgctaggcatattgggaatctaattcatctgaggtaccttgggttaaaacacacatatatgcctgagctaccagaagaaataggagctctgaagtttctgcagacactggacctggtggagaatttcttcatggaggaactgccatcgagcatagggcagctaacacagttggtgtgcctacgtgcttcagggttgataacaagcatgccccgtggggtaatcaaaacgctcacggccctggaggagttggcagtacaatgtcaattcaacgagcgtttctgcaggtaccaagggcaattcaaggaactaggcagcctgagtgaacttagggtgctaaagattaaggtcattagcacgatggaacagagcatactgccagatcttatgcaatctctaggaaatctccataagatccagagtctaaaactggagagtcatcctggttgcggtcgtgccgacaatgcaatgtttgatgcaatggcgctaccgggacatctcagacatttgcttgtgtcagagtactttgtccatttgtacaggctaccgtcgtgcattaatcccctatgccttgttaaactctcccacctggaattatatgtgatcgatatggacgagcatagtatgcaaatcctcggggagttggccgagctccgccatcttgtgctgtcaacgagatccacagtaagagttaataacgttgccgctgatggtttcttccacaagttgagatcctgcaagttttatacctcgatggtcctgtttgtgctcaacgaggactcgagtgtctcgtttaccctgtggaacgggacagatgatctagtgctgagctatggaaagaaggatggtgagtgtccaagtgcgccggccgtcatgccaaacctagaagagcttctgtttagcgcccagccgaagtggtccctgatgaaatgccaaggtagccatggcaacctcggcctggagcacctccgttcgcttcagaaagtcacagcggtgatcagctgcgaactgtatatgtttgaggcggagaagatggaagcagagctcggcatcagctgcgaccggtatttcgttgaggcgtgggtgatggacgcggaggatgggctgagagatgcgatcggtgttcatcccaaccaccctactcttgttctcggtcgcaagaatgaaggtgtcctcgcaagtgatgtgtcggacgatactgatgctgattcagccacaagaagaacatgagggtgagggctcttctgttcacctaaacgcgtgtaaacagccgactacacgcgttcaaacactaaacgttggacatggattattatagggagtggctcctggataaagaccttctctaatagcgaaagtgtacgcggcgtaaaagagcaacccgaaggtgataggagtaagcgctgaagctattgccagagaggttcggcttgatatggtaacaaagaccaaggacaataccaacttaaagggtgaaaaagaccacttattccgtgataatttatattacaattacgagtaaatatcaagggcatgaatgtaattttgtttgggctgtgtcccgtgcctataaatatatgaacagtagtaccgtattgttcaggctggattgtaatcactcccacgtcattctcgctcttacaccttttggcaagccgaaagtacaattataatacaactattggcaatgtttattcatgctcaatagagatgataataatgataaatcattggtatatgacaattattatcttt

SEQ ID NO: 23651 - DNA, 4763 bp, Zea Mays
cctttcgacatgtcattttcaggttgcttgcctcctgcaatccccctcttgcacagttgcacacaccaacacagatcttgagagctcgcgagcatggatctggtgtctggggcgattggcaagctcgcccccaagctcctccagcttctgcaagatgagtacaacctgcagaagggagtgaggcatcaaatccagtttctttcggaggagctggagagcatccatggcgccctccgcaaggtggctgccgtgccaccggaccagctggatgagcagaggatgggcaagctgttcgtagatgccaaggctcgccgcgacatcgcaagcgccattgaggccatcaaggggcagctacagcaggtgtccgagcggcgtgataggtgcaaagtcgatgatattgtggccaagcttgccgcaagctcaacaattgatcctcgtctcgaggccatgtacagagaggtgacacaacttgtcggcatcgacggggcaatgggtgagctgataccgatgttgtccctcacgggggatgatgtgtccaacaaggagcttaaggtagtctcggttcttggaattggaggattgggcaagaccactcttgctaaagtggtgtatgataagctcaagtcccagttcgattgtggggcttttgttcccgttggccgaaatcctgacttgaagaaagtcttcagggatatccttatggatcttgatgaacacagatacacggatctcaacatgttaatattggatgaaaggcagctcattaacaaactccgagacttcctcgagagtaacaggtacatcattgttattgacgacgtatgggaagcaaaatcttgggaaacattaagattggctttcattgacaataataaaggcagtagaataatctcaactacccgtaaatctgaagtcactagtggtaacaaggtttacaagccaaaaccactttcagatgataactccaaacgattattttatacgaggatatttggtggagaagacaaatgccctgacaatgaagtggatgaggtatctaataaaattctaaggaaatgtggaggaataccactagctatcatcacaatggctagtttattggtgggtaagtcatggggacaatggtttgaggtctgcaactctattggttttggcgataaagatattgagcaagtagacaaaactatgtcaatattgtctcttagctactatgatcttccctgtcatctaaggacttgcttattatatctaagttcattcccagaggattacattattgataagaattctttgatatggaagtggatagctgaaaattttgtccataagaaaccaggagtttggttatttgaggttggagagggatacttcaatgatcttgtcaacagaagcatgatccaggcagtggcatcaaaagacagcagtataatagatggttgccgcgtgcatgatatggtgcttgatctcctccgttctttggcacgcgaagaaaacttcgtgactgtcttatataatgatgaggacatgttgtcagaaataagcagcacgcgtaggttagcccaccaaaagagtacaatggatgctcatctgcacaattataagcagggcatgcaacatttgaggtcattaacagtctacaggtgtggtgctgataaggagctctcgtttcttctgagctttaagctcttgcgagtcctagatttagagaatgtatatactacgagctggcacaatgctaggcatattgggaatctaattcatctgaggtaccttgggttaaaacacacatatatgcctgagctaccagaagaaataggagctctgaagtttctgcagacactggacctggtggagaatttcttcatggaggaactgccatcgagcatagggcagctaacacagttggtgtgcctacgtgcttcagggttgataacaagcatgccccgtggggtaatcaaaacgctcacggccctggaggagttggcagtacaatgtcaattcaacgagcgtttctgcaggtaccaagggcaattcaaggaactaggcagcctgagtgaacttagggtgctaaagattaaggtcattagcacgatggaacagagcatactgccagatcttatgcaatctctaggaaatctccataagatccagagtctaaaactggagagtcatcctggttgcggtcgtgccgacaatgcaatgtttgatgcaatggcgctaccgggacatctcagacatttgcttgtgtcagagtactttgtccatttgtacaggctaccgtcgtgcattaatcccctatgccttgttaaactctcccacctggaattatatgtgatcgatatggacgagcatagtatgcaaatcctcggggagttggccgagctccgccatcttgtgctgtcaacgagatccacagtaagagttaataacgttgccgctgatggtttcttccacaagttgagatcctgcaagttttatacctcgatggtcctgtttgtgctcaacgaggactcgagtgtctcgtttaccctgtggaacgggacagatgatctagtgctgagctatggaaagaaggatggtgagtgtccaagtgcgccggccgtcatgccaaacctagaagagcttctgtttagcgcccagccgaagtggtccctgatgaaatgccaaggtagccatggcaacctcggcctggagcacctccgttcgcttcagaaagtcacagcggtgatcagctgcgaactgtatatgtttgaggcggagaagatggaagcagagctcggcatcagctgcgaccggtatttcgttgaggcgtgggtgatggacgcggaggatgggctgagagatgcgatcggtgttcatcccaaccaccctactcttgttctcggtcgcaagaatgaaggtgtcctcgcaagtgatgtgtcggacgatactgatgctgattcagccacaagaagaacatgagggtgagggctcttctgttcacctaaacgcgtgtaaacagccgactacacgcgttcaaacactaaacggtatgtttgcttacagcttaggccctagtcactaaattaaacaccaaacacgtctaaatggtcaaaccagtttaaaatagtttaaacggtggcattaaacagtggctaaacgggtgtaaacgccaaaacatgtgttgcaacggcagtttcatttacaggccgtaagcaatggtacgctttcccggcccatttggtgctggttaggttaagggtaaatgggtcggttcggttaagggtggattaaagggcattagagagaattaatctcttgctagttaaatttgaataagccgagatttaatctcctaaatccctcttcaatccgaatgtcgtaaccgaacaggaccttaagggattttttcaacacgttatcaccagtctagcggcttttcaatgggttccatgtcgtatatagatagagatgcgtttggtttaatttattctctgtttctacattcaaaaagcaaaagttaaactccgtttggcgcagctccttgtgacgaataatgactccactcggcgatctgatgcgtgcctcctctcagtctctcactactccggcccgttcaaccaacaccctcaccatacaaagttacaaaccaagcaacaaagccacagcaccagagatattttctaatgtttatgtgaattaattagtttatagttagactaatagatatattcgagacctcttacaggcgatcgtttgaactcttccaaaacaataacatatgcatattgatcatggtggagaataatatatgtaaaaataataatatgcatgtggcatctttaatggtgaagcatgcatttccatattcatgaaatatatgacagtcaaccacaaaaatcgttgtagtgcggttaatttgcatataaacaatcttagagacaatacaaacaaatcttatataatctattgtttcacaacaggttgaacaaaacaacttctaattttttttcaaagtcattagattttttataatagatagctcataggaggttttgttttttcgcagtagaccgctgaaccaagcacactctaggccagtcgatcgacgtgctcttgaaagcgaatttcttatgtgcacttagctttgggcatattttcgaataacactatgcatcctaatttagtttgagatatgtatgagtgcatattttcatctaacaacattgtttgtctagttgtcaaaactcatcaaaagacatgtactcctccattatattccacagctagactagacactagagaacgtctaaccatatgttttcagttggacatggattattatagggagtggctcctggataaagaccttctctaatagcgaaagtgtacgcggcgtaaaagagcaacccgaaggtgataggagtaagcgctgaagctattgccagagaggttcggcttgatatggtaacaaagaccaaggacaataccaacttaaagggtgaaaaagaccacttattccgtgataatttatattacaattacgagtaaatatcaagggcatgaatgtaattttgtttgggctgtgtcccgtgcctataaatatatgaacagtagtaccgtattgttcaggctggattgtaatcactcccacgtcattctcgctcttacaccttttggcaagccgaaagtacaattataatacaactattggcaatgtttattcatgctcaatagagatgataataatgataaatcattggtatatgacaattattatcttt

SEQ ID NO: 23652 - DNA, 990 bp, Zea Mays
agcggcgaggcggggcgccgccgtcttctactctacctggcccggccggccgccgtgcaggcgcaccgatccaatcctcggagctggcggagtctccggccgcccggcgcccgatgctgcccgccacccgaggcagcaagccaccgcagaggtccgccgccagatcctgctccgcctccttagtccttatcagaagtcatggacctgtcgtcggacccgaagcgcaagccgcgctgcctcagcaaggtggtcatgctcgcgctcctcatgagctaagttgagtttatactttaggcagttcatgagctaagttgagttttagccttacaatcagtttgcgtcaaacattttgtataacagtaagctagagagtagctgctatagcaagcagctacaactacaaacaagaggggcacaagcagcattgccgcccataccaatgagcacaaagcatcaacttctgctggttactaacaactccaatgctacagctcatgatgaaataaacattgccaaggaagcttctctgaaaacatattaggttgatggcagcatgctaaagcagaaaagaaaatactaagttttacctatagcacatactaccatgatggccagggtttatcctcttagcaatctcggaccaggaaggcccgaagcctcgaactcagataacatggaaacttcttcaggccgctagtcatcaaaatataaatctggatcaagaatattggtcgctctgccaaggaccgctagaatatggtatccactgctctggctccacgcctccgctgcggcattctccactgctctcttcttctccaactccggtggccggcacgaccgcaacacagctcattccctcaaatccgtgatcgactgtgccttgatttggttacatgaactggcaagaaaaaaaatcttatatttctatattacaaagccggttcaaaacggcatctatgagactatccacgtcgctccaaaaatcgt

SEQ ID NO: 23653 - DNA, 2600 bp, Zea Mays
agcggcgaggcggggcgccgccgtcttctactctacctggcccggccggccgccgtgcaggcgcaccgatccaatcctcggagctggcggagtctccggccgcccggcgcccgatgctgcccgccacccgaggcagcaagccaccgcagaggtccgccgccagatcctgctccgcctccttagtccttatcagaagtcatggacctgtcgtcggacccgaagcgcaagccgcgctgcctcagcaaggtggtcatgctcgcgctcctcatgagctaagttgagtttatactttaggcagttcatgagctaagttgagttttagccttacaatcagtttgcgtcaaacattttgtataacagtaagctagagagtagctgctatagcaagcagctacaactacaaacaagaggggcacaagcagcattgccgcccataccaatgagcacaaagcatcaacttctgctggttactaacaactccaatgtaaagtttcctccagtccgataaaacaataccaagaaaagtttcagttaccagttactatgtgttatttaatttgcagcagccagcaactagacaaatggtagcggaactaataagcaaaagaatcaccaagtgtacattgggattcaaaatggataggacgaatttctcatccagtgaatcagacaaacttgttagtttcttcgtaatgagagagaacaatcagacgttaaatacaggccccaatgcacggagccaaccggccctgcccacaccacaccacaggccgaaacgagaggcggagagatgaatctacccggagaggctcaagatccgcccccagccccacgaccatgacccaccacctgcagaaggcaccgctgacagccacagatccaccgacggccaacgcccccgacccaggcaccagctacaagcacaagcaagccacgccgccgtcgcagcgggccgaccgcgtgcgtgggcgccaacgccgctggccagccacggccacgcgagcgcgcgggcaccaccgccgcgggctagccgcgcgagccaccacggccgtggccgcaaggccacccgcccatgccagcagggaggagcggcgggcggcgaccaacccctagatccggccagtcagcccgccgatccggccttcccaagggcggatcaggtcgccgaccacctccaggaagagggaggagtggagtgggtggaagaagggagggaaatgagtgagagagcagtcccgccgctgccctcctcgctgctcgttgaacttccggtgagctgctccggcgacggcgggggtgaagaccggcggcggtgggtggagttggacggggtcgatggggagccgccagtgacgcctagaggaggacgacgcggggacaggcaatactctaaaggatgacttagacatcctttgatggtgttggaaacgatgaacgaaaatcaagctttgtaatgtatgaaaaactcatgcttgatcgttgggatacagattttgtgtatactaggttgtgctgttgggctggccggtactacaagagaaggaggactccacacgaacagggaaatcgaacagaacaactaccacatcgtatttctcatcccaacgccatcgtcttcctcctcggtagctgctggttcctcacttctagggttagagtttccctctcttaatcctctacctcttcctacttagtttgctcttgatctccccatcctaagatcgtgtatctttgctcgaactccttgattaccagtgaaaccagttgtcatgtttgcgctgtttgcatccatggagtgcggtgctaacagatttgcgtgtagattgactttgatatatcattagctgaggggtgatcttgagaacctatggagataagtacacaagtactctagaagaaatttgcaatatcgtcacatctgtcagacgaccgtcacctttggagggcaaaagtgacattaggtcacaagggtgaattgaacgccgctctttttctctatcaacaaaactggtttgaaaaatagctttcttcatttgtctggcttctctaactttctgaacttgatgtttatgaagttttctccatcgtctacaggctacagctcatgatgaaataaacattgccaaggaagcttctctgaaaacatattaggttgatggcagcatgctaaagcagaaaagaaaatactaagttttacctatagcacatactaccatgatggccagggtttatcctcttagcaatctcggaccaggaaggcccgaagcctcgaactcagataacatggaaacttcttcaggccgctagtcatcaaaatataaatctggatcaagaatattggtcgctctgccaaggaccgctagaatatggtatccactgctctggctccacgcctccgctgcggcattctccactgctctcttcttctccaactccggtggccggcacgaccgcaacacagctcattccctcaaatccgtgatcgactgtgccttgatttggttacatgaactggcaagaaaaaaaatcttatatttctatattacaaagccggttcaaaacggcatctatgagactatccacgtcgctccaaaaatcgt

SEQ ID NO: 23654 - DNA, 792 bp, Zea Mays
ctacttcacccagatttccaggctcccatcccatcctcacctccgacactacgcctcgtacctcgtgcccaccgccaccaactttgctcccgatgctccgcggcttcgccttggcacgcgtcggtcgtgcccgcggcctcgctcctccactagcatagctgcataggcacaggtgaacccgcacaacgacataggcggcgctccgcgcctggctcctatcggctaccgccacgcctggctttgcctcggcacgcgccgagtcgtgccttagcccccaacccccctcttgcacaggattagtcgtcttgtatcttcaacattacgaagtgatgatggccttcttttcctgaaaggatgatgactatcttgctcctctccaagctgatcaagaaaaagagttgaagcttgtgcagtaggttgaactccacagggtagaggaagctgcagtaagagaggctgctcttgaacatcaaaagaaagaaaagaagctaaaaaagaacatgaggaagaggttaggttccccaacatgtccagtttgtccgcaagggttttgcggggatttcgaacaagcattaaaccgttccgggttggattggaaaatggactgtggactgccttataatccttgggggcatgctgtgcacgacatggccactgagagccgatggaggccagatgagaagaagctggcttctgctgccactgagaaattcgaagaggaagataatacctcctattgtcaacaatgatgtgtcaatggagtgtgtacaacatgaaaaaaaccaaacatga

SEQ ID NO: 23655 - DNA, 917 bp, Zea Mays
cgtttctccgctctcgccgcatacgaagctgaaggcagccaaaggagcgtttgacgcgagcatcgactgcggaataaccttcttcgacaccgccgaagtgtacggagcaggggtatcgggagcgattaattcagagagtttactaggaaggtttatcaaggagaggcagcggaaggagcaggtggacgtggctgtcgcgaccaagttcgcagctcttccatggaggttcggtcgtgggagcgtcatctgcgcgctcaaggcctcgctggatcgccttggcgtctcttcggccagggatatggggcaacgaagactacctggacggccttggagacgctgtggagcaagggcttgtgaaggcagtcggggtctcaaactacagcgagaaacgtctccgagacgcgtacgagcgcctcaggaagaggggggtcccgctcgcctccaaccaggtgaactacagcctgatataccggaacccggaggagaacggggtgaaggcggcctgcgacgagctcggcgtcactctgatcgcgtactccccgatcgcccaaggtgctctgacgggaaagtacacgccggagagtcctcctaaaggccctcgaggacggatatacacgccggagttcctgacgaagctccagccacttatcaaccggatcaaggagatcggaggaagctacgggaggacttcaacccagggcaacgtggtgccgatcccgggcgccaagaacgccgagcaggcgcgggagttcgctggcgctctcgggtggagcctggcgcccgacgaggtggaggagctccggtccatggcgcgccaggtcaagcccgtcatcggcttcccagtggagaagctgtgaccacccccatggcactggtatatatcaggtgtatagtaggactgtaggttgcatgtacac

SEQ ID NO: 23656 - DNA, 621 bp, Zea Mays
attaattaacacacaaactacctggacggccttggagacgctgtggagcaagggcttgtgaaggcagtcggggtctcaaactacagcgagaaacgtctccgagacgcgtacgagcgcctcaggaagaggggggtcccgctcgcctccaaccaggtgaactacagcctgatataccggaacccggaggagaacggggtgaaggcggcctgcgacgagctcggcgtcactctgatcgcgtactccccgatcgcccaaggtgctctgacgggaaagtacacgccggagagtcctcctaaaggccctcgaggacggatatacacgccggagttcctgacgaagctccagccacttatcaaccggatcaaggagatcggaggaagctacgggaggacttcaacccagggcaacgtggtgccgatcccgggcgccaagaacgccgagcaggcgcgggagttcgctggcgctctcgggtggagcctggcgcccgacgaggtggaggagctccggtccatggcgcgccaggtcaagcccgtcatcggcttcccagtggagaagctgtgaccacccccatggcactggtatatatcaggtgtatagtaggactgtaggttgcatgtacac

SEQ ID NO: 23657 - DNA, 1207 bp, Zea Mays
aatctgtccgcagaagccaaagatttgttgggtgatgactggattcaaaggcaccgaaggattgtacaacaaaatgccaatcagtatagaaggattgcttgggcgaaggtgttgcaatgcctctctggtcaaggtttgacttcatcaggtggtagtggtcatgtaggaagtgatggtggcaatagcagtggagcttcaagaacagctgtgaaggagagattcaggtctttcaatgtgttgttcgaagagatctaccacaagcaatgtggctggtccgttccagacactgagctgcgcgagtcactaagactcgcggtcgctgaaatcctgttgcctgcctaccgatcattcataaaacgttttgggcctctcattgagaatagcaaagcacctgggaaatacgtgaagcacactcccgagcaactcgagctgctgctaggcaatttattcgaggggaaacaagaacgtgcttgatagtttggtaccgcccgcagcaaggatgtgctgctcttctatgtaaaatacaaaataataaaaataaaaaagatctggaggccctgttagcgttagcattgcttgtgttctccccaatccttgtttagccgcattattatttgtacagaagaatatatgtgtcagctgtgccttgtgttgatctgatagcaggcgtgttcctggtttctttaatgactggcgttggtcattcgttcgggtggagcactaagatggcgacccatctgtagtttttgagatagaaaaatacttccccctcgtcgttatttattttcggatggtgtacgcgagaggatgtgtgcctatctcttatctgtatggtatagctgccaaacaaagcaaaaagcaaagtgaagaattgaaggccatgctgatacacaagaagttaaaacctcctgcgagagtcggtgcagacgcgtccgtggccgccatagacgacgccgtgcagccgccagccggccgagctgaggtcccggcctgcaaggcagcagcatgtcacaaccgtggtgccggatggtgaataggaaaggggtggcatgtgtgccaacaggatgtatccatgtatcgtgatggtgggtgccatgtgggcttgtattataaggagtgcggtcactagttaaaccctgagagttgtggataaagacatcaagaaataaaaggaaaagaaatatctgagcgctctgctcaacttggc

SEQ ID NO: 23658 - DNA, 1723 bp, Zea Mays
ttgtacagaatctggagaattgtagagtatcaagttaattttgttctgtttaagatatgtaagaaagtacataaatgtactttagattggtgaatattttgtttatagaaggacttaaagcttcattttgttgttgattttttagattgataccattttcgttggagaatcaggttcgcaaatgcgcgactctgcactgagtttaacaaaatgcttagcacaaacagcacaaaagactttcagtgattttgaagaagctgttgaaaaggatgcaacaaagaatattcatactgatggaacagttcatcctttaacaagctatgtgatcaactatgttaagtttttgtttgactaccagtcaactctaaagcagcttttccaggagttcaaggaagatgggacaggttctgagctggcagctgtaacaatgaaaatcatgcaagccttacaaaataatttagaagcaaaagcaaaacaatacaaggatcctgcattgatgcacatatttttgatgaataacattcactatattgtcaaatctgtccgcagatcagaagccaaagatttgttgggtgatgactggattcaaaggcaccgaaggattgtacaacaaaatgccaatcagtatagaaggattgcttgggcgaaggtttgacttcatcaggtggtagtggtcatgtaggaagtgatggtggcaatagcagtggagcttcaagaacagctgtgaaggagagattcaggtctttcaatgtgttgttcgaagagatctaccacaagcaatgtggctggtccgttccagacactgagctgcgcgagtcactaagactcgcggtcgctgaaatcctgttgcctgcctaccgatcattcataaaacgttttgggcctctcattgagaatagcaaagcacctgggaaatacgtgaagcacactcccgagcaactcgagctgctgctaggcaatttattcgaggggaaacaagaacgtgcttgatagtttggtaccgcccgcagcaaggatgtgctgctcttctatgtaaaatacaaaataataaaaataaaaaagatctggaggccctgttagcgttagcattgcttgtgttctccccaatccttgtttagccgcattattatttgtacagaagaatatatgtgtcagctgtgccttgtgttgatctgatagcaggcgtgttcctggtttctttaatgactggcgttggtcattcgttcgggtggagcactaagatggcgacccatctgtagtttttgagatagaaaaatacttccccctcgtcgttatttattttcggatggtgtacgcgagaggatgtgtgcctatctcttatctgtatggtatagctgccaaacaaagcaaaaagcaaagtgaagaattgaaggccatgctgatacacaagaagttaaaacctcctgcgagagtcggtgcagacgcgtccgtggccgccatagacgacgccgtgcagccgccagccggccgagctgaggtcccggcctgcaaggcagcagcatgtcacaaccgtggtgccggatggtgaataggaaaggggtggcatgtgtgccaacaggatgtatccatgtatcgtgatggtgggtgccatgtgggcttgtattataaggagtgcggtcactagttaaaccctgagagttgtggataaagacatcaagaaataaaaggaaaagaaatatctgagcgctctgctcaacttggc

SEQ ID NO: 23659 - DNA, 1848 bp, Zea Mays
gctaaagtttagtttcaattaccaccattagctctcttgtttagattacaaatggctaaaagtagctaaaaaaagctgctaaagtttatctcacgagattggaacatggccttagtgtttagacagctgggcccacgctgcaggttgaggttcccttcactgccttggttgccaaggaaagatgaccgggccggttccctccgcttctgtctctcgtctctccctcggcctcatgcgaattaccactagatatacgccggtcgcccaatccaaccgcctttaactcccctcatctctatctataaaacacccccgccctgccccttcctggctccacccctcctgtatcctcccaattcacgacaacccaaacaaacaacccccctacacacacacacggaggcccggtccgggtggccgtttcgattcgatgcttgtggccgcccatcagcgaacgagtcgcagccggatcccgactcacccgagggcgctcggccgcctctgaagccggaaggagcgcgcgcgtcggacatgggggagctcgcggcggcttcctcgcccccgccgcccgccgtgctgcaggtggtcttcgtcgacggcgagcagagcgtggacctgggcacggtcgccgtgcagccgtcgctgagcggtgtgaagcggctgcaggccgtggtggcggaccgcgtgggcgtcgcgccgtaccagatctcggcgtccctggcgcggccccgccgcgcgcgccgcgtgcccctcgacgacgccaccgacctcgccgccgccgtcgcgcgggagggcagcgggtgctacgtcgtcgctgggctccgccgctcccgccgcgagcgacggggcggccggtcccgtcgcgacaggaagggagccaaggacgcgggcgcgccagcggagaagaccatcctgaagcgcctcccgccaacggatctggcgtccctggtcggcactccccctccgccgcttcccttcccccacgccgttgcggcggcggcggccatgcgccagccggcgttccactggtgcgtgcacgacgcggtggtctccgctgtgttccgctcccacgtgggtcccatcgagcgccctccgaagaagaccccctctccgcctccgcttctgcctctgccgccgagccctggtcgcctcctcggcatgcccgtctacgagttcatcgaccagcacctgctcttccgtcgtcgtcgcctgccccactctagcagcaactgtacgtagacaaaaacaagcgggactgctggagtggatgggattggggatgaattgtggatggacggaggttgcgtgtgggagttggtttgcgcagcgcgaggaggtagaggattttcgtttcgatagtagctagtcaccgcagcagtcgtttctcctccttggtgtgcaaggaagccatgacgtggtacctggacggacacgcttgctcgctcttgtctcggtccggcacgcggcagggcttcttcgcctggttcaccgtggcactgtagcagtagaaaaccaaatttccccccttcctttttttcctttttctttcctgtggcctgtgggttgtggtgcactggtgcgtgcctgaacaatgtggcatgggcgagtccatggcttgattcgtttcggccatatttgtggactcctcttttgtttttccttttttctgagagaagagagagagatttgtttctgttatatcgaagtggtatatgcagaaggcttctattgtagccttgtgagtgtaactgttcgtctcgtgtagggatggcaacgggtacatacccgtcgggtattaccattccatacccgtacccatcaaaaaaaattctacccatcgggttaccc

SEQ ID NO: 23660 - DNA, 3352 bp, Zea Mays
tcgtgctgctgctagcctagcctagcctgctactcgaacttctcgtctcgtctcctcctcgctcaggcaggggaacccaacggaactcctcctccccagcagacagccgagagtacataggagacgagaagatcccatccactaccgcccggtcgcggtcctccgccctccgccctccccgccgctcgttcggtgcaggtcgccctcgcgtggatcggaatgggcgcctgcgtgtccaaggccgcctgctgctgccgccagccgcacaacggggttaccaacgagaggactgatactgtgacggaggacgaggaggcatacgacctgcctgcgttccaggagttcaccttcgagcagttgcggctagctacatcggggtttgcggtggagaacatcgtgtccgagcaaggtgagaaggcgcccaatgtggtatacaaggggaagctcgatgcccagcgccgcattgctgtcaagcgctttaaccgctctgcctggcccgacccgcgccagttcctggaagaagctagatcagttggcctgctccgaagcaaaaggttggcaaatttgcttggttgttgctgtgaaggcgatgagagattgcttgttgcagaatacatgcccaatgatacgctagcgaagcaccttttccattgggagtcacaatcaatgaaatggaccatgagattaagggttgttctctgtctcgctgaggctttagaatattgcactaacaggggccgtgctctctaccatgatctcaatgcctatagagctctgtttgatgatgactgtaaccctagactttcctgtttcggtctcatgaagaacagccgggatggaaaaagttacagtaccaatttggcatttacgcctccagaatacatgaggactggacgtattactcctgaaagtgtcatatacagctttggaaccttgctgattgatgttcttagtgggaagcatattcctccgagccatgcccttgacctgattcgggaccgaaacttcaatatgctcttagactcatgtttagagggtcaattttcaaatgaggaaggaacagaaatggtccgattagcttcaagatgccttcactatgaaccccgtgagcgacctaatgtcagatcacttgtgcaagtattgactcctctacagagggatgtcgagaggccgagaagacctctgaacctctgtcccaccctgacacaggggcactgttgccctactccatcttatgtgctcatgggcattccgcgtggtggggcatcttctaccgaaccactgaatctttcccctcttgccgaagcttgttccagaaaggatctgacagcaatacatgaaattctagaaaagacaggctacaaggatgatgagggaactgcaaatgagctctcttttcagatgtggacgaatcagatgcaagatacgttgaactcaaaaaagaagggtgacaatgcttttcgacagaaggattttactgctgccattgattgctattcccagtttattgaagttggtacaatggtttccccaaccatttatgctcgacgttgcctgtcatatctgatgaatggcatgccacaggaggcattgaatgatgcaatgaatgctttggtaatatctcccacatggtcaacagcattctatcttcaggcagcagcactattatcacaaggcatggagaatgaagcacaagaagcactcaaggatggttgtaacttagagcaaagtagcagcggtggacattgattgtgaacatatttgtagtccccaaaatgcacataatgtcaggtgcttgtttgaagagagagtaatattggctttggctatggaagcagcaggcgttggtaatttgtcaatttggctaggggtttgttaaccttattcagattttgtgcttgtggaacgtcgtccctcgtccatatcttcatgtaggaatgtacatatggaagaaagcgacaacagaggctctgaaagagaggacaaagacatccaagaggttcttcatggtggccaacgcgatcgcggcggggtacctggtgctgtccctccccttctccgccgtcgtcgtcctccgcccccaggccatcggcttgcgccacctcctgctcatctgcgacctgatcatagcggcgctgctgacggccgcggcggcggcggcggcggcgatcgtggacctggcgcactcggggaaccagcgcgctaactgggtgcccatctgcatgcagttccacggcttctgccagcgcaccagcggcgccgtcgtggcatccttcctcgccgtgctcgtcctcctgtttctcgtcatcttggccgccttcaccatcaggaaacgctgctgaactggatagtatgtgatgttgctgtttttgcgtcgtgcaattaataatgcaatgtggtttcagtttgtggtcactcgtgtgtaattgtaaagcgtggagtggaattgcctttgtattattcgtggacacctgcttgcggaattttaaattgggcttaacttctcggcctggtttcatgtccattaagcgctgcgggccaaacagggccttgggcctaagatagtgatgtctacccaccactaccgtcaccgattgaccggctttctctgcagaatgtatccgttggcttcgatctccgagatttgaaaaccgcttgacccgccgcactccagcgtcggaaatgtccggtgcgacgccgtcatggtttctccccgtgcagaagacgcccagcagtggcgatagcaatagtccattctcgcttactgtcaagagggcatcacagtcctctgccagatttcgagctttatgtacccaacagggactgggcagcagctaccgatatgattcgacactaatttctggtgggtcatggcctgaatgtgtcagcaatggcacacgatcagggttgacaaggataggcaatcctcctctgaagatgatgcatccagtgcttgaatgtcttgagattatgagtttgtccccaaggcccggggacgatgactatgatggaaatggcatgtctgcgccattgcctgagcttagcttctagtttgcaggacctccgatgcctttggaatccatagattttgacctcttttaagatgtctcctcgtgacatagaattgaaggcaaaggagacaagtttccaaaaatcggtcattgcagacactcggatctcttggtgagaggggctcgtcagcagaatgtttgatatcgatgatttggattgctgcaaatggctatctgatgacaaagattcgccagtgctttcgctcattgaagaggctttgacagatgataccaattctcagccaggtcattgttcttatctgcgtgagggtggtgaccaa

SEQ ID NO: 23661 - DNA, 3823 bp, Zea Mays
tcgtgctgctgctagcctagcctagcctgctactcgaacttctcgtctcgtctcctcctcgctcaggcaggggaacccaacggaactcctcctccccagcagacagccgagagtacataggagacgagaagatcccatccactaccgcccggtcgcggtcctccgccctccgccctccccgccgctcgttcggtgcaggtcgccctcgcgtggatcggaatgggcgcctgcgtgtccaaggccgcctgctgctgccgccagccgcacaacggggttaccaacgagaggactgatactgtgacggaggacgaggaggcatacgacctgcctgcgttccaggagttcaccttcgagcagttgcggctagctacatcggggtttgcggtggagaacatcgtgtccgagcaaggtgagaaggcgcccaatgtggtatacaaggggaagctcgatgcccagcgccgcattgctgtcaagcgctttaaccgctctgcctggcccgacccgcgccagttcctggaagaagctagatcagttggcctgctccgaagcaaaaggttggcaaatttgcttggttgttgctgtgaaggcgatgagagattgcttgttgcagaatacatgcccaatgatacgctagcgaagcaccttttccattgggagtcacaatcaatgaaatggaccatgagattaagggttgttctctgtctcgctgaggctttagaatattgcactaacaggggccgtgctctctaccatgatctcaatgcctatagagctctgtttgatgatgactgtaaccctagactttcctgtttcggtctcatgaagaacagccgggatggaaaaagttacagtaccaatttggcatttacgcctccagaatacatgaggactggacgtattactcctgaaagtgtcatatacagctttggaaccttgctgattgatgttcttagtgggaagcatattcctccgagccatgcccttgacctgattcgggaccgaaacttcaatatgctcttagactcatgtttagagggtcaattttcaaatgaggaaggaacagaaatggtccgattagcttcaagatgccttcactatgaaccccgtgagcgacctaatgtcagatcacttgtgcaagtattgactcctctacagagggatgtcgagactccatcttatgtgctcatgggcattccgcgtggtggggcatcttctaccgaaccactgaatctttcccctcttgccgaagcttgttccagaaaggatctgacagcaatacatgaaattctagaaaagacaggctacaaggatgatgagggaactgcaaatgagctctcttttcagatgtggacgaatcagatgcaagatacgttgaactcaaaaaagaagggtgacaatgcttttcgacagaaggattttactgctgccattgattgctattcccagtttattgaagttggtacaatggtttccccaaccatttatgctcgacgttgcctgtcatatctgatgaatggcatgccacaggaggcattgaatgatgcaatgaatgctttggtaatatctcccacatggtcaacagcattctatcttcaggcagcagcactattatcacaaggcatggagaatgaagcacaagaagcactcaaggatggttgtaacttagagcaaagtagcagcggtggacattgattgtgaacatatttgtagtccccaaaatgcacataatgtcaggtgcttgtttgaagagagagtaatattggctttggctatggaagcagcaggcgttggtaatttgtcaatttggctaggggtttgttaaccttattcagattttgtgcttgtggaacgtcgtccctcgtccatatcttcatgtaggaatgtacatatggaagaaagcgacaacagaggctctgaaagagaggacaaagacatccaagaggcagccaaatagacatttggacgaaatcaatgtattggcatgtaaatgggataatggtttacaggtacaccctaatctgactgacggaccctataaatgtcctcttccttctctcaaacgcaagcgcaaggcaggcaagctcctctctcaagtctcggcacctccaactacgcagcaaccaaccatgagcaccagcgatgccgccgcgaccgtgatccccatcgacgacgtgccccgccagcacggcaaggccccggccgtggacacggtcacggcggcgcctcctcctctcgctgcagcagcaccccccgctgcgacgacggcgcctcggaagacgcgggtcccgttcttccggcgcgccgaccgcggcagccggtgcgtggcgctccttgacttggtgctgagggtggcggccttcgggcccgccctcgccgccgccatcgccacgggcacctccgacgagacgctctccgtcttcacccagttcttccagttccacgcccgattcgacgacttcccggcgctcctgttcttcatggtggccaacgcgatcgcggcggggtacctggtgctgtccctccccttctccgccgtcgtcgtcctccgcccccaggccatcggcttgcgccacctcctgctcatctgcgacctgatcatagcggcgctgctgacggccgcggcggcggcggcggcggcgatcgtggacctggcgcactcggggaaccagcgcgctaactgggtgcccatctgcatgcagttccacggcttctgccagcgcaccagcggcgccgtcgtggcatccttcctcgccgtgctcgtcctcctgtttctcgtcatcttggccgccttcaccatcaggaaacgctgctgaactggatagtatgtgatgttgctgtttttgcgtcgtgcaattaataatgcaatgtggtttcagtttgtggtcactcgtgtgtaattgtaaagcgtggagtggaattgcctttgtattattcgtggacacctgcttgcggaattttaaattgggcttaacttctcggcctggtttcatgtccattaagcgctgcgggccaaacagggccttgggcctaagatagtgatgtctacccaccactaccgtcaccgattgaccggctttctctgcagaatgtatccgttggcttcgatctccgagatttgaaaaccgcttgacccgccgcactccagcgtcggaaatgtccggtgcgacgccgtcatggtttctccccgtgcagaagacgcccagcagtggcgatagcaatagtccattctcgcttactgtcaagagggcatcacagtcctctgccagatttcgagctttatgtacccaacagggactgggcagcagctaccgatatgattcgacactaatttctggtgggtcatggcctgaatgtgtcagcaatggcacacgatcagggttgacaaggataggcaatcctcctctgaagatgatgcatccagtgcttgaatgtcttgagattatgagtttgtccccaaggcccggggacgatgactatgatggaaatggcatgtctgcgccattgcctgagcttagcttctagtttgcaggacctccgatgcctttggaatccatagattttgacctcttttaagatgtctcctcgtgacatagaattgaaggcaaaggagacaagtttccaaaaatcggtcattgcagacactcggatctcttggtgagaggggctcgtcagcagaatgtttgatatcgatgatttggattgctgcaaatggctatctgatgacaaagattcgccagtgctttcgctcattgaagaggctttgacagatgataccaattctcagccaggtcattgttcttatctgcgtgagggtggtgaccaa

SEQ ID NO: 23662 - DNA, 2178 bp, Zea Mays
tcgtgctgctgctagcctagcctagcctgctactcgaacttctcgtctcgtctcctcctcgctcaggcaggggaacccaacggaactcctcctccccagcagacagccgagagtacataggagacgagaagatcccatccactaccgcccggtcgcggtcctccgccctccgccctccccgccgctcgttcggtgcagggtgctgctccgcttgctccgtcccgtgcaggtcgccctcgcgtggatcggaatgggcgcctgcgtgtccaaggccgcctgctgctgccgccagccgcacaacggggttaccaacgagaggactgatactgtgacggaggacgaggaggcatacgacctgcctgcgttccaggagttcaccttcgagcagttgcggctagctacatcggggtttgcggtggagaacatcgtgtccgagcaaggtgagaaggcgcccaatgtggtatacaaggggaagctcgatgcccagcgccgcattgctgtcaagcgctttaaccgctctgcctggcccgacccgcgccagttcctggaagaagctagatcagttggcctgctccgaagcaaaaggttggcaaatttgcttggttgttgctgtgaaggcgatgagagattgcttgttgcagaatacatgcccaatgatacgctagcgaagcaccttttccattgggagtcacaatcaatgaaatggaccatgagattaagggttgttctctgtctcgctgaggctttagaatattgcactaacaggggccgtgctctctaccatgatctcaatgcctatagagctctgtttgatgatgactgtaaccctagactttcctgtttcggtctcatgaagaacagccgggatggaaaaagttacagtaccaatttggcatttacgcctccagaatacatgaggactggacgtattactcctgaaagtgtcatatacagctttggaaccttgctgattgatgttcttagtgggaagcatattcctccgagccatgcccttgacctgattcgggaccgaaacttcaatatgctcttagactcatgtttagagggtcaattttcaaatgaggaaggaacagaaatggtccgattagcttcaagatgccttcactatgaaccccgtgagcgacctaatgtcagatcacttgtgcaagtattgactcctctacagagggatgtcgagactccatcttatgtgctcatgggcattccgcgtggtggggcatcttctaccgaaccactgaatctttcccctcttgccgaagcttgttccagaaaggatctgacagcaatacatgaaattctagaaaagacaggctacaaggatgatgagggaactgcaaatgagctctcttttcagatgtggacgaatcagatgcaagatacgttgaactcaaaaaagaagggtgacaatgcttttcgacagaaggattttactgctgccattgattgctattcccagtttattgaagttggtacaatggtttccccaaccatttatgctcgacgttgcctgtcatatctgatgaatggcatgccacaggaggcattgaatgatgcaatgaatgctttggtaatatctcccacatggtcaacagcattctatcttcaggcagcagcactattatcacaaggcatggagaatgaagcacaagaagcactcaaggatggttgtaacttagagcaaagtagcagcggtggacattgattgtgaacatatttgtagtccccaaaatgcacataatgtcaggtgcttgtttgaagagagagtaatattggctttggctatggaagcagcaggcgttggtaatttgtcaatttggctaggggtttgttaaccttattcagattttgtgcttgtggaacgtcgtccctcgtccatatcttcatgtaggaatgtacatatggaagaaagcgacaacagaggctctgaaagagaggacaaagacatccaagaggtgacctgtacagcaagcggttgtttttacgctgtcttaattcttcgtttcttatgcgttagctcccattggtatatttctggatatgatagtggaattcttttaaaaggccaaaaatgtcagcgttctggttgttcgagagttcaacgctttcaccccttgccccagtttttttattggagtacattcatatgctagttaactg

SEQ ID NO: 23663 - DNA, 2338 bp, Zea Mays
tcgtgctgctgctagcctagcctagcctgctactcgaacttctcgtctcgtctcctcctcgctcaggcaggggaacccaacggaactcctcctccccagcagacagccgagagtacataggagacgagaagatcccatccactaccgcccggtcgcggtcctccgccctccgccctccccgccgctcgttcggtgcaggtcgccctcgcgtggatcggaatgggcgcctgcgtgtccaaggccgcctgctgctgccgccagccgcacaacggggttaccaacgagaggactgatactgtgacggaggacgaggaggcatacgacctgcctgcgttccaggagttcaccttcgagcagttgcggctagctacatcggggtttgcggtggagaacatcgtgtccgagcaaggtgagaaggcgcccaatgtggtatacaaggggaagctcgatgcccagcgccgcattgctgtcaagcgctttaaccgctctgcctggcccgacccgcgccagttcctggaagaagctagatcagttggcctgctccgaagcaaaaggttggcaaatttgcttggttgttgctgtgaaggcgatgagagattgcttgttgcagaatacatgcccaatgatacgctagcgaagcaccttttccattgggagtcacaatcaatgaaatggaccatgagattaagggttgttctctgtctcgctgaggctttagaatattgcactaacaggggccgtgctctctaccatgatctcaatgcctatagagctctgtttgatgatgactgtaaccctagactttcctgtttcggtctcatgaagaacagccgggatggaaaaagttacagtaccaatttggcatttacgcctccagaatacatgaggactggacgtattactcctgaaagtgtcatatacagctttggaaccttgctgattgatgttcttagtgggaagcatattcctccgagccatgcccttgacctgattcgggaccgaaacttcaatatgctcttagactcatgtttagagggtcaattttcaaatgaggaaggaacagaaatggtccgattagcttcaagatgccttcactatgaaccccgtgagcgacctaatgtcagatcacttgtgcaagtattgactcctctacagagggatgtcgagaggccgagaagacctctgaacctctgtcccaccctgacacaggggcactgttgccctactccatcttatgtgctcatgggcattccgcgtggtggggcatcttctaccgaaccactgaatctttcccctcttgccgaagcttgttccagaaaggatctgacagcaatacatgaaattctagaaaagacaggctacaaggatgatgagggaactgcaaatgagctctcttttcagatgtggacgaatcagatgcaagatacgttgaactcaaaaaagaagggtgacaatgcttttcgacagaaggattttactgctgccattgattgctattcccagtttattgaagttggtacaatggtttccccaaccatttatgctcgacgttgcctgtcatatctgatgaatggcatgccacaggaggcattgaatgatgcaatgaatgctttggtaatatctcccacatggtcaacagcattctatcttcaggcagcagcactattatcacaaggcatggagaatgaagcacaagaagcactcaaggatggttgtaacttagagcaaagtagcagcggtggacattgattgtgaacatatttgtagtccccaaaatgcacataatgtcaggtgcttgtttgaagagagagtaatattggctttggctatggaagcagcaggcgttggtaatttgtcaatttggctaggggtttgttaaccttattcagattttgtgcttgtggaacgtcgtccctcgtccatatcttcatgtaggaatgtacatatggaagaaagcgacaacagaggctctgaaagagaggacaaagacatccaagaggtgaataaggaaattattaatggggagaagaaagtgaaacttttttcttggtcctactgaaacaagagaaggaaaacataagaagaagaaaaaaaaagattgctgatgtacatgtctgtctttgctggtggcaggtgacctgtacagcaagcggttgtttttacgctgtcttaattcttcgtttcttatgcgttagctcccattggtatatttctggatatgatagtggaattcttttaaaaggccaaaaatgtcagcgttctggttgttcgagagttcaacgctttcaccccttgccccagtttttttattggagtacattcatatgctagttaactg

SEQ ID NO: 23664 - DNA, 1917 bp, Zea Mays
cttgatttgacgcgattaaactggtaatccttcactgctcccgattacaggcatgtcggtacaaataaaccaggaaatattcccgtcgaaataaaaccaccactaggaaatactcctactcctcgtgctgctgctagcctagcctagcctgctactcgaacttctcgtctcgtctcctcctcgctcaggcaggggaacccaacggaactcctcctccccagcagacagccgagagtacataggagacgagaagatcccatccactaccgcccggtcgcggtcctccgccctccgccctccccgccgctcgttcggtgcagggtgctgctccgcttgctccgtcccgtgcaggtcgccctcgcgtggatcggaatgggcgcctgcgtgtccaaggccgcctgctgctgccgccagccgcacaacggggttaccaacgagaggactgatactgtgacggaggacgaggaggcatacgacctgcctgcgttccaggagttcaccttcgagcagttgcggctagctacatcggggtttgcggtggagaacatcgtgtccgagcaaggtgagaaggcgcccaatgtggtatacaaggggaagctcgatgcccagcgccgcattgctgtcaagcgctttaaccgctctgcctggcccgacccgcgccagttcctggaagaagctagatcagttggcctgctccgaagcaaaaggttggcaaatttgcttggttgttgctgtgaaggcgatgagagattgcttgttgcagaatacatgcccaatgatacgctagcgaagcaccttttccattgggagtcacaatcaatgaaatggaccatgagattaagggttgttctctgtctcgctgaggctttagaatattgcactaacaggggccgtgctctctaccatgatctcaatgcctatagagctctgtttgatgatgactgtaaccctagactttcctgtttcggtctcatgaagaacagccgggatggaaaaagttacagtaccaatttggcatttacgcctccagaatacatgaggactggacgtattactcctgaaagtgtcatatacagctttggaaccttgctgattgatgttcttagtgggaagcatattcctccgagccatgcccttgacctgattcgggaccgaaacttcaatatgctcttagactcatgtttagagggtcaattttcaaatgaggaaggaacagaaatggtccgattagcttcaagatgccttcactatgaaccccgtgagcgacctaatgtcagatcacttgtgcaagtattgactcctctacagagggatgtcgagactccatcttatgtgctcatgggcattccgcgtggtggggcatcttctaccgaaccactgaatctttcccctcttgccgaagcttgttccagaaaggatctgacagcaatacatgaaattctagaaaagacaggctacaaggatgatgagggaactgcaaatgagctctcttttcagatgtggacgaatcagatgcaagatacgttgaactcaaaaaagaagggtgacaatgcttttcgacagaaggattttactgctgccattgattgctattcccagtttattgaagttggtacaatggtttccccaaccatttatgctcgacgttgcctgtcatatctgatgaatggcatgccacaggaggcattgaatgatgcaatgaatgctttggtaatatctcccacatggtcaacagcattctatcttcaggcagcagcactattatcacaaggcatggagaatgaagcacaagaagcactcaaggatggttgtaacttagagcaaagtagcagcggtggacattgattgtgaacatatttgtagtccccaaaatgcacataatgtcagatcatgtagacatcactattttgttttgtg

SEQ ID NO: 23665 - DNA, 1801 bp, Zea Mays
aaatactcctactcctcgtgctgctgctagcctagcctagcctgctactcgaacttctcgtctcgtctcctcctcgctcaggcaggggaacccaacggaactcctcctccccagcagacagccgagagtacataggagacgagaagatcccatccactaccgcccggtcgcggtcctccgccctccgccctccccgccgctcgttcggtgcagggtgctgctccgcttgctccgtcccgtgcaggtcgccctcgcgtggatcggaatgggcgcctgcgtgtccaaggccgcctgctgctgccgccagccgcacaacggggttaccaacgagaggactgatactgtgacggaggacgaggaggcatacgacctgcctgcgttccaggagttcaccttcgagcagttgcggctagctacatcggggtttgcggtggagaacatcgtgtccgagcaaggtgagaaggcgcccaatgtggtatacaaggggaagctcgatgcccagcgccgcattgctgtcaagcgctttaaccgctctgcctggcccgacccgcgccagttcctggaagaagctagatcagttggcctgctccgaagcaaaaggttggcaaatttgcttggttgttgctgtgaaggcgatgagagattgcttgttgcagaatacatgcccaatgatacgctagcgaagcaccttttccattgggagtcacaatcaatgaaatggaccatgagattaagggttgttctctgtctcgctgaggctttagaatattgcactaacaggggccgtgctctctaccatgatctcaatgcctatagagctctgtttgatgatgactgtaaccctagactttcctgtttcggtctcatgaagaacagccgggatggaaaaagttacagtaccaatttggcatttacgcctccagaatacatgaggactggacgtattactcctgaaagtgtcatatacagctttggaaccttgctgattgatgttcttagtgggaagcatattcctccgagccatgcccttgacctgattcgggaccgaaacttcaatatgctcttagactcatgtttagagggtcaattttcaaatgaggaaggaacagaaatggtccgattagcttcaagatgccttcactatgaaccccgtgagcgacctaatgtcagatcacttgtgcaagtattgactcctctacagagggatgtcgagactccatcttatgtgctcatgggcattccgcgtggtggggcatcttctaccgaaccactgaatctttcccctcttgccgaagcttgttccagaaaggatctgacagcaatacatgaaattctagaaaagacaggctacaaggatgatgagggaactgcaaatgagatgtggacgaatcagatgcaagatacgttgaactcaaaaaagaagggtgacaatgcttttcgacagaaggattttactgctgccattgattgctattcccagtttattgaagttggtacaatggtttccccaaccatttatgctcgacgttgcctgtcatatctgatgaatggcatgccacaggaggcattgaatgatgcaatgaatgctttggtaatatctcccacatggtcaacagcattctatcttcaggcagcagcactattatcacaaggcatggagaatgaagcacaagaagcactcaaggatggttgtaacttagagcaaagtagcagcggtggacattgattgtgaacatatttgtagtccccaaaatgcacataatgtcagagaaagtatttaacaacatgggatcaaatggag

SEQ ID NO: 23666 - DNA, 4467 bp, Zea Mays
cgaccctgttggcggcggccatatatgttgacgcttcaagagagagagagagagagagacttctgcggactgccgcgcatacccggtcgtcttacgacctgccagctgcactatgccacgtgggcccctgccccactcgtggtcgtgggcgggttgcttcgttccactgttcttccgtgctgcgatgctgcctaccacacaagctctgctcccttccccccgggtattttcatgtcatgtcttccttcacttccaacctccatagatccagttcagagcgtgagcatggcagacacagaagcctccggtactgtcgtccatccttcccgttcccgccgtcgacgctcctccatcttacacggtatggtattgcatcgctagccattgagatagtagcctaccttgccgtcgcctgcctgtacatctgcaactcggttcggcaggagaagctcatctccgctggctttcttctacttctcctgctcgtcttcctcctctcatctattggagttcgcacctccaggtttcgcatcgacttcgttttcggggccaatattgtggctgtatcctcctactgcgtctggaagtttaactatacttcttcgatgagcaaagtgagaagaaccatctcacatgttgcaatcgtaactatcctattatctgtggtcatatttgactatgtttgtcgtttctaccctataagctattatccagattcgtattctcttcctgattactacagagacggtgcaatacggctactcattcagttggtagcctacgccgccatcggctgcctatacatctgcaactcctccactaggaagatgaaagtcgtctctgctgcttttcttgtgcttgttctggctgtctcccttctctcctcgattaacaacgacaatgatcgtttcggatacatcttcgtggcaaatatcgtgactatatccttgtattgcatctggaagcattaccttgcgatactggtgacactggcttggctccaacgatggctttctgaagaagaagaagcagcagctgccgccatggccccaagcaaacgactggcacggggagaggatgaagaagcagggcttctcaaacccttggaccttgacctagtggaatccggcccacggcagttctcttacagtgagctcgccgccgccaccaagaacttctctgacgaccggagactcggcagcggaggctttggatccgtgtaccgcgggatcttgacaaccgacggcaggaaccgctgcgtggccgtcaagcgggtgtccaagaccgcgcggcaaggctggaaggagttcgtctccgaggtggtgatcatcagccggctgcggcaccgcaacctggtgcagctaatcggctggtgccagggcagcggcaacaagctcctcctcgtctacgagctgatgcccaacggcagcctcgacgaccacctccacaggccggacagcgtgctgatgtggccggtcaggtacggcatcgcgctcggcgtcggcgccgcgctgctgtacctgcacgacgacgccgagcagcgcgtggtgcaccgagacgtgaagcccagcaacgtgatgctggacgcgtcgttcaacgccaagctcggcgacttcggcctagcgcgcctcatcgacgacggccgccgctcgcacaccacgggcgtcgccggcacgttcgggtacatggacccggagtccatgctcgccgggaaggccagcgtcgagtcggacgtgtacagcttcggcgtcttcctcctagagatcacgtgtgggcgtcggccggcggtgctcgtgagagaggaggactacgtccacctggtgcagtgggtctgggactcgtacggtggcggaagcatcctcgacgcggccgacccgtggctcggcaacaacttcaacagccaggagatggcgtgcgcgatgctcgtcggcctctggtgcgcgcacccagaccgcagcctgcgtcccacgatccggcaggccgtcaatgtgctgcggttcgaggcgccgccgccgagactgcccgccaagatgccggttgcgacgtttgggccaccggcggctcatgcttccggctcaacaacgtcgtctgcagaagcactgatgacctggggcagtagcctgccaaccatggcaatggcagcgtcatcactcgacatcgagcattccagcacgaaaacatcttgatgtaatggcaagcaacacattgtggatttttatgtccgaattatttttatttttatgggccgggggatggttcatccagccatgtagcacagtatgagtgtgagccaagtcaagtcgacggggacagaacaggtcaatcagtgccatgatgtgcggcagcgacgactttgctcaacaagacaaggaccgggggggcggagctaacgtcgagttcggcaaggaaatacgtagacaatttctgtgaaatggagtggagttgccatgatgtttggttcgaataattcaatccattctttgaacgaaagtgaatgactaacggtaacaaattgactaaaactgtaacagaaattatagtgcaattactaaaactagaacggaatggcttaaactgtaatagaatggatgactaagaatataacggaatgccttaaactgtaataaaatgactaaaattgtaacataatgaatgtgagaaggtaacagaatgactaaaactgcaacggtaaggaaatgactccaattgtaacagaaaccataatggaatgaatgaaactgtaacgtaatgtctgaatgtgtgaacgagaacgatagagactataatagaatgactaaaatgcaacggtaacagagtgactaaaattataacggaaagtctgaatagcaattgagttgtagtctcaggatgacaggatggttgttgcatatctcacaacagtgtcaaacgcgtgatgaaaattcattgggaaaaaaaagactgcacgacaaaatcaagcaaggccgtaaaagattagtgttatatataatttaaggttcataccaatacacaacacatgttcaaataaagaaactatataaataaaagaagcaaacatatcatcaaattgccgttgatagatcaactcattcattccacgatcaaaaaagaaactgatgaatgcaccggtctagtggggttccgccgaccatgcgtcgctgattagtccggttggactgtaggtccagatgatacacgattggctcgagtatctctacatacatacagagagactagtgtgtgtaaggaatacgtaagtttggcatgtatttggaggaaaggagaaaggacacagaagtggtggagtccggttgttgtctaaaaggccctggcgaagctgtataaatagattagtgttatatagaatttaaggttcatgttcaaataaggaaagtatataaataaaaagaagcaaacatatcaccaaattccggggcaattgcatccttgtagttttgaggtgttgaaattgtctaaatcatcaatgaatttgaaaatctcatcatgaattggcgaacagtaatctcatcatcaatttgtcttcttaatgctgtcatctccaattcacaatcaaaactgaatattacaatgtaatgtaatgctaaacagagtattttaaaaatatatgtatctttcactctaaagtggtaaaaactagatactgctttgactagtgagcgacagtgtcgtctgaggaataagtgtattaatttggagaaagcagaaaggacagagagagttgatcgaaatacactgatgcgcgtgcaggtgcagttggggcggccgaccgctgcaggcatattcaatcctcttaaatgggtcctgtctggacctttaccctgatatatctacatgtaagtatttacacatacttaaccatgccaatgaatgaattaactacgaaaacgatgagcgaaaggaaagaatgaatcggcagctatttttattatatactatgtttgtacttgtctgcatcatcatgctcccatgagcaaattgattcctcatggcctggtgggtgtgtggtgcgcagaaacgatgtagccagtacgtacgtggagagcaagtaggcgaacttaacaaaaatcaaatccatggaagtagcttgcaagagcagatagagagagagatacctgatgagagatggaatccatggaagatggaggggcgtgtggcacgtgcggcgggggtgaaggcgcgagtggaaaattccaaagggattgcactgatcttgtcgtcgactcgcatcgcatgcagcaggcggcaggtgagaatagatcaatgcgatccctttggagtcctccaccagcttcctggacggcatggatggggggcagctggtagcgtgcgtagctagggtagggaagggggggcaggcagctgggaggaagggaaagcgaggacgtagccagagaagggtgggggtgggggtggttataacgccaaatcgccatggatagacagaag

SEQ ID NO: 23667 - DNA, 3555 bp, Zea Mays
ggattttagtccctcgcatagtcgcttgatgtggactgatacgtgtttaatgacacgatcgaacaatggagtacagtggactacgtcgtcagctgcaatacttcttgatccagatccaggcgtccttccaactcttccttctgcattcgtgtggagtggggattcttctggcctttcgagtgacttcttttctttagtattgtgagatacaacatcagctgatccaatggcgacatataagctgggtgtggaggtcgcaagtgctcatgacctgatgcccaaggatgggcaaggttctgcaagcgcttgtgttgagctcacctttgatgggcagcgcttccgaactgctgtcaaggagaaggacctgaaccctgtctggaatgagcgcttctacttcaatgtatcagatccttctaatcttcctgagctggcccttgaagcatatgtctacaatgtcaacaaaactcttgaaagttccaggtccttccttgggaaggtcaggattgctggcacctcatttgtgccctttcctgacgcggtggtcatgcattatccattagagaagcgtgggatgttttctcgcgtcaaaggagaactgggtatgaaagtatacatcaccaatgaccccgccatcaaagcttcaaaccctcttcctgcaatggatcctgtctccaataatcctcttccagccccaagtccagcagagcagattgcagctgatataactggtactaatctgcacacatctcaggagcataggtctgaggcaaagaccttacataccatcgctaaggaggtacatcatcatcataaccatggccatcttccagctacgtttggtgagcagccttccaagtactccattgaccagatgaaacctcaatctcaaccaccgaggattgtgagaatgtattcagcagcgtcccagcagcccatggactatgcacttaaagaaactagtccatttcttggtggtgggcaggttgttggtggccgggtcatacgtggcgaaaagaatgctagcacttatgaccttgtggagcgaatgcagtatctgtttgtacgtgtggttaaggcacgagacttgcccgacatggatgtcactggaggcctggatccttatgttgaagtgagagtaggcaactatagggggataacaaagcactttgaaaagcaaaagaacccagagtggaatgcagtctttgctttttccagggaccgtatgcaggcatctgtgcttgaagttgtggtcaaagacaaagatttgattaaggatgactttgttggctttgtgcgatttgatttgaatgatgtccctattcgtgtgcccccggacagccctctggctccagaatggtacaggcttgttagtaagagcggggataagtccatgggtgagctcatgcttgcagtttgggttggcacccaagctgatgaagcatttcctgatgcctggcattcagatgctgcaacacttgaagatccatctgcagtaacacacatgaagtccaaagtttaccatgctcccagattgtggtacctgcgagttaatataattgaggcccaagatgttgctatattagataagacccgctatccagatgtatttgtgagagcacaggtggggcatcaacttgggaggacaaaacctgtgcaggctagaaattttaaccctttctggaatgaagacattatgtttgtggctgctgaaccatttgaggatcaccttgttctgactcttgaggatcgtgtaggtcctaataaagatgaaatgcttggtcgtgtaatcatacctttggcaatgattgatagacgtgccgatgaccgcattgtccatgggaagtggttcaatctcgagaagcctgttcttgttgatgttgaccaactgaagaaggagaagttctctactcggcttcatctccgtctctgtcttgatggaggttaccatgttcttgacgagtctacaaactacagcagtgacctgagaccaactgccaagcaactctggaagccgtctattggtttgcttgaacttggtgtccttggtgctcaagggattgttcccatgaaaactcgagatggaaaaggttcatcagacacctattgtgttgctaagtatgggtcgaaatgggtaaggacacggaccatcatgaacaacccaaatcccagattcaatgaacagtacacttgggaagtctatgatcctgcaactgtgctgactgttggtgtttttgacaatggacaacttggagagaagactggggagaagacatctagtggcaaagatgggaagataggcaaggttcggatacgcctttccacactcgaaactggtcgtgtgtacacccactcgtatcctcttctggttctacattcgtcgggggtcaaaaagatgggcgaactgcacctggcaattcgattttcctcaacatctctggtaaacatgttgtacctgtattctaggcccttgcttccaaaaatgcactatgtgcgcccaatacctgtgcttcaggttgatatgctacgccatcaagctgtccagattgtggctgcccgacttagccggatggagccacctttgagaaaggaagttgttgaatacatgacagattttgattctcacttgtggagcatgaggaaaagcaaagccaacttcttcagactcatgacagttttctcaggcttgtttgcagttagcaagtggttcagcggtgtctgttcatggaggaaccccattaccactgtgctagtgcacattctctttataatgctggtgtgctttcctgagctcatacttccaacagtgttcctgtacatgttccttatagggatttggaacttccgctatcgacctcgttatcctccacacatgaataccaagatctctcatgcggaggctgttcatcctgatgaacttgacgaggagttcgatacattccctaccagccgcaaccctgaggttgtaaggatgaggtatgacagactcaggagtgttgctggaaggatacaaacagtggttggtgatatcgctacacaaggggagagggttcaagcattgcttagctggagggaccctcgtgccacagcagtctttgtcctgttctgtctggtagcagcaattgtcttctatgttacaccgcttcaagttattgctgcattaggagggttctatgtgatgaggcacccaaggttcagacataggttgccctcagtaccagtaaacttcttcagacggttgccagcaaggactgactctatgctataaataagccactacctggtggtcttatcgttgtaatccctagagatgctttctctgttactgtagtttgctcgccttcgttgctatttgtaactgtgtctgttcagaacttgagagcctgttaattgtatcagttgttgaattctgggaataattgcgagacatggttctgtgttgatcctttctaaaatatcaagctatcaatgtttagtagcttgcttttttggctgtctcctcgtctgcaatcacaaaatgcatgtagctatgtccgttcctctatagcagttactgat

SEQ ID NO: 23668 - DNA, 3542 bp, Zea Mays
ctgttttcttgtcgacgtcagctgtgggaagatctactctacctaacaccggttggagtacagtggactacgtcgtcagctgcaatacttcttgatccagatccaggcgtccttccaactcttccttctgcattcgtgtggagtggggattcttctggcctttcgagtgacttcttttctttagtattgtgagatacaacatcagctgatccaatggcgacatataagctgggtgtggaggtcgcaagtgctcatgacctgatgcccaaggatgggcaaggttctgcaagcgcttgtgttgagctcacctttgatgggcagcgcttccgaactgctgtcaaggagaaggacctgaaccctgtctggaatgagcgcttctacttcaatgtatcagatccttctaatcttcctgagctggcccttgaagcatatgtctacaatgtcaacaaaactcttgaaagttccaggtccttccttgggaaggtcaggattgctggcacctcatttgtgccctttcctgacgcggtggtcatgcattatccattagagaagcgtgggatgttttctcgcgtcaaaggagaactgggtatgaaagtatacatcaccaatgaccccgccatcaaagcttcaaaccctcttcctgcaatggatcctgtctccaataatcctcttccagccccaagtccagcagagcagattgcagctgatataactggtactaatctgcacacatctcaggagcataggtctgaggcaaagaccttacataccatcgctaaggaggtacatcatcatcataaccatggccatcttccagctacgtttggtgagcagccttccaagtactccattgaccagatgaaacctcaatctcaaccaccgaggattgtgagaatgtattcagcagcgtcccagcagcccatggactatgcacttaaagaaactagtccatttcttggtggtgggcaggttgttggtggccgggtcatacgtggcgaaaagaatgctagcacttatgaccttgtggagcgaatgcagtatctgtttgtacgtgtggttaaggcacgagacttgcccgacatggatgtcactggaggcctggatccttatgttgaagtgagagtaggcaactatagggggataacaaagcactttgaaaagcaaaagaacccagagtggaatgcagtctttgctttttccagggaccgtatgcaggcatctgtgcttgaagttgtggtcaaagacaaagatttgattaaggatgactttgttggctttgtgcgatttgatttgaatgatgtccctattcgtgtgcccccggacagccctctggctccagaatggtacaggcttgttagtaagagcggggataagtccatgggtgagctcatgcttgcagtttgggttggcacccaagctgatgaagcatttcctgatgcctggcattcagatgctgcaacacttgaagatccatctgcagtaacacacatgaagtccaaagtttaccatgctcccagattgtggtacctgcgagttaatataattgaggcccaagatgttgctatattagataagacccgctatccagatgtatttgtgagagcacaggtggggcatcaacttgggaggacaaaacctgtgcaggctagaaattttaaccctttctggaatgaagacattatgtttgtggctgctgaaccatttgaggatcaccttgttctgactcttgaggatcgtgtaggtcctaataaagatgaaatgcttggtcgtgtaatcatacctttggcaatgattgatagacgtgccgatgaccgcattgtccatgggaagtggttcaatctcgagaagcctgttcttgttgatgttgaccaactgaagaaggagaagttctctactcggcttcatctccgtctctgtcttgatggaggttaccatgttcttgacgagtctacaaactacagcagtgacctgagaccaactgccaagcaactctggaagccgtctattggtttgcttgaacttggtgtccttggtgctcaagggattgttcccatgaaaactcgagatggaaaaggttcatcagacacctattgtgttgctaagtatgggtcgaaatgggtaaggacacggaccatcatgaacaacccaaatcccagattcaatgaacagtacacttgggaagtctatgatcctgcaactgtgctgactgttggtgtttttgacaatggacaacttggagagaagactggggagaagacatctagtggcaaagatgggaagataggcaaggttcggatacgcctttccacactcgaaactggtcgtgtgtacacccactcgtatcctcttctggttctacattcgtcgggggtcaaaaagatgggcgaactgcacctggcaattcgattttcctcaacatctctggtaaacatgttgtacctgtattctaggcccttgcttccaaaaatgcactatgtgcgcccaatacctgtgcttcaggttgatatgctacgccatcaagctgtccagattgtggctgcccgacttagccggatggagccacctttgagaaaggaagttgttgaatacatgacagattttgattctcacttgtggagcatgaggaaaagcaaagccaacttcttcagactcatgacagttttctcaggcttgtttgcagttagcaagtggttcagcggtgtctgttcatggaggaaccccattaccactgtgctagtgcacattctctttataatgctggtgtgctttcctgagctcatacttccaacagtgttcctgtacatgttccttatagggatttggaacttccgctatcgacctcgttatcctccacacatgaataccaagatctctcatgcggaggctgttcatcctgatgaacttgacgaggagttcgatacattccctaccagccgcaaccctgaggttgtaaggatgaggtatgacagactcaggagtgttgctggaaggatacaaacagtggttggtgatatcgctacacaaggggagagggttcaagcattgcttagctggagggaccctcgtgccacagcagtctttgtcctgttctgtctggtagcagcaattgtcttctatgttacaccgcttcaagttattgctgcattaggagggttctatgtgatgaggcacccaaggttcagacataggttgccctcagtaccagtaaacttcttcagacggttgccagcaaggactgactctatgctataaataagccactacctggtggtcttatcgttgtaatccctagagatgctttctctgttactgtagtttgctcgccttcgttgctatttgtaactgtgtctgttcagaacttgagagcctgttaattgtatcagttgttgaattctgggaataattgcgagacatggttctgtgttgatcctttctaaaatatcaagctatcaatgtttagtagcttgcttttttggctgtctcctcgtctgcaatcacaaaatgcatgtagctatgtccgttcctctatagcagttactgat

SEQ ID NO: 23669 - DNA, 3715 bp, Zea Mays
acggaagcagcagcagccggcaggcacgcgcacgccgtcctcgtctacaactaggccccaggcaccccgctcctcctctccctcaaaaccccaccaaaaagcctcctctcccccctacactgtttccatcggcagacggctcccatggaggcggccgagtgaagcagccgcctgccagccagccatcgtctctgcgctgcttccgtggcccggatctgggagcgcggcgctgacagtggactacgtcgtcagctgcaatacttcttgatccagatccaggcgtccttccaactcttccttctgcattcgtgtggagtggggattcttctggcctttcgagtgacttcttttctttagtattgtgagatacaacatcagctgatccaatggcgacatataagctgggtgtggaggtcgcaagtgctcatgacctgatgcccaaggatgggcaaggttctgcaagcgcttgtgttgagctcacctttgatgggcagcgcttccgaactgctgtcaaggagaaggacctgaaccctgtctggaatgagcgcttctacttcaatgtatcagatccttctaatcttcctgagctggcccttgaagcatatgtctacaatgtcaacaaaactcttgaaagttccaggtccttccttgggaaggtcaggattgctggcacctcatttgtgccctttcctgacgcggtggtcatgcattatccattagagaagcgtgggatgttttctcgcgtcaaaggagaactgggtatgaaagtatacatcaccaatgaccccgccatcaaagcttcaaaccctcttcctgcaatggatcctgtctccaataatcctcttccagccccaagtccagcagagcagattgcagctgatataactggtactaatctgcacacatctcaggagcataggtctgaggcaaagaccttacataccatcgctaaggaggtacatcatcatcataaccatggccatcttccagctacgtttggtgagcagccttccaagtactccattgaccagatgaaacctcaatctcaaccaccgaggattgtgagaatgtattcagcagcgtcccagcagcccatggactatgcacttaaagaaactagtccatttcttggtggtgggcaggttgttggtggccgggtcatacgtggcgaaaagaatgctagcacttatgaccttgtggagcgaatgcagtatctgtttgtacgtgtggttaaggcacgagacttgcccgacatggatgtcactggaggcctggatccttatgttgaagtgagagtaggcaactatagggggataacaaagcactttgaaaagcaaaagaacccagagtggaatgcagtctttgctttttccagggaccgtatgcaggcatctgtgcttgaagttgtggtcaaagacaaagatttgattaaggatgactttgttggctttgtgcgatttgatttgaatgatgtccctattcgtgtgcccccggacagccctctggctccagaatggtacaggcttgttagtaagagcggggataagtccatgggtgagctcatgcttgcagtttgggttggcacccaagctgatgaagcatttcctgatgcctggcattcagatgctgcaacacttgaagatccatctgcagtaacacacatgaagtccaaagtttaccatgctcccagattgtggtacctgcgagttaatataattgaggcccaagatgttgctatattagataagacccgctatccagatgtatttgtgagagcacaggtggggcatcaacttgggaggacaaaacctgtgcaggctagaaattttaaccctttctggaatgaagacattatgtttgtggctgctgaaccatttgaggatcaccttgttctgactcttgaggatcgtgtaggtcctaataaagatgaaatgcttggtcgtgtaatcatacctttggcaatgattgatagacgtgccgatgaccgcattgtccatgggaagtggttcaatctcgagaagcctgttcttgttgatgttgaccaactgaagaaggagaagttctctactcggcttcatctccgtctctgtcttgatggaggttaccatgttcttgacgagtctacaaactacagcagtgacctgagaccaactgccaagcaactctggaagccgtctattggtttgcttgaacttggtgtccttggtgctcaagggattgttcccatgaaaactcgagatggaaaaggttcatcagacacctattgtgttgctaagtatgggtcgaaatgggtaaggacacggaccatcatgaacaacccaaatcccagattcaatgaacagtacacttgggaagtctatgatcctgcaactgtgctgactgttggtgtttttgacaatggacaacttggagagaagactggggagaagacatctagtggcaaagatgggaagataggcaaggttcggatacgcctttccacactcgaaactggtcgtgtgtacacccactcgtatcctcttctggttctacattcgtcgggggtcaaaaagatgggcgaactgcacctggcaattcgattttcctcaacatctctggtaaacatgttgtacctgtattctaggcccttgcttccaaaaatgcactatgtgcgcccaatacctgtgcttcaggttgatatgctacgccatcaagctgtccagattgtggctgcccgacttagccggatggagccacctttgagaaaggaagttgttgaatacatgacagattttgattctcacttgtggagcatgaggaaaagcaaagccaacttcttcagactcatgacagttttctcaggcttgtttgcagttagcaagtggttcagcggtgtctgttcatggaggaaccccattaccactgtgctagtgcacattctctttataatgctggtgtgctttcctgagctcatacttccaacagtgttcctgtacatgttccttatagggatttggaacttccgctatcgacctcgttatcctccacacatgaataccaagatctctcatgcggaggctgttcatcctgatgaacttgacgaggagttcgatacattccctaccagccgcaaccctgaggttgtaaggatgaggtatgacagactcaggagtgttgctggaaggatacaaacagtggttggtgatatcgctacacaaggggagagggttcaagcattgcttagctggagggaccctcgtgccacagcagtctttgtcctgttctgtctggtagcagcaattgtcttctatgttacaccgcttcaagttattgctgcattaggagggttctatgtgatgaggcacccaaggttcagacataggttgccctcagtaccagtaaacttcttcagacggttgccagcaaggactgactctatgctataaataagccactacctggtggtcttatcgttgtaatccctagagatgctttctctgttactgtagtttgctcgccttcgttgctatttgtaactgtgtctgttcagaacttgagagcctgttaattgtatcagttgttgaattctgggaataattgcgagacatggttctgtgttgatcctttctaaaatatcaagctatcaatgtttagtagcttgcttttttggctgtctcctcgtctgcaatcacaaaatgcatgtagctatgtccgttcctctatagcagttactgat

SEQ ID NO: 23670 - DNA, 3855 bp, Zea Mays
cacaactctacggaaagcctagtagatttggatgcacgccacgtaaaaatagggaaaagggcaccggtcaaattccgcgggcgtcacgtcatcaaacccacgcttccaattctactacggaggagaggtaacggaagcagcagcagccggcaggcacgcgcacgccgtcctcgtctacaactaggccccaggcaccccgctcctcctctccctcaaaaccccaccaaaaagcctcctctcccccctacactgtttccatcggcagacggctcccatggaggcggccgagtgaagcagccgcctgccagccagccatcgtctctgcgctgcttccgtggcccggatctgggagcgcggcgctgacagtggagtacagtggactacgtcgtcagctgcaatacttcttgatccagatccaggcgtccttccaactcttccttctgcattcgtgtggagtggggattcttctggcctttcgagtgacttcttttctttagtattgtgagatacaacatcagctgatccaatggcgacatataagctgggtgtggaggtcgcaagtgctcatgacctgatgcccaaggatgggcaaggttctgcaagcgcttgtgttgagctcacctttgatgggcagcgcttccgaactgctgtcaaggagaaggacctgaaccctgtctggaatgagcgcttctacttcaatgtatcagatccttctaatcttcctgagctggcccttgaagcatatgtctacaatgtcaacaaaactcttgaaagttccaggtccttccttgggaaggtcaggattgctggcacctcatttgtgccctttcctgacgcggtggtcatgcattatccattagagaagcgtgggatgttttctcgcgtcaaaggagaactgggtatgaaagtatacatcaccaatgaccccgccatcaaagcttcaaaccctcttcctgcaatggatcctgtctccaataatcctcttccagccccaagtccagcagagcagattgcagctgatataactggtactaatctgcacacatctcaggagcataggtctgaggcaaagaccttacataccatcgctaaggaggtacatcatcatcataaccatggccatcttccagctacgtttggtgagcagccttccaagtactccattgaccagatgaaacctcaatctcaaccaccgaggattgtgagaatgtattcagcagcgtcccagcagcccatggactatgcacttaaagaaactagtccatttcttggtggtgggcaggttgttggtggccgggtcatacgtggcgaaaagaatgctagcacttatgaccttgtggagcgaatgcagtatctgtttgtacgtgtggttaaggcacgagacttgcccgacatggatgtcactggaggcctggatccttatgttgaagtgagagtaggcaactatagggggataacaaagcactttgaaaagcaaaagaacccagagtggaatgcagtctttgctttttccagggaccgtatgcaggcatctgtgcttgaagttgtggtcaaagacaaagatttgattaaggatgactttgttggctttgtgcgatttgatttgaatgatgtccctattcgtgtgcccccggacagccctctggctccagaatggtacaggcttgttagtaagagcggggataagtccatgggtgagctcatgcttgcagtttgggttggcacccaagctgatgaagcatttcctgatgcctggcattcagatgctgcaacacttgaagatccatctgcagtaacacacatgaagtccaaagtttaccatgctcccagattgtggtacctgcgagttaatataattgaggcccaagatgttgctatattagataagacccgctatccagatgtatttgtgagagcacaggtggggcatcaacttgggaggacaaaacctgtgcaggctagaaattttaaccctttctggaatgaagacattatgtttgtggctgctgaaccatttgaggatcaccttgttctgactcttgaggatcgtgtaggtcctaataaagatgaaatgcttggtcgtgtaatcatacctttggcaatgattgatagacgtgccgatgaccgcattgtccatgggaagtggttcaatctcgagaagcctgttcttgttgatgttgaccaactgaagaaggagaagttctctactcggcttcatctccgtctctgtcttgatggaggttaccatgttcttgacgagtctacaaactacagcagtgacctgagaccaactgccaagcaactctggaagccgtctattggtttgcttgaacttggtgtccttggtgctcaagggattgttcccatgaaaactcgagatggaaaaggttcatcagacacctattgtgttgctaagtatgggtcgaaatgggtaaggacacggaccatcatgaacaacccaaatcccagattcaatgaacagtacacttgggaagtctatgatcctgcaactgtgctgactgttggtgtttttgacaatggacaacttggagagaagactggggagaagacatctagtggcaaagatgggaagataggcaaggttcggatacgcctttccacactcgaaactggtcgtgtgtacacccactcgtatcctcttctggttctacattcgtcgggggtcaaaaagatgggcgaactgcacctggcaattcgattttcctcaacatctctggtaaacatgttgtacctgtattctaggcccttgcttccaaaaatgcactatgtgcgcccaatacctgtgcttcaggttgatatgctacgccatcaagctgtccagattgtggctgcccgacttagccggatggagccacctttgagaaaggaagttgttgaatacatgacagattttgattctcacttgtggagcatgaggaaaagcaaagccaacttcttcagactcatgacagttttctcaggcttgtttgcagttagcaagtggttcagcggtgtctgttcatggaggaaccccattaccactgtgctagtgcacattctctttataatgctggtgtgctttcctgagctcatacttccaacagtgttcctgtacatgttccttatagggatttggaacttccgctatcgacctcgttatcctccacacatgaataccaagatctctcatgcggaggctgttcatcctgatgaacttgacgaggagttcgatacattccctaccagccgcaaccctgaggttgtaaggatgaggtatgacagactcaggagtgttgctggaaggatacaaacagtggttggtgatatcgctacacaaggggagagggttcaagcattgcttagctggagggaccctcgtgccacagcagtctttgtcctgttctgtctggtagcagcaattgtcttctatgttacaccgcttcaagttattgctgcattaggagggttctatgtgatgaggcacccaaggttcagacataggttgccctcagtaccagtaaacttcttcagacggttgccagcaaggactgactctatgctataaataagccactacctggtggtcttatcgttgtaatccctagagatgctttctctgttactgtagtttgctcgccttcgttgctatttgtaactgtgtctgttcagaacttgagagcctgttaattgtatcagttgttgaattctgggaataattgcgagacatggttctgtgttgatcctttctaaaatatcaagctatcaatgtttagtagcttgcttttttggctgtctcctcgtctgcaatcacaaaatgcatgtagctatgtccgttcctctatagcagttactgat

SEQ ID NO: 23671 - DNA, 2003 bp, Zea Mays
cattttgtacttgcccactaggaagctgtcaaactcatctctcaagggattcatcgcacctgaacttgggcggcttagtttcttgcaagagctgtatttggaccataacctgctctttggtacaattccaaaactaattggctcactgaagaacctgagggttctggacttgagcgtcaatcgactcactggaccgatcccttccgaattaggtggcttgagcagtgtgagcatagtatccacagctcacaatggactatgcccttcttcccgattatatgttgcggatttttcttacaactttcttgtcggaaaaattccatcctgcttgaaatatcttccaaggtcaagtttccaagggaactgcttccaggatgagtactctgtccaacaacgacctttgcaaatttgtacaagtggttctactggccagcaaggtgtcatatacggatccaaacatcctggccataaacatgaaaaaatggagcaaccaatttggcttcttgctttagaaatcgcaactggtgttcttctggttgtttttgtgattactggtatagttactgcttccagaagttgcaagctgaagccttctataagaatatcatcatggaatcgatcgaaaagttggagcgacgagataacagtgttgattgattctgatatgctgaaaagtctaccaaaattaagtcgccaggagcttgaagtggcctgtgaggattttagcaacatcattggctcaactccagagacggtagtctacaaaggaaccatgaaggatggacctgaagtttctgtgatatcgttgtgcgccttcgaaggtcattggactagccaccatgaactcttttaccaaaacaaggtcattgatctggcaagattgaatcatgagaacatagcaaagttcttagggtactgcagggagagtgatccattctctcggatgctagtcttcgagtacgcaccaaatgggacgttatttgagcatctacattatggagagggaggccaattttcttggctcaggcgaatgaagatagccattggaattgcccaggggttaagatacctgcacacggagctgcagcccccatttgctatatctgagctgaattcgaactccgtgtatgttacggaagattttactccaaagctggtggattttgaatgctggaaaatgatgttctcgagacactccatctcgagagacgagaaggctcgtgggcacttgaacagcaaatcctcttttcccggccacggggattctgcagcggatagacaagccgatgatatccaggccaacaccttcgctttcggagtgattttactggagatcatcagcgggcggcttccatactgcaaggataaaggctatttggtcgactgggcgagcaagtacctccagcaggcagaggagatcgggaagctggtggacccggagctgggcagcgtgcggagcgaggacctggcggtgctgtgcagcgtggtgagccggtgcatcgacccggacccgtcgaagcggccgtcgatgcagatcatcacgggcgtgctggagaacgggatcgacctgtcggcggccgccatcctcaaggagtcgtcgctggcgtgggccgagctcgccctcgccttgtgacacgctctactcccaccacctttgtgaatccatacggctgctgattgatttccttgactggcgtagggtttgctgccggtctcaactgagcagccgtttcgtatgaatgaatgaaacctgaaaggccatatgtatgttcttttcatccatccgttcgttctacacatccatcccgcacagatcatttgttttttttttttttgctccaatctattttaggttcagaaaacagtgtcggcaaaagaattatccggtaaaacgacagacgccgaatccatattgttgttattccttgacagcaacgatgactgatcaaatcaaaaggtcaggcgcgcgtgagacaaaaaataacgacgggtgacgaattgcg

SEQ ID NO: 23672 - DNA, 2142 bp, Zea Mays
cattttgtacttgcccactaggaagctgtcaaactcatctctcaagggattcatcgcacctgaacttgggcggcttagtttcttgcaagagctgtatttggaccataacctgctctttggtacaattccaaaactaattggctcactgaagaacctgagggttctggacttgagcgtcaatcgactcactggaccgatcccttccgaattaggtggcttgagcagtaaatttccattccaatgggttgactgggaatataccgtcggagctgggaaaattacagaatctcgtcgaacttaggttggataggaatagattgaagggatcaattccaggaagcaatactgccagtttttctcctgcttcaaatattggatccacagctcacaatggactatgcccttcttcccgattatatgttgcggatttttcttacaactttcttgtcggaaaaattccatcctgcttgaaatatcttccaaggtcaagtttccaagggaactgcttccaggatgagtactctgtccaacaacgacctttgcaaatttgtacaagtggttctactggccagcaaggtgtcatatacggatccaaacatcctggccataaacatgaaaaaatggagcaaccaatttggcttcttgctttagaaatcgcaactggtgttcttctggttgtttttgtgattactggtatagttactgcttccagaagttgcaagctgaagccttctataagaatatcatcatggaatcgatcgaaaagttggagcgacgagataacagtgttgattgattctgatatgctgaaaagtctaccaaaattaagtcgccaggagcttgaagtggcctgtgaggattttagcaacatcattggctcaactccagagacggtagtctacaaaggaaccatgaaggatggacctgaagtttctgtgatatcgttgtgcgccttcgaaggtcattggactagccaccatgaactcttttaccaaaacaaggtcattgatctggcaagattgaatcatgagaacatagcaaagttcttagggtactgcagggagagtgatccattctctcggatgctagtcttcgagtacgcaccaaatgggacgttatttgagcatctacattatggagagggaggccaattttcttggctcaggcgaatgaagatagccattggaattgcccaggggttaagatacctgcacacggagctgcagcccccatttgctatatctgagctgaattcgaactccgtgtatgttacggaagattttactccaaagctggtggattttgaatgctggaaaatgatgttctcgagacactccatctcgagagacgagaaggctcgtgggcacttgaacagcaaatcctcttttcccggccacggggattctgcagcggatagacaagccgatgatatccaggccaacaccttcgctttcggagtgattttactggagatcatcagcgggcggcttccatactgcaaggataaaggctatttggtcgactgggcgagcaagtacctccagcaggcagaggagatcgggaagctggtggacccggagctgggcagcgtgcggagcgaggacctggcggtgctgtgcagcgtggtgagccggtgcatcgacccggacccgtcgaagcggccgtcgatgcagatcatcacgggcgtgctggagaacgggatcgacctgtcggcggccgccatcctcaaggagtcgtcgctggcgtgggccgagctcgccctcgccttgtgacacgctctactcccaccacctttgtgaatccatacggctgctgattgatttccttgactggcgtagggtttgctgccggtctcaactgagcagccgtttcgtatgaatgaatgaaacctgaaaggccatatgtatgttcttttcatccatccgttcgttctacacatccatcccgcacagatcatttgttttttttttttttgctccaatctattttaggttcagaaaacagtgtcggcaaaagaattatccggtaaaacgacagacgccgaatccatattgttgttattccttgacagcaacgatgactgatcaaatcaaaaggtcaggcgcgcgtgagacaaaaaataacgacgggtgacgaattgcg

SEQ ID NO: 23673 - DNA, 1168 bp, Zea Mays
tccgatagaatcctaccggattcgatttcgatccttctcaactcaatctcacgtggcacgcagtcatcatccagccatccgctccaggctccagctctaggggagtgcctcctcctcctcctcctcctcctcctcctcgtccttcccctaccctccccgcgcgcagatcccgacgcgggacgcctgcattcccttgcgcgggacgcgacaactccacgctacacagttcacacgccaagcgagggccgcatctagatccgcgccgccgagctgacttgactattggacttgaggagcgggtgggttgcgatggccgctgcggggaggaatgcgggcgtcctcgcgctcttcgacgtcgacggcaccctcacagcgccgcgcaagggggtgacgccagagatgctagagttcatgaagcagctgcgccagcatgtgacagtgggcgtggttggcggatccgatctggtgaagattaccgagcagctcggcagtacagttattactgattatgattacgtcttctccgaaaacggcctggttgcacacaaaaatggccaactaattggaacccaaagtttgaaatcatttatcggagaagacaagctgaaggaatttattaacttcactcttcattacattgctgacttggatatcccaattaaaaggggtacattcatagagttccgaagtggaatgattaatgtatctcctataggaagaaactgtagccaagaagaacgggatgaatttgagaagtacgataaggtgcataacatccgacctaaaatggtgtcagtgcttcgtgaaaagtttgcacacatgaacttgacattttctatcggagggcagattagttttgatgtatttccccaaggttgggacaaaacttattgcttgagatatcttgaggaatttcaagaaatccatttctttggggataagacctacaagggtggcaatgactatgagatatttgaatctgaaagaacagttggtcatacagttaccagccccagtgacacagctcagcaatgcagatctctctttttgtcgaagtgatctccagcttatttccaacacatatttattaagtcatctttgactgaatgccttttgctggttttaatcaaagggaacggtcccaagcagcaaagaaaatggaaggtgt

SEQ ID NO: 23674 - DNA, 861 bp, Zea Mays
ttatccaaaattctagatttttagaaaagctctttaaaaaactgtcccaaacacacccaaaaattgtactaaacatacccaaagccaggtcccaaccgtccaactggcctgactgtaccatatgctcctttgagcaagcatgggaagtattcagcattctgacatctattttcttccctgcttacaagggtctcattttcacgtgcactgctagagtgtattatttttctttgtgaagagttgtatgcaaacaatttttttgggggagagaagaaatatataagtactctaacatacaaaattgcacgccgatttttgtgacagctcttgcattaatttttattccatttttctacatgcaacaagcttatctactaacagtgcaatcgatctagtactatcaagggatcccattttatctaatcgtcttcaaattgctagtgcgccatccactgtttcgctttcatcatcggagctgatagacttcgatttggacataactctggaaaacccatagccaagagaatttcctgacgtagcacacaactgcgaagggaacaacaggaggtcatcagatgacgattccggaactcgttgatgctttcctgaatctctgacattgggagttttgcctgaaatgaagcctatgcatcaaattccatacgttactaataagcacagtggatgataatcaaacaagagtttacttgtgcaagaacagcagcagctagctgaagacttggctccaaggtctcagggacaaccttcaaattgttcgcacagttccattagaagatatgttgtaagtactacatgtgaaataaagtatctgataagggaaaactaccagtagtgcataat

SEQ ID NO: 23675 - DNA, 1345 bp, Zea Mays
tccgatagaatcctaccggattcgatttcgatccttctcaactcaatctcacgtggcacgcagtcatcatccagccatccgctccaggctccagctctaggggagtgcctcctcctcctcctcctcctcctcctcctcgtccttcccctaccctccccgcgcgcagatcccgacgcgggacgcctgcattcccttgcgcgggacgcgacaactccacgctacacagttcacacgccaagcgagggccgcatctagatccgcgccgccgagctgacttgactattgcaagtttgcaacccaccgccacgccttcttctccccccgcgatctacccggcccgggcgccgttgctgctactgctattactaatactactaccgcgtcgtagcggaggcagggacttgaggagcgggtgggttgcgatggccgctgcggggaggaatgcgggcgtcctcgcgctcttcgacgtcgacggcaccctcacagcgccgcgcaagggggtgacgccagagatgctagagttcatgaagcagctgcgccagcatgtgacagtgggcgtggttggcggatccgatctggtgaagattaccgagcagctcggcagtacagttattactgattatgattacgtcttctccgaaaacggcctggttgcacacaaaaatggccaactaattggaacccaaagtttgaaatcatttatcggagaagacaagctgaaggaatttattaacttcactcttcattacattgctgacttggatatcccaattaaaaggggtacattcatagagttccgaagtggaatgattaatgtatctcctataggaagaaactgtagccaagaagaacgggatgaatttgagaagtacgataaggtgcataacatccgacctaaaatggtgtcagtgcttcgtgaaaagtttgcacacatgaacttgacattttctatcggagggcagattagttttgatgtatttccccaaggttgggacaaaacttattgcttgagatatcttgaggaatttcaagaaatccatttctttggggataagacctacaagggtggcaatgactatgagatatttgaatctgaaagaacagttggtcatacagttaccagccccagtgacacagctcagcaatgcagatctctctttttgtcgaagtgatctccagcttatttccaacacatatttattaagtcatctttgactgaatgccttttgattctacaccagctacccttggattactaccattcggaaatttggtttgccatggttcatttcttatctcttcgtttgtcagaggctttctgttgcaaatatcatcaataagttta

SEQ ID NO: 23676 - DNA, 1425 bp, Zea Mays
tccgatagaatcctaccggattcgatttcgatccttctcaactcaatctcacgtggcacgcagtcatcatccagccatccgctccaggctccagctctaggggagtgcctcctcctcctcctcctcctcctcctcctcgtccttcccctaccctccccgcgcgcagatcccgacgcgggacgcctgcattcccttgcgcgggacgcgacaactccacgctacacagttcacacgccaagcgagggccgcatctagatccgcgccgccgagctgacttgactattggacttgaggagcgggtgggttgcgatggccgctgcggggaggaatgcgggcgtcctcgcgctcttcgacgtcgacggcaccctcacagcgccgcgcaagagatgctagagttcatgaagcagctgcgccagcatgtgacagtgggcgtggttggcggatccgatctggtgaagattaccgagcagctcggcagtacagttattactgattatgattacgtcttctccgaaaacggcctggttgcacacaaaaatggccaactaattggaacccaaagtttgaaatcatttatcggagaagacaagctgaaggaatttattaacttcactcttcattacattgctgacttggatatcccaattaaaaggggtacattcatagagttccgaagtggaatgattaatgtatctcctataggaagaaactgtagccaagaagaacgggatgaatttgagaagtacgataaggtgcataacatccgacctaaaatggtgtcagtgcttcgtgaaaagtttgcacacatgaacttgacattttctatcggagggcagattagttttgatgtatttccccaaggttgggacaaaacttattgcttgagatatcttgaggaatttcaagaaatccatttctttggggataagacctacaagggtggcaatgactatgagatatttgaatctgaaagaacagttggtcatacagttaccagccccagtgacacagctcagcaatgcagatctctctttttgtcgaagtgatctccagcttatttccaacacatatttattaagtcatctttgactgaatgccttttggtatttttttcaatacaatacatgccaccattttttctttgaataattggatctataccattaaaagattgcaactttagatatatactattggctccacatatcattgactcatgtgaaccatacatgtaagtgagataacaatgatatatatttaaagttgtaatcctttaatgatactactgctccgtattcacaaattttcagattacatgtatacaactggcgaaaataaatcagatttacctgtttttactttacgccgtgttaattgagatgcttcttgggacatgggtgatgtagtaaaagatggtaattgtgc

SEQ ID NO: 23677 - DNA, 1397 bp, Zea Mays
tccgatagaatcctaccggattcgatttcgatccttctcaactcaatctcacgtggcacgcagtcatcatccagccatccgctccaggctccagctctaggggagtgcctcctcctcctcctcctcctcctcctcctcgtccttcccctaccctccccgcgcgcagatcccgacgcgggacgcctgcattcccttgcgcgggacgcgacaactccacgctacacagttcacacgccaagcgagggccgcatctagatccgcgccgccgagctgacttgactattgcaacggaggcagggacttgaggagcgggtgggttgcgatggccgctgcggggaggaatgcgggcgtcctcgcgctcttcgacgtcgacggcaccctcacagcgccgcgcaagggggtgacgccagagatgctagagttcatgaagcagctgcgccagcatgtgacagtgggcgtggttggcggatccgatctggtgaagattaccgagcagctcggcagtacagttattactgattatgattacgtcttctccgaaaacggcctggttgcacacaaaaatggccaactaattggaacccaaagtttgaaatcatttatcggagaagacaagctgaaggaatttattaacttcactcttcattacattgctgacttggatatcccaattaaaagaaactgtagccaagaagaacgggatgaatttgagaagtacgataaggtgcataacatccgacctaaaatggtgtcagtgcttcgtgaaaagtttgcacacatgaacttgacattttctatcggagggcagattagttttgatgtatttccccaaggttgggacaaaacttattgcttgagatatcttgaggaatttcaagaaatccatttctttggggataagacctacaagggtggcaatgactatgagatatttgaatctgaaagaacagttggtcatacagttaccagccccagtgacacagctcagcaatgcagatctctctttttgtcgaagtgatctccagcttatttccaacacatatttattaagtcatctttgactgaatgccttttggtatttttttcaatacaatacatgccaccattttttctttgaataattggatctataccattaaaagattgcaactttagatatatactattggctccacatatcattgactcatgtgaaccatacatgtaagtgagataacaatgatatatatttaaagttgtaatcctttaatgatactactgctccgtattcacaaattttcagattacatgtatacaactggcgaaaataaatcagatttacctgtttttactttacgccgtgttaattgagatgcttcttgggacatgggtgatgtagtaaaagatggtaattgtgc

SEQ ID NO: 23678 - DNA, 1565 bp, Zea Mays
atggaggccacggcagtagcggcagctgacgtcaaatctgaggtcgagtctaaatgtggccggaggatccctgagattgccgcgctcgtgacgaccagagatctgtgcctgcgatggccggagattcgtgcacgtccccctgtagatccgtgccacgctgagcccctcctcaagtggtccaacaacgacatcgatgagttcatcgccttcgattcggtctacgggccccaggttcttatgacatggaaattcaacggtttaaatgatgtaacaagtctaccatgccgcttcaaaaacatagacatgcttaggtcataagcatttaacaaatagtttgtgtttcgttgcaacacatgtgcaccatactagttgtaacataaaatgggaaacttctcagatatatgtagcagctgcttaatgttcctttctcatgtacaggacaagttataccacatactgtatgctaaaagaactatgatgaccgaagcagttcagaaaatctctcgaccagaggtagacaagtagccgcaggaaggattacatttccaatctagtatgcttctggaagcaattacatgtagcatttacctgtgccagatggccaataatatctccagtcattcttgaattgaattagcccaaataatatctggtgtcaatcaataacaagactggggaaaagctccaagcaagcaagctgcgggcactatgggtaagcaacatgaatcaggtaaagaacaacaagctacatgttctcaaagatactgacgacctctcgagtgtctacaccacatgcagtaaaacctgctagataagttattggttaatggcgtataaatacatggcgtaataattatatacgggagaactgaagagggaaagcggggagctgtggcagtacccttatccagtgtttgtcgcttgttgcctctcacactgctcgtgttccaaacctgttgatctaccaaacacctgatctcagtccttttcttgttcatatctattattttctgccgcaatgccggtattgccttcacaaggtctgcaggttcagcacagttgaataggcacgctttctgattcggtaactagattgactgtaggtagaattgataaatggtagaagcgctatctagattaaggctccatatgtactcttattttattattacttttgtcacacattccatagcaatatttggtttacatgagatagaagactagagggcatcaaatgaaaataagcgacagaatccacaattctgtagaagctctatctagattaagctccatataactttttttatttgtgtcacacgttctgtagcaaatattgagatttacatgaaatagaagactagagaacatcaaataaaataagtggcagaatctacaattttttgaccagttttcttgctaaagctagcacatgggagcagaaaactgcaatggctttttttcccacaacgtaaaactccttccagtttgcactttgcagtgtgcaaaaatttaatgttttggagaatgacagtcgagaaagcatagctttgaccactactttctat

SEQ ID NO: 23679 - DNA, 2327 bp, Zea Mays
gttaaacctaactgcctctcctgtctcccagtctctcgccgctcgcctctcagccgccgcgtgcctcccagtctcccgccctcgcctctctcttcctctcctctctccctgcgcgccgccgccgtgcctcgccttgcccagagactaaggcgccaggatagtataaatttagttcacgtgattgtggacttctcgccttttggattcaacattttctgcttctcagctctggaatacagaagtgccattgtgggctcaagaggataatgtacgggaggcgtgcatcgcagctgctgaaggagatcgactcctctgaggctggccagctcgtgccattcaacgtaattccagcttctgtactcacttgtggttacgaatttggaatcatagggaatgctgcttgtatctcgtttatgtctattacaagccgcaattttgtattatctgatgtgttctgtgttcgatgggtgaattgagtgtcgaaaaactcctatatcctcagttgaaagttttactttacttccgtggtagtctggtagcacctcaaaaatcataaaccgtcagatcaaatattgttggtttggctgacagatgtgcctgcaattgtgtgccttttaaattcttctcccttctaaacatgttagttagtacgtgccatctagatttggaaaaaaatcatatgggacctggtttaattctctatcaagttaaaccctacccatacatatgaatttagataaaaaaagatcactacatgtttcattaattcataatcatatttttaccatgtgggtactactttgtcattatatagtgccagaaaacctaaaatggttcgaaatattttatacgtactacttttccattgtcagaggcagcgtgactttgatagccacagttcctttttagtttctttggtacataacatgcaatctctgaaatgtgcagagtgacgtgtttgatcaagtgattagagagtgcaatgagcacaactcacaatttcaatcgttgatcaggtaaattttaccctactagaatgttgggttgctgaccatcttgattcaaatttaccctgattgataggcgtttcaaatgcacagtttactgactaggcctggtttagtacaggaaaatggtggagcaaaacttagatatcgagacaactagaaatgaagatcactatggtgcagctatccaccatctttccctgctccgtaacaaaagatgccttatggcttacatgtacaaaactaaaagttcacagctgagctaactttctgttttatgctgataatacatgattaaaattgaattcgtgtgtactgaagctgaaagaattacatccaaacaggtacaaccgagcagaagttatccagagttttagatggaaaattggccctgtgcttcctcatgacatacaagaaaagctccatttctcagaaaaggagtacttcaagaaccactctgcagccattaaatcatacatatcagagatggatatagatttgacagtggacatggttcctcccaaggatccttacattcaggttcgggtgctggaggacattggtgaagtatcgctcggtgaccattctgtgtcattgaccaagaactcactccatttcctaaggcgcacagacgctgaacagtttatatcacagaatttctggagtagggatcacatgtatgaatgtatgatggtacaataggatggtgcactgccctcgttctccccagcgatgctgcctgatgccctatttgcaacaatgaaaagacgcgttctgtaccaaggagcttcttaactagtcgctggacgatgatttcgaaagttgtgcaggcagtcctatactagattcattgcctctatttacatgtggatgacttttagttagtgtgccatccaagaaagcagatgttgcaaacattgtaacttgtgtattaacattggttttgctggtagatttcatatttgtgtttccaagattccatgtaatcaagaaaaaaaatgaaatcttggttgaaacagtctttcacagtgaggagttagtttcattttatagctaacatgcaagagacaatatgtctagttaacatttcatctatttctccattaattgcttgcctcatcatctaaactgttgacatgtcacatcatttattaatgagaatgaaacctttataaaactgtcattgagaaacttgattctcttttgtatttcttgcactcaatgtggtaattaggacagaccacttgtgtctgtatgtatcacctacctaggagatgcttgattggaaaccaccagacgatgatgctagttatatgtccg

SEQ ID NO: 23680 - DNA, 1398 bp, Zea Mays
gttaaacctaactgcctctcctgtctcccagtctctcgccgctcgcctctcagccgccgcgtgcctcccagtctcccgccctcgcctctctcttcctctcctctctccctgcgcgccgccgccgtgcctcgccttgcccagagactaaggcgccaggatagtataaatttagttcacgtgattgtggacttctcgccttttggattcaacattttctgcttctcagctctggaatacagaagtgccattgtgggctcaagaggataatgtacgggaggcgtgcatcgcagctgctgaaggagatcgactcctctgaggctggccagctcgtgccattcaacagtgacgtgtttgatcaagtgattagagagtgcaatgagcacaactcacaatttcaatcgttgatcaggtacaaccgagcagaagttatccagagttttagatggaaaattggccctgtgcttcctcatgacatacaagaaaagctccatttctcagaaaaggagtacttcaagaaccactctgcagccattaaatcatacatatcagagatggatatagatttgacagtggacatggttcctcccaaggatccttacattcaggttcgggtgctggaggacattggtgaagtatcgctcggtgaccattctgtgtcattgaccaagaactcactccatttcctaaggcgcacagacgctgaacagtttatatcacagggtcttatggaagaatttctggagtagggatcacatgtatgaatgtatgatggtacaataggatggtgcactgccctcgttctccccagcgatgctgcctgatgccctatttgcaacaatgaaaagacgcgttctgtaccaaggagcttcttaactagtcgctggacgatgatttcgaaagttgtgcaggcagtcctatactagattcattgcctctatttacatgtggatgacttttagttagtgtgccatccaagaaagcagatgttgcaaacattgtaacttgtgtattaacattggttttgctggtagatttcatatttgtgtttccaagattccatgtaatcaagaaaaaaaatgaaatcttggttgaaacagtctttcacagtgaggagttagtttcattttatagctaacatgcaagagacaatatgtctagttaacatttcatctatttctccattaattgcttgcctcatcatctaaactgttgacatgtcacatcatttattaatgagaatgaaacctttataaaactgtcattgagaaacttgattctcttttgtatttcttgcactcaatgtggtaattaggacagaccacttgtgtctgtatgtatcacctacctaggagatgcttgattggaaaccaccagacgatgatgctagttatatgtccg

SEQ ID NO: 23681 - DNA, 1479 bp, Zea Mays
gttaaacctaactgcctctcctgtctcccagtctctcgccgctcgcctctcagccgccgcgtgcctcccagtctcccgccctcgcctctctcttcctctcctctctccctgcgcgccgccgccgtgcctcgccttgcccagagactaaggcgccaggatagtataaatttagttcacgtgattgtggacttctcgccttttggattcaacattttctgcttctcagctctggaatacagaagtgccattgtgggctcaagaggataatgtacgggaggcgtgcatcgcagctgctgaaggagatcgactcctctgaggctggccagctcgtgccattcaacagtgacgtgtttgatcaagtgattagagagtgcaatgagcacaactcacaatttcaatcgttgatcaggaaaatggtggagcaaaacttagatatcgagacaactagaaatgaagatcactatggtgcagctatccaccatctttccctgctccgtaacaaaagatgccttatggcttacatgtacaaccgagcagaagttatccagagttttagatggaaaattggccctgtgcttcctcatgacatacaagaaaagctccatttctcagaaaaggagtacttcaagaaccactctgcagccattaaatcatacatatcagagatggatatagatttgacagtggttcgggtgctggaggacattggtgaagtatcgctcggtgaccattctgtgtcattgaccaagaactcactccatttcctaaggcgcacagacgctgaacagtttatatcacagggtcttatggaagaatttctggagtagggatcacatgtatgaatgtatgatggtacaataggatggtgcactgccctcgttctccccagcgatgctgcctgatgccctatttgcaacaatgaaaagacgcgttctgtaccaaggagcttcttaactagtcgctggacgatgatttcgaaagttgtgcaggcagtcctatactagattcattgcctctatttacatgtggatgacttttagttagtgtgccatccaagaaagcagatgttgcaaacattgtaacttgtgtattaacattggttttgctggtagatttcatatttgtgtttccaagattccatgtaatcaagaaaaaaaatgaaatcttggttgaaacagtctttcacagtgaggagttagtttcattttatagctaacatgcaagagacaatatgtctagttaacatttcatctatttctccattaattgcttgcctcatcatctaaactgttgacatgtcacatcatttattaatgagaatgaaacctttataaaactgtcattgagaaacttgattctcttttgtatttcttgcactcaatgtggtaattaggacagaccacttgtgtctgtatgtatcacctacctaggagatgcttgattggaaaccaccagacgatgatgctagttatatgtccg

SEQ ID NO: 23682 - DNA, 604 bp, Zea Mays
gtgcttcacggagcaacattgtggtggaagagatcctgaaggtgttgaaagaggcagagtgggaaccatccctgcactggaaggcaatgccgacggagttcgccgaggactcccccttcgatcttgtctcctccagcggtgacgccaccgtgaacccgtcggagtggacaatccacaggaaaatacaatggaactgactgacttgtttgcggccttgatttgactccatggctggatggatggatgcatacatttgttctgccttgatggaattggaacgaatcatgatgctcaagaataacaatggaggaccagagttaagggacaatatgataccgtcatcttatctatttgatcagacctcggtgtctcgaagattgattggtcaatgttgtgttttccccatgattatggtgtgttgtgtgtttggattgatggcaaggttggctaggatgcatccatgtttcggagatatggccattcaagttgtgtgttttgataatagaatgagccgtttttttagatgcaatgagaatacttaactagctatatctcttaactatataaaaacaataacatgaagctactctccctgtttaattaa

SEQ ID NO: 23683 - DNA, 1174 bp, Zea Mays
aatcctctagttcgattctttggcctcgcagcggtcaagttggataggacgaatggagctactgggtggaggttatggtgtgtggaaacttcgatctggcttcatttatggagtgttggagcaaaaatcgcatgggatgctgaggaacatggcggtatggagggagagggacagttttcagttacttatctatatgatgacacacgattcagcagtgcagccgtctctggtaatagtttactttggtggaaacgactcaattgatgctcattgttccggtctcgggcctcatgtgccgctagatgagtacatagggaacatgagaaagattgcagaacacctaaagagcctctccgagaagacacgggtccttttcctgagctgcccacctctgaacgaggagatgcttcgaaactcaaccagcagtactatactgagtgagatcgtccggaccaacgaaacctgccgtctgtactctgacgtgtgcgtagctctgtgcaaggagatgcacctgaaggtggttgatctctggcatgccatgcagaagagggaggactggaagactgcgtgcttcacaagggagcaacattgtggtggaagagatcctgaaggtgttgaaagaggcagagtgggaaccatccctgcactggaaggcaatgccgacggagttcgccgaggactcccccttcgatcttgtctcctccagcggtgacgccaccgtgaacccgtcggagtggacaatccacaggaaaatacaatggaactgactgacttgtttgcggccttgatttgactccatggctggatggatggatgcatacatttgttctgccttgatggaattggaacgaatcatgatgctcaagaataacaatggaggaccagagttaagggacaatatgataccgtcatcttatctatttgatcagacctcggtgtctcgaagattgattggtcaatgttgtgttttccccatgattatggtgtgttgtgtgtttggattgatggcaaggttggctaggatgcatccatgtttcggagatatggccattcaagttgtgtgttttgataatagaatgagccgtttttttagatgcaatgagaatacttaactagctatatctcttaactatataaaaacaataacatgaagctactctccctgtttaattaa

SEQ ID NO: 23684 - DNA, 1285 bp, Zea Mays
caaataaactttatagctcattgaggtttgctttattgcgcaatttggtcagtctgttgttcgagcagactatcttatcctccgcaagggttttataatgacccacaatcttccgccaacatatgatttccacaattacatgatacgctcaatggaagaggagtttgagaagattgtcggagtgagtggactgttgtggggcttcgttgttgcttttatgttatttaatgtagacggatccaacctgtacttttggatagcaattcttcctgtaactcttgttcttctggtgggtgcaaagctgcagcatgtgattgcgactctaacagcagagggcgcaaagatgagcacctacgggccaaggatacagccaagggatgatctcttttggttcaagaaaccagagtttctcctttggttgatacacttcgttctctttcagaatgccttcgagttggcttcgttcttctggttctggtggcaatttggttatgattcatgcttcatcaaaaaccaccttttggtatattgccgccttatactggggtttgctggacagttcctgtgcagttacagtacattacctgtatatgcgctggtcactcagatggggtccaagtacaaggctgcgctgatcccgcggaggatcagggagaccatacatgggtggggaaaagcgacgaggaagaagcgccggcgccgccgcggcgacgactcgacggtccgcacggagacgagcacggtgtgctcgctcacggacgacgacgaagacttcgaagacgacgacgaccaccaccaccacggaccgtcgtacgataccccgagagccgggggccgcccgccgtacctgaagatcgagacgcatcgtcagtcgggcagcgggcacgacggccccaggcccggcggcaccccgtgcttccaccccagcggcagcggcagcgggcacgccatgctcctgcggcaggcctccgtctccgcgccgtcgtcgccgtcgtaccgcggaggcaataacgtgacaaggtcggcgtccatgcccgggatcgccgcgctgaggacaacgggctccggcacgccgacgcgcgtgagccatgaggagcctacttgatgcgcgcccgtgcatgccatggatggcttgctagtgcagacgtactgaggactgagctgctagtgtagcaccggatttgaaggtatatcgatatatatatacacacgaaaagatttggggtgacaaatggcgccttctgtgatccgtgtcgctcacgagcaccatccatggcgaacgaac

SEQ ID NO: 23685 - DNA, 2742 bp, Zea Mays
tcttgctcctcgtaattgtttaagcgcaggagcgaagtggttcgttgttccaccagatcccctcttttggccgatctctcttccgttccgttccgctctgccgcagccaattgcttctgctgtgtccttttcctcccagcgagcaccttaccttacctctctctcctcgttgttgtgttgttgattgatcctggaagccgcagctccacaagctcccaaaaagcaacaacctttacctcgttgttcattgtatcttcctttcttccctgcttctggctccgccgccgccgcatctcttctgaagctgaacccgcgacagctaaccgccattgtttgcaggggagacaggagcgagcgagagagagagagagagagagagagagagagctcgcgacaaggttttgcccgcaccatatcgtcctctccccgcaagctccaaaagccaggtccagggactaaatagagcaaaggaagcctttcatcatcgtcgtcatacactaatcgaacgggagaatcggagggagggacatacatcacgtttttgtgctcctccgagtccgtccttctccaagatcccccattttccttctcgtttccaacctcctcctccttcctgaccgaccgatggcgatggtgtgacgccgccgcccgtccccgacaccgctgcgacctcagcatttccacaccgtctcggtctgggtctggtcttcgtctccgcctgcgccttcgttttgatccttaagctgagcttcccttccccgagcgccacctccgcccgtcctaccatggcgctggcttcaatgtgatacgcggaggtgcggtcggtcggtcgtgactcgtgaggaataggaagagggtaggagaggagaagaagagccagcgccggcgggaggggagatggcgggcggcgagggggagatgcggtcgctggcgctcacgcccacgtggtccgtcgccaccgtgctcaccctcctcgtcgcgggctcgctcctcatcgagcgctccatccaccgcctcagcaattggctgaagaaaactcatcggaatccactttacaaagcaatggagaagatgaaagaagaaatgatgctgcttgggttcatatctctgcttctggctgcgacgtcaagaatcatctcggggatctgcatcgactccaagtactacaacagcagattctccccgtgcaccaaagaagaggtccaagaatcgataaatgcagagcatgccattgctcacgcgcgcaagcatctactggaggtcatcctgcaccattcaccgaggagaaatctgaaaactagttaccataaccatgaaggctgccgtgagggatatgagtcatttgtttcgcatgaaggtttggagcagctgcaccggtttatatttgtaatggctgtgactcatgtgacttatagctgcctgacgatgttactagcaatactcaagatccataaatggagaaaatgggaggatgaagcattcagggataatcatgaatcattttctcagatcgcatatgagtcagcaactagaaggcaaccagcacttaccaaatcctattcattccgctcttggagccaaaataatgtggtcatgtggcttgtttgctttattgcgcaatttggtcagtctgttgttcgagcagactatcttatcctccgcaagggttttataatgacccacaatcttccgccaacatatgatttccacaattacatgatacgctcaatggaagaggagtttgagaagattgtcggactgcagcatgtgattgcgactctaacagcagagggcgcaaagatgagcacctacgggccaaggatacagccaagggatgatctcttttggttcaagaaaccagagtttctcctttggttgatacacttcgttctctttcagaatgccttcgagttggcttcgttcttctggttctggtggcaatttggttatgattcatgcttcatcaaaaaccaccttttggtatattgccgccttatactggggtttgctggacagttcctgtgcagttacagtacattacctgtatatgcgctggtcactcagatggggtccaagtacaaggctgcgctgatcccgcggaggatcagggagaccatacatgggtggggaaaagcgacgaggaagaagcgccggcgccgccgcggcgacgactcgacggtccgcacggagacgagcacggtgtgctcgctcacggacgacgacgaagacttcgaagacgacgacgaccaccaccaccacggaccgtcgtacgataccccgagagccgggggccgcccgccgtacctgaagatcgagacgcatcgtcagtcgggcagcgggcacgacggccccaggcccggcggcaccccgtgcttccaccccagcggcagcggcagcgggcacgccatgctcctgcggcaggcctccgtctccgcgccgtcgtcgccgtcgtaccgcggaggcaataacgtgacaaggtcggcgtccatgcccgggatcgccgcgctgaggacaacgggctccggcacgccgacgcgcgtgagccatgaggagcctacttgatgcgcgcccgtgcatgccatggatggcttgctagtgcagacgtactgaggactgagctgctagtgtagcaccggatttgaaggtatatcgatatatatatacacacgaaaagatttggggtgacaaatggcgccttctgtgatccgtgtcgctcacgagcaccatccatggcgaacgaac

SEQ ID NO: 23686 - DNA, 1155 bp, Zea Mays
gtacttgcagagcagccatgtggctgaagaaaactcatcggaatccactttacaaagcaatggagaagatgaaagaagaaatgatgctgcttgggttcatatctctgcttctggctgcgacgtcaagaatcatctcggggatctgcatcgactccaagtactacaacagcagattctccccgtgcaccaaagaagaggtccaagaatcgataaatgcagagcatgccattgctcacgcgcgcaagcatctactggaggtcatcctgcaccattcaccgaggagaaatctgaaaactagttaccataaccatgaaggctgccgtgagggatatgagtcatttgtttcgcatgaaggtttggagcagctgcaccggtttatatttgtaatggctgtgactcatgtgacttatagctgcctgacgatgttactagcaatactcaagatccataaatggagaaaatgggaggatgaagcattcagggataatcatgaatcattttctcagatcgcatatgagtcagcaactagaaggtttgctttattgcgcaatttggtcagtctgttgttcgagcagactatcttatcctccgcaagggttttataatgacccacaatcttccgccaacatatgatttccacaattacatgatacgctcaatggaagaggagtttgagaagattgtcggagtgagtggactgttgtggggcttcgttgttgcttttatgttatttaatgtagacggatccaacctgtacttttggatagcaattcttcctgtaactcttgttcttctggtgggtgcaaagctgcagcatgtgattgcgactctaacagcagagggcgcaaagatgagcacctacgggccaaggatacagccaagggatgatctcttttggttcaagaaaccagagtttctcctttggttgatacacttcgttctctttcagaatgccttcgagttggcttcgttcttctggttctggtggcaatttggttatgattcatgcttcatcaaaaaccaccttttggtatattgccgccttatactggggtttgctggacagttcctgtgcagttacagtacattacctgtatatgcgctggtcactcagtacatacaagaaggattggttatgcatgttgctaaatggcg

SEQ ID NO: 23687 - DNA, 3637 bp, Zea Mays
cctccctccgtctcccgggcggaagcggaagtaagcgaacggggcatccacgtccgccatccatggctgccacaggtacgcttgcccttctcctcccagtgaccctctcctcgaggccctcccaccgcacgcgcggcttcatgcagatcccacgtcgtcagcagccgcgacggctcacagcggcggccaccgaagcctcctcctacaacctaccatctcgctcctcaccggaggcgccggagaccaggcagatacgcctggagacggagtcagcactggagtggggcggcgtgtgcgagcggctggcccacttcaccgccactgctgcgggccgcgccgcctgcgagggagggcgcgtccccgtcgggcggagccgggaggagagcgagaggctgatcgaccagacggcggcggcggtgctgcttccgacgccgctcgatttcggcggcgtcgaggacgtgtccgcgctcgtcgctgcggcggtcgcgggccgcgcgctggcggtgagggagctttgcgcagttgggcgcagcatccgtgccgtgcgggcagtgttccaccagttgaagaggcttgccgatgaaatgccggatggaaggtgaggaatcgctttggtgcttgctgatgaattggacggcattgaaacatgccatcatcaggcgttagtagtatctttttgtttgatcattgtgactgtgtattatggatagtcgatattagttttgtcatagctttgtggatggaatggaaaccatagtgctgataattcaccggttactgttcacgtattcttacacattacaagagtctataaatatttgttggttcttattttcagattcaaaaaaaaaattctatttgttctcctgcaggtactcttctcttgtagatatactacaaggttgtgacttcttaactgagcttgttcaaaggatagagttttgccttgattccaccctttctcttgtcctggatcgggcaagcaaaaaactagagataatccgccgagaaaggaggaggaacatcgaaatgttagaatctctactaaaagatacagctgcaaagatttttctagcaggtgggattgataaccctctggtcaccaagcgccgttctaggatgtgtgttggtgtgaaagcttcacacaagcatttgatgcctggtggaatcgttctaagttccagtggctctggcgcaacatactttatggagccacaggatgctgttgagctcaacaacagggaagttaaactctcaggagaggagagagcagaggaactggtagtattgagcttgcttacctcaatgattgcagactcccaactgaagatcagaaatttgatggacaatgttttggaattggaccttgcttgtgctagagggtcgtatgccctatggacaaacagtgtcagaccaaccttcactgatagttataccattagccaatcagaccagtgcaatgactattcaatttatattgagggcattcgccatcctcttctacttgaacagtctcttatggcagaagaatcaactacagaagcatctgaaatgcctgttccattggacatgtgggtaaaaaagaatgcaaggatagttgtgatctctggacctaacactggaggcaaaactgccactatgaagaccttggggctgtcctcgcttatgtcaaaagctggtatattcttcccagccaaaggaaggcctaggattccatggttcgatcaggttcttgcagatattggtgatcaccagtcgctggagcacagcctctctacattcagtgggcacatatcacgtctgcgcaagattgtagaaatggtatcaaaagattctctagttctaattgatgagattggcagcggcactgatccagctgaaggtgtagctctttcaaccagcattttgaagtatcttgcaagtagagtgaatttagcaattgtgacaactcattatgctgatctaagtcggctccagtcagttgacaaccgattcgagaatgctgcaatggaattttgtgtagaaactctacaaccaacataccgaatcttatggggcagtactggtaattccaatgcacttagcattgcaaagtcaattggttttgatcaaaaagtgcttgatcgcgcacaagaatgggttgagaaactactgcctgataagcaaaaggagcggcaaggtttactttatgattctctcgttgatgaaaaagaacttttggaatcccaggcaaatgaagctgcatctgttctttcacaggttgaggggttgtacaatgagattcgcttggaagctgatgatctcgaaagcagagtagctgcattgagagcaagagagacccaaaaggtacaacaggaattgaaggttgtgaagtatcggatggacaccataatcaagaactttgaagctcagctaaagaattcaaaacttgaacaatacaattcgctaatgaggaaagcagaggctgccactgcttccgtggttgccgctcatcagccaagcgaaatagctttcgatgatgacgatgaaaaccggatctcgttcgtctcacaagttggagacaaagtgtatgttcaagggctgggaggagaaacgatggctaccgttgtcgaaactctcggagaagatgagagttgtatggttcaatacggaaagataaaggttcgagtcaagagaagcaggataaaactggttcaaagaggcacaaataacgaggcaacaacttcctcttctgtaaaagcaaagggccgaacaccgaagcagcgatcggcaacgacgacggacgtctccttcggccccgtggtgcagacgtccaagaacacggtggatctgcgcggtaagcgggtcagcgaggcggccttcgagctccgcatggccgtcgacgcgtgcaggccgtaccaggtgctgttcgtggtccatggcatgggcaccggggcggtgaaggactgcgccattgacgtcctccggaagcaccctcgcgtggccaggttcgaggacgagagccctctcaactacggctgcaccgtcgcctacatccagtgaacgggtgggtacagacagactgtttggaactgaacgcagacatttcagtacagaaatcagtttggttttgccttgcctaccagctcccagcgtgtccttgtcacagactcacagttgcggaatgccagttgggtgagctttttgctagtagctgatctgcgggtggatcggataaatggccttggcagttgtgatcagttcggccggcgtcctatgcattggcatcgcaaaatcaccagcggaagcaaggtgtgcgtgcacatgcgcgcctcttctttccagcaggattttgtgtggcgagggctgatgtggccaggttcgagccacgagagacaaaatacttgtggctcgtcaactcgttctcgacttgttttagttttgtcacaagttaagctagtatcttggctcggtttgttacaagccagctcgagttaagcttgttagctcgaatgatctagcatttgtaagcaaaacaaaaggcattcacagatgaactaataagtgataaactgtattaattagatgttgtattcatgtgttatatgaaattatgagtactattactcttttcgagtgttaaattaacttagaatta

SEQ ID NO: 23688 - DNA, 3290 bp, Zea Mays
cttcggtgtggacctccctccgtctcccgggcggaagcggaagtaagcgaacggggcatccacgtccgccatccatggctgccacaggtacgcttgcccttctcctcccagtgaccctctcctcgaggccctcccaccgcacgcgcggcttcatgcagatcccacgtcgtcagcagccgcgacggctcacagcggcggccaccgaagcctcctcctacaacctaccatctcgctcctcaccggaggcgccggagaccaggcagatacgcctggagacggagtcagcactggagtggggcggcgtgtgcgagcggctggcccacttcaccgccactgctgcgggccgcgccgcctgcgagggagggcgcgtccccgtcgggcggagccgggaggagagcgagaggctgatcgaccagacggcggcggcggtgctgcttccgacgccgctcgatttcggcggcgtcgaggacgtgtccgcgctcgtcgctgcggcggtcgcgggccgcgcgctggcggtgagggagctttgcgcagttgggcgcagcatccgtgccgtgcgggcagtgttccaccagttgaagaggcttgccgatgaaatgccggatggaaggtactcttctcttgtagatatactacaaggttgtgacttcttaactgagcttgttcaaaggatagagttttgccttgattccaccctttctcttgtcctggatcgggcaagcaaaaaactagagataatccgccgagaaaggaggaggaacatcgaaatgttagaatctctactaaaagatacagctgcaaagatttttctagcaggtgggattgataaccctctggtcaccaagcgccgttctaggatgtgtgttggtgtgaaagcttcacacaagcatttgatgcctggtggaatcgttctaagttccagtggctctggcgcaacatactttatggagccacaggatgctgttgagctcaacaacagggaagttaaactctcaggagaggagagagcagaggaactggtagtattgagcttgcttacctcaatgattgcagactcccaactgaagatcagaaatttgatggacaatgttttggaattggaccttgcttgtgctagagggtcgtatgccctatggacaaacagtgtcagaccaaccttcactgatagttataccattagccaatcagaccagtgcaatgactattcaatttatattgagggcattcgccatcctcttctacttgaacagtctcttatggcagaagaatcaactacagaagcatctgaaatgcctgttccattggacatgtgggtaaaaaagaatgcaaggatagttgtgatctctggacctaacactggaggcaaaactgccactatgaagaccttggggctgtcctcgcttatgtcaaaagctggtatattcttcccagccaaaggaaggcctaggattccatggttcgatcaggttcttgcagatattggtgatcaccagtcgctggagcacagcctctctacattcagtgggcacatatcacgtctgcgcaagattgtagaaatggtatcaaaagattctctagttctaattgatgagattggcagcggcactgatccagctgaagtcggctccagtcagttgacaaccgattcgagaatgctgcaatggaattttgtgtagaaactctacaaccaacataccgaatcttatggggcagtactggtaattccaatgcacttagcattgcaaagtcaattggttttgatcaaaaagtgcttgatcgcgcacaagaatgggttgagaaactactgcctgataagcaaaaggagcggcaaggtttactttatgattctctcgttgatgaaaaagaacttttggaatcccaggcaaatgaagctgcatctgttctttcacaggttgaggggttgtacaatgagattcgcttggaagctgatgatctcgaaagcagagtagctgcattgagagcaagagagacccaaaaggtacaacaggaattgaaggttgtgaagtatcggatggacaccataatcaagaactttgaagctcagctaaagaattcaaaacttgaacaatacaattcgctaatgaggaaagcagaggctgccactgcttccgtggttgccgctcatcagccaagcgaaatagctttcgatgatgacgatgaaaaccggatctcgttcgtctcacaagttggagacaaagtgtatgttcaagggctgggaggagaaacgatggctaccgttgtcgaaactctcggagaagatgagagttgtatggttcaatacggaaagataaaggttcgagtcaagagaagcaggataaaactggttcaaagaggcacaaataacgaggcaacaacttcctcttctgtaaaagcaaagggccgaacaccgaagcagcgatcggcaacgacgacggacgtctccttcggccccgtggtgcagacgtccaagaacacggtggatctgcgcggtaagcgggtcagcgaggcggccttcgagctccgcatggccgtcgacgcgtgcaggccgtaccaggtgctgttcgtggtccatggcatgggcaccggggcggtgaaggactgcgccattgacgtcctccggaagcaccctcgcgtggccaggttcgaggacgagagccctctcaactacggctgcaccgtcgcctacatccagtgaacgggtgggtacagacagactgtttggaactgaacgcagacatttcagtacagaaatcagtttggttttgccttgcctaccagctcccagcgtgtccttgtcacagactcacagttgcggaatgccagttgggtgagctttttgctagtagctgatctgcgggtggatcggataaatggccttggcagttgtgatcagttcggccggcgtcctatgcattggcatcgcaaaatcaccagcggaagcaaggtgtgcgtgcacatgcgcgcctcttctttccagcaggattttgtgtggcgagggctgatgtggccaggttcgagccacgagagacaaaatacttgtggctcgtcaactcgttctcgacttgttttagttttgtcacaagttaagctagtatcttggctcggtttgttacaagccagctcgagttaagcttgttagctcgaatgatctagcatttgtaagcaaaacaaaaggcattcacagatgaactaataagtgataaactgtattaattagatgttgtattcatgtgttatatgaaattatgagtactattactcttttcgagtgttaaattaacttagaatta

SEQ ID NO: 23689 - DNA, 2939 bp, Zea Mays
gtccttcggtgtggacctccctccgtctcccgggcggaagcggaagtaagcgaacggggcatccacgtccgccatccatggctgccacaggtactcttctcttgtagatatactacaaggttgtgacttcttaactgagcttgttcaaaggatagagttttgccttgattccaccctttctcttgtcctggatcgggcaagcaaaaaactagagataatccgccgagaaaggaggaggaacatcgaaatgttagaatctctactaaaagatacagctgcaaagatttttctagcaggtgggattgataaccctctggtcaccaagcgccgttctaggatgtgtgttggtgtgaaagcttcacacaagcatttgatgcctggtggaatcgttctaagttccagtggctctggcgcaacatactttatggagccacaggatgctgttgagctcaacaacagggaagttaaactctcaggagaggagagagcagaggaactggtagtattgagcttgcttacctcaatgattgcagactcccaactgaagatcagaaatttgatggacaatgttttggaattggaccttgcttgtgctagagggtcgtatgccctatggacaaacagtgtcagaccaaccttcactgatagttataccattagccaatcagaccagtgcaatgactattcaatttatattgagggcattcgccatcctcttctacttgaacagtctcttatggcagaagaatcaactacagaagcatctgaaatgcctgttccattggacatgtgggtaaaaaagaatgcaaggatagttgtgatctctggacctaacactggaggcaaaactgccactatgaagaccttggggctgtcctcgcttatgtcaaaagctggtatattcttcccagccaaaggaaggcctaggattccatggttcgatcaggttcttgcagatattggtgatcaccaggtagtctctgtcctttgatgagaatttcgctagtcacttgtgggacaataagctcattgatgaaaactattttttggattgaagtcgctggagcacagcctctctacattcagtgggcacatatcacgtctgcgcaagattgtagaaatggtatcaaaagattctctagttctaattgatgagattggcagcggcactgatccagctgaaggtgtagctctttcaaccagcattttgaagtatcttgcaagtagagtgaatttagcaattgtgacaactcattatgctgatctaagtcggctccagtcagttgacaaccgattcgagaatgctgcaatggaattttgtgtagaaactctacaaccaacataccgaatcttatggggcagtactggtaattccaatgcacttagcattgcaaagtcaattggttttgatcaaaaagtgcttgatcgcgcacaagaatgggttgagaaactactgcctgataagcaaaaggagcggcaaggtttactttatgattctctcgttgatgaaaaagaacttttggaatcccaggcaaatgaagctgcatctgttctttcacaggttgaggggttgtacaatgagattcgcttggaagctgatgatctcgaaagcagagtagctgcattgagagcaagagagacccaaaaggtacaacaggaattgaaggttgtgaagtatcggatggacaccataatcaagaactttgaagctcagctaaagaattcaaaacttgaacaatacaattcgctaatgaggaaagcagaggctgccactgcttccgtggttgccgctcatcagccaagcgaaatagctttcgatgatgacgatgaaaaccggatctcgttcgtctcacaagttggagacaaagtgtatgttcaagggctgggaggagaaacgatggctaccgttgtcgaaactctcggagaagatgagagttgtatggttcaatacggaaagataaaggttcgagtcaagagaagcaggataaaactggttcaaagaggcacaaataacgaggcaacaacttcctcttctgtaaaagcaaagggccgaacaccgaagcagcgatcggcaacgacgacggacgtctccttcggccccgtggtgcagacgtccaagaacacggtggatctgcgcggtaagcgggtcagcgaggcggccttcgagctccgcatggccgtcgacgcgtgcaggccgtaccaggtgctgttcgtggtccatggcatgggcaccggggcggtgaaggactgcgccattgacgtcctccggaagcaccctcgcgtggccaggttcgaggacgagagccctctcaactacggctgcaccgtcgcctacatccagtgaacgggtgggtacagacagactgtttggaactgaacgcagacatttcagtacagaaatcagtttggttttgccttgcctaccagctcccagcgtgtccttgtcacagactcacagttgcggaatgccagttgggtgagctttttgctagtagctgatctgcgggtggatcggataaatggccttggcagttgtgatcagttcggccggcgtcctatgcattggcatcgcaaaatcaccagcggaagcaaggtgtgcgtgcacatgcgcgcctcttctttccagcaggattttgtgtggcgagggctgatgtggccaggttcgagccacgagagacaaaatacttgtggctcgtcaactcgttctcgacttgttttagttttgtcacaagttaagctagtatcttggctcggtttgttacaagccagctcgagttaagcttgttagctcgaatgatctagcatttgtaagcaaaacaaaaggcattcacagatgaactaataagtgataaactgtattaattagatgttgtattcatgtgttatatgaaattatgagtactattactcttttcgagtgttaaattaacttagaatta

SEQ ID NO: 23690 - DNA, 2372 bp, Zea Mays
gtcaaacaaaaaggcccaaaaagccgctccgagcctccgacctcgcatccggcccgattcgactagggttttagcactcccagtcccggctcccgccgtcgcctcgacgcttcccccctcttcctccgccgccaacccagcgagagagctcccagtccgcgaagacatggcggggaagaagcgcaagtccggctccgagaagccgacgaagcaccgcctcccgctgggagccgatgccgacgctgtcgccgaagcctcgaagcgccgccgatcgggcgccaccaagcagcaccaggcggacgaggaagcgtccatcccgccctctctcagcgccaagatcctccgcgaggcgcgcaagcagcaggaagaggagatgcgcgccgactccagcgacgaacagcgaccctcagccgtcgaggcgaccgcggggccgtccacgtcgtcctcgtttcccgtccccgccgccgacggcgagaatgagggggacgacgtcgatgagttcgacgggtttgacgcgctgagcgagtacgatggcggtgaggtggagatcaacgaggaggacgagaaggccctcgctgctttcatgtcaaaggacaaagctgccgagcgcacccttggcgatatcattctccagaagatcagggagaaggacgccgaggtcgcaactggtgaaggacgacctcgtgtaaaattggacaacagcattattgaactttataaagaggttgggaagttcttaagccggtacacgagtgggaaaattccgaaagccttcaagcgcataccatcgatggagtgctgggcagatgttgtgcagctaacggagccagagaattggtctcctaatgccgtgtatcaagcaacacgcctcttctcttcgaacatgaacacaaagaatgctgagcggttctatgaagccattttgctaccccgtgttcgaaatgacataaggaagaacaagaggctgcattttgcactctaccagtcgctgaagaaggccctttataagcccgcggcatttaacaagggaattttgctaccactctgtcgggaaaggaattgcaccctacgcgaagcagtgattattgggagtattatccagaaagtttccattccatttctccatgcaagtgtagctctagtaaaactagcagagatggagtactgtggcactacaagttacttcatcaagctatttctagacaagaaatatgctttgccataccgtgcacttgatgcagtgcttgcccatttcatgcgttttgttgatgatgagaggatcatgcctgttatatggcatcaatcactgcttgcatttgtggaaaggttagtgatggatgtgcagacttcaaagcattttttctttgattcgaaacacgtaatccttttatttgtggcatgctgccaaaaaccttccatgcttcaaatatgaaaggtgctatttgaattccctcttccatcatctgcacgtccttgtattctctggaacaaagtagtcacctcgaatttttcctgttggaagtgtggttatatagtttgaacatgttctttattgtgtgaggcccaagcctcatagttgcagttatgagttcatgactgaattgattgctggtgttcattcaccaagtgtctttgctcactctttcactgctttagtcatgcattttacactaataacttcgtgacagatacaagaacgagttagagaaaaaggataaggagaaacttgcacgtttgttggatcaccagaaacactatttggttactccagaaattcgaagggagcttcgagggagctgcaacaggggtgaaaaagatacaaatttgcatactttgtcacctatctccgtcattaccaagcctatcgaggaagacaaatgggacgtaccacaagtgccaatggaggaagattagccagattctccaacatcgatttttacacttcatttgtttttgaattaaatttctaaagatattgctgtattttattgggcgtgaacttttagtgccaatattggggtaaaataggttcccagtagattgggcccccaatgttctgagggcattttgcagtcggaatgtgattcacacacagaaaagtttgttttgatcatttggagcattccaagggggcattcagcatggacatgtagcatactgtctttcgcagaagtgggtaagaaatggttgatcatgttactttgtagctgcgacaactaaaggtgtaccatacttgaaccagaaatgaaaatgaataacccggagttcgtttggtttttttagggtcttcgttgtttgcataattccctatctagacctcagtagatgttctctggaatggataccagctattttatttttaaaacaaaaaa

SEQ ID NO: 23691 - DNA, 2291 bp, Zea Mays
gtcaaacaaaaaggcccaaaaagccgctccgagcctccgacctcgcatccggcccgattcgactagggttttagcactcccagtcccggctcccgccgtcgcctcgacgcttcccccctcttcctccgccgccaacccagcgagagagctcccagtccgcgaagacatggcggggaagaagcgcaagtccggctccgagaagccgacgaagcaccgcctcccgctgggagccgatgccgacgctgtcgccgaagcctcgaagcgccgccgatcgggcgccaccaagcagcaccaggcggacgaggaagcgtccatcccgccctctctcagcgccaagatcctccgcgaggcgcgcaagcagcaggaagaggagatgcgcgccgactccagcgacgaacagcgaccctcagccgtcgaggcgaccgcggggccgtccacgtcgtcctcgtttcccgtccccgccgccgacggcgagaatgagggggacgacgtcgatgagttcgacgggtttgacgcgctgagcgagtacgatggcggtgaggtggagatcaacgaggaggacgagaaggccctcgctgctttcatgtcaaaggacaaagctgccgagcgcacccttggcgatatcattctccagaagatcagggagaaggacgccgaggtcgcaactggtgaaggacgacctcgtgtaaaattggacaacagcattattgaactttataaagaggttgggaagttcttaagccggtacacgagtgggaaaattccgaaagccttcaagcgcataccatcgatggagtgctgggcagatgttgtgcagctaacggagccagagaattggtctcctaatgccgtgtatcaagcaacacgcctcttctcttcgaacatgaacacaaagaatgctgagcggttctatgaagccattttgctaccccgtgttcgaaatgacataaggaagaacaagaggctgcattttgcactctaccagtcgctgaagaaggccctttataagcccgcggcatttaacaagggaattttgctaccactctgtcgggaaaggaattgcaccctacgcgaagcagtgattattgggagtattatccagaaagtttccattccatttctccatgcaagtgtagctctagtaaaactagcagagatggagtactgtggcactacaaggtgagtaagccacaacctacttctattctctttgcattgtttaatagtactgcatcgttttgtccagagattgttttgctaaaatgcaaccttttcatcagaaactatcagttatctatagtgatttttttgtttaactagccacataatgtgttgacatgcatcttacatctttattacagctgttaaaatgtgtctgatgcagaaagttcacagtagttctagtatactgtattgttcttagtcaccttgagaatgctgtaacctaatctctcttgcagttacttcatcaagctatttctagacaagaaatatgctttgccataccgtgcacttgatgcagtgcttgcccatttcatgcgttttgttgatgatgagaggatcatgcctgttatatggcatcaatcactgcttgcatttgtggaaagatacaagaacgagttagagaaaaaggataaggagaaacttgcacgtttgttggatcaccagaaacactatttggttactccagaaattcgaagggagcttcgagggagctgcaacaggggtgaaaaagatacaaatttgcatactttgtcacctatctccgtcattaccaagcctatcgaggaagacaaatgggacgtaccacaagtgccaatggaggaagattagccagattctccaacatcgatttttacacttcatttgtttttgaattaaatttctaaagatattgctgtattttattgggcgtgaacttttagtgccaatattggggtaaaataggttcccagtagattgggcccccaatgttctgagggcattttgcagtcggaatgtgattcacacacagaaaagtttgttttgatcatttggagcattccaagggggcattcagcatggacatgtagcatactgtctttcgcagaagtgggtaagaaatggttgatcatgttactttgtagctgcgacaactaaaggtgtaccatacttgaaccagaaatgaaaatgaataacccggagttcgtttggtttttttagggtcttcgttgtttgcataattccctatctagacctcagtagatgttctctggaatggataccagctattttatttttaaaacaaaaaa

SEQ ID NO: 23692 - DNA, 2005 bp, Zea Mays
gtcaaacaaaaaggcccaaaaagccgctccgagcctccgacctcgcatccggcccgattcgactagggttttagcactcccagtcccggctcccgccgtcgcctcgacgcttcccccctcttcctccgccgccaacccagcgagagagctcccagtccgcgaagacatggcggggaagaagcgcaagtccggctccgagaagccgacgaagcaccgcctcccgctgggagccgatgccgacgctgtcgccgaagcctcgaagcgccgccgatcgggcgccaccaagcagcaccaggcggacgaggaagcgtccatcccgccctctctcagcgccaagatcctccgcgaggcgcgcaagcagcaggaagaggagatgcgcgccgactccagcgacgaacagcgaccctcagccgtcgaggcgaccgcggggccgtccacgtcgtcctcgtttcccgtccccgccgccgacggcgagaatgagggggacgacgtcgatgagttcgacgggtttgacgcgctgagcgagtacgatggcggtgaggtggagatcaacgaggaggacgagaaggccctcgctgctttcatgtcaaaggacaaagctgccgagcgcacccttggcgatatcattctccagaagatcagggagaaggacgccgaggtcgcaactggtgaaggacgacctcgtgtaaaattggacaacagcattattgaactttataaagaggttgggaagttcttaagccggtacacgagtgggaaaattccgaaagccttcaagcgcataccatcgatggagtgctgggcagatgttgtgcagctaacggagccagagaattggtctcctaatgccgtgtatcaagcaacacgcctcttctcttcgaacatgaacacaaagaatgctgagcggttctatgaagccattttgctaccccgtgttcgaaatgacataaggaagaacaagaggctgcattttgcactctaccagtcgctgaagaaggccctttataagcccgcggcatttaacaagggaattttgctaccactctgtcgggaaaggaattgcaccctacgcgaagcagtgattattgggagtattatccagaaagtttccattccatttctccatgcaagctctagtaaaactagcagagatggagtactgtggcactacaagttacttcatcaagctatttctagacaagaaatatgctttgccataccgtgcacttgatgcagtgcttgcccatttcatgcgttttgttgatgatgagaggatcatgcctgttatatggcatcaatcactgcttgcatttgtggaaagatacaagaacgagttagagaaaaaggataaggagaaacttgcacgtttgttggatcaccagaaacactatttggttactccagaaattcgaagggagcttcgagggagctgcaacaggggtgaaaaagatacaaatttgcatactttgtcacctatctccgtcattaccaagcctatcgaggaagacaaatgggacgtaccacaagtgccaatggaggaagattagccagattctccaacatcgatttttacacttcatttgtttttgaattaaatttctaaagatattgctgtattttattgggcgtgaacttttagtgccaatattggggtaaaataggttcccagtagattgggcccccaatgttctgagggcattttgcagtcggaatgtgattcacacacagaaaagtttgttttgatcatttggagcattccaagggggcattcagcatggacatgtagcatactgtctttcgcagaagtgggtaagaaatggttgatcatgttactttgtagctgcgacaactaaaggtgtaccatacttgaaccagaaatgaaaatgaataacccggagttcgtttggtttttttagggtcttcgttgtttgcataattccctatctagacctcagtagatgttctctggaatggataccagctattttatttttaaaacaaaaaa

SEQ ID NO: 23693 - DNA, 3110 bp, Zea Mays
acttttgcccttcgaactaaaagcgcctgcatctcaaacccgacggcgctctcttctctatcctctgtgtcccctccaccaaaaccgacgacgacgtcgctctcctccaccggtgctcggcgctctccctccaccagcggtggtccacagacgctcggcgagctccaccggcgggcgctggcggctggtcagatccgctcggcagtcatccatctggcacatcgggtagctcgcgcctccgttggcagtcccaccgccgcccggccctcccccagcgcccccggtgatccggaccgcacccgcttactcggcctaacgaccggctcctgccccgacgcagccgaagctcccagcgtcctcctgcaggccgagctgaaggttcagcgcgccggtggagttagacgacgaaactccgtcacgtcatacctctccgcctcccgtcttccagacgtctctaatcggggtcccagcgtctcggagaagaggagcagcacggcacggcagctgtggcgaggaaggctcctgtcccatcccaacccagttagcagccgcccaaggaggaggagatccaatcggcgtgcgggcgtccgcggtccatccatcgatccaattccaatctgcaggcatctcgagtgcaccgtcggccgcaccagcaggcagcatcccgacaccgccgttccccagcagacagcagcaggtcgccgtcgttccccagcaggcagcaacaggtcgccagcgctagtcctcgacggacgacgaccagcatcagccgccgccccagtcgaccagcatccacggcggcacgagcccacgaccagcagatcaacgcggtggcagatcaacgagcccacgactagtcagaaaatttttacagcagcatatccaccggatacccgatacccgacgggtacccggtgggcacgggtatgggtccatttttttacccgattggcttggtgcgtatggatatttgtaaagggtcgagtatgatatcgggtcgggtattatacccgaacacaacccgacccgctgccatccctaaacgcagctattctgtcaattccttaaatagagcagcactgagcatatccggcggagaatttagttcagtgccggtttccatttcacttcatatctgggcttaatcttgtgtcagcttacctacacattgcaattgttgtcacatagcttatgaatgaagcacggaaatgatcgagttatattagaactatctacaccgacgtattgtgttgaatttaagatgccatcgatgccttttaaatgtgtatagtgctttcgacagccttgtgtttgcatgccgaatttcttacaagtatcatacatgtataccgaactgtgaatttaggttatactcaaactgcacacagtagcatccttctggtacaggtacacccttccctcccggctgtgcgaagcaactccaccctaatttattttgcagaaaaagttatcggtccgcccttggttactgaaactggtcaggtgtatgtaattttgaagtaacaaaggatttggaacccagccctctgttctccaccaccgcttcgaagatgccgcaggtaatggtggtggcacggaacttcatggatatggtggctgctcttcctgcgggcaagcttgatatgctctatgactcagcctttatctgtgaggcagtactcaggtcacttcccccactggcaaagaagtatgcactgcagatgttgtatgtgctggcaccagtgaccgctgcagcaatggaagagtgggtgcttgatgaatatgctgccaagcataaggttgccattgataagcttctacagctcagggtctttgttgaagtgcgcgacagacgacgggacgtgagctacaagatgaatcagaagttccagggaaacatgcagaagtatttggttgatggtggaagtttaccaagggaacctttaccattaagtgtcactggtcgattgcccacaccagcagatctggaagcctatgctcttgatcaatgggagtgcttcttgttgcaattgatcaattcatctcaagtcgaaaaagggtcaagttttagctcctccatgatgaagacgtttcagcgtggtcttctgagttcaagggatggtgaagcttcaaagttgactgaaaatggcttccaatttcttctgatggaaacaaatgcacaactttggtacataatgagagaatacatttcatctgctgaggaacgtggagtggaccctacggagctgatatcatttctcttggaacttagctttcataaattgggagcggcttatagcttgaacactctgactgatgtccagaggattgccatcagggatcttgcagaattaggactagtcaaacagcagcagggtcgaaaggatagctggttcattcctacccaattggctactaatctttcagcaagcttgtcagattcgtcatctaacaaagagggatttgtggttgtggagacaaactttcgaatgtatgcatactctacttccaagttgcactgtgaaattctacgcctttttgcaagggtggagtatcaacttccaaacctcatcgtaggagctgttacaaaagaaagtatctatggtgcttttgaaaatgggataactgctgagcagataatttcatttcttaggcaaaatgctcaccctcgtgttgctgacaagatacccgctgtcccggagaatgtcacagatcagattaggttgtgggaaactgacctcaacagggttgagatgattccatcgcatttgtacgaagattttcctagcaaggaatggtttgaacaatgctgtgattatgcaagggataatgggtacttgctgtgggaggaccccaagagaatgagactaattgtacgaggggagttccaccccgaaatgagggagttccttcgcaggcaaagatgaggaacgaccttgtacttgacggaccatgctatgcttctttgtagtgcatagaaacactgtatcgggcaatgaaagacaactgatctagaagcagcagcttgcgtcttcttgggcgaaagcaaaaataaacagcaacatggttccagcttccatctgctgcagtccaacaagcataaataaaac

SEQ ID NO: 23694 - DNA, 1869 bp, Zea Mays
cgcccagccgcccagggcctaggccaccgtcagcgccgcccgcctccatctccgccccgagcggctgcgccccgcccgccgcccgcccgcagtccaccaggcgtcgagccccgccccggctcgcgcgcgtcgagcctctgtccggccccggctgcaacccactcactcagccagacctggcttctctgcagactgcaggttctcagtttctcttataacaggttatactcaaactgcacacagtagcatccttctggtacaggtgtatgtaattttgaagtaacaaaggatttggaacccagccctctgttctccaccaccgcttcgaagatgccgcaggtaatggtggtggcacggaacttcatggatatggtggctgctcttcctgcgggcaagcttgatatgctctatgactcagcctttatctgtgaggcagtactcaggtcacttcccccactggcaaagaagtatgcactgcagatgttgtatgtgctggcaccagtgaccgctgcagcaatggaagagtgggtgcttgatgaatatgctgccaagcataaggttgccattgataagcttctacagctcagggtctttgttgaagtgcgcgacagacgacgggacgtgagctacaagatgaatcagaagttccagggaaacatgcagaagtatttggttgatggtggaagtttaccaagggaacctttaccattaagtgtcactggtcgattgcccacaccagcagatctggaagcctatgctcttgatcaatgggagtgcttcttgttgcaattgatcaattcatctcaagtcgaaaaagggtcaagttttagctcctccatgatgaagacgtttcagcgtggtcttctgagttcaagggatggtgaagcttcaaagttgactgaaaatggcttccaatttcttctgatggaaacaaatgcacaactttggtacataatgagagaatacatttcatctgctgaggaacgtggagtggaccctacggagctgatatcatttctcttggaacttagctttcataaattgggagcggcttatagcttgaacactctgactgatgtccagaggattgccatcagggatcttgcagaattaggactagtcaaacagcagcagggtcgaaaggatagctggttcattcctacccaattggctactaatctttcagcaagcttgtcagattcgtcatctaacaaagagggatttgtggttgtggagacaaactttcgaatgtatgcatactctacttccaagttgcactgtgaaattctacgcctttttgcaagggtggagtatcaacttccaaacctcatcgtaggagctgttacaaaagaaagtatctatggtgcttttgaaaatgggataactgctgagcagataatttcatttcttaggcaaaatgctcaccctcgtgttgctgacaagatacccgctgtcccggagaatgtcacagatcagattaggttgtgggaaactgacctcaacagggttgagatgattccatcgcatttgtacgaagattttcctagcaaggaatggtttgaacaatgctgtgattatgcaagggataatgggtacttgctgtgggaggaccccaagagaatgagactaattgtacgaggggagttccaccccgaaatgagggagttccttcgcaggcaaagatgaggaacgaccttgtacttgacggaccatgctatgcttctttgtagtgcatagaaacactgtatcgggcaatgaaagacaactgatctagaagcagcagcttgcgtcttcttgggcgaaagcaaaaataaacagcaacatggttccagcttccatctgctgcagtccaacaagcataaataaaac

SEQ ID NO: 23695 - DNA, 2286 bp, Zea Mays
acttttgcccttcgaactaaaagcgcctgcatctcaaacccgacggcgctctcttctctatcctctgtgtcccctccaccaaaaccgacgacgacgtcgctctcctccaccggtgctcggcgctctccctccaccagcggtggtccacagacgctcggcgagctccaccggcgggcgctggcggctggtcagatccgctcggcagtcatccatctggcacatcggccgaagctcccagcgtcctcctgcaggccgagctgaaggttcagcgcgccggtggagttagacgacgaaactccgtcacgtcatacctctccgcctcccgtcttccagacgtctctaatcggggtcccagcgtctcggagaagaggagcagcacggcacggcagctgtggcgaggaaggctcctgtcccatcccaacccagttagcagccgcccaaggaggaggagatccaatcggcgtgcgggcgtccgcggtccatccatcgatccaattccaatctgcagtaacaaaggatttggaacccagccctctgttctccaccaccgcttcgaagatgccgcaggtaatggtggtggcacggaacttcatggatatggtggctgctcttcctgcgggcaagcttgatatgctctatgactcagcctttatctgtgaggcagtactcaggtcacttcccccactggcaaagaagtatgcactgcagatgttgtatgtgctggcaccagtgaccgctgcagcaatggaagagtgggtgcttgatgaatatgctgccaagcataaggttgccattgataagcttctacagctcagggtctttgttgaagtgcgcgacagacgacgggacgtgagctacaagatgaatcagaagttccagggaaacatgcagaagtatttggttgatggtggaagtttaccaagggaacctttaccattaagtgtcactggtcgattgcccacaccagcagatctggaagcctatgctcttgatcaatgggagtgcttcttgttgcaattgatcaattcatctcaagtcgaaaaagggtcaagttttagctcctccatgatgaagacgtttcagcgtggtcttctgagttcaagggatggtgaagcttcaaagttgactgaaaatggcttccaatttcttctgatggaaacaaatgcacaactttggtacataatgagagaatacatttcatctgctgaggaacgtggagtggaccctacggagctgatatcatttctcttggaacttagctttcataaattgggagcggcttatagcttgaacactctgactgatgtccagaggattgccatcagggatcttgcagaattaggactagtcaaacagcagcagggtcgaaaggatagctggttcattcctacccaattggctactaatctttcagcaagcttgtcagattcgtcatctaacaaagagggatttgtggttgtggagacaaactttcgaatgtatgcatactctacttccaagttgcactgtgaaattctacgcctttttgcaagggtggagtatcaacttccaaacctcatcgtaggagctgttacaaaagaaagtatctatggtgcttttgaaaatgggataactgctgagcagataatttcatttcttaggcaaaatgctcaccctcgtgttgctgacaagatacccgctgtcccggagaatgtcacagatcaggttgtgggaaactgacctcaacagggttgagatgattccatcgcatttgtacgaagattttcctagcaaggaatggtttgaacaatgctgtgattatgcaagggataatgggtacttgctgtgggaggaccccaagagaatgagactaattgtacgaggggagttccaccccgaaatgagggagttccttcgcaggcaaagatgaggaacgaccttgtacttgacggaccatgctatgcttctttgtagtgcatagaaacactgtatcgggtaatagttctcctttaaatatcaggaaagggtctagaaaagggctcagtttttgaattattttggtgacctgtgagctgtggaagcatatgaataatgtggtgttcaatggagcaaggcccaacatccttgatctgcttctaaatgttactagtgactgtaccctatgctggtgtatggctggtggccaggtcctgttggaactcttaggtaggtagtatggtgggatggagttggtatgctcttaatttgttgttatttggattgattctatataggacggagtgattttaaaaatgaaaaaaactcaaa

SEQ ID NO: 23696 - DNA, 2203 bp, Zea Mays
acttttgcccttcgaactaaaagcgcctgcatctcaaacccgacggcgctctcttctctatcctctgtgtcccctccaccaaaaccgacgacgacgtcgctctcctccaccggtgctcggcgctctccctccaccagcggtggtccacagacgctcggcgagctccaccggcgggcgctggcggctggtcagatccgctcggcagtcatccatctggcacatcggccgaagctcccagcgtcctcctgcaggccgagctgaaggttcagcgcgccggtggagttagacgacgaaactccgtcacgtcatacctctccgcctcccgtcttccagacgtctctaatcggggtcccagcgtctcggagaagaggagcagcacggcacggcagctgtggcgaggaaggctcctgtcccatcccaacccagttagcagccgcccaaggaggaggagatccaatcggcgtgcgggcgtccgcggtccatccatcgatccaattccaatctgcaggtgtatgtaattttgaagtaacaaaggatttggaacccagccctctgttctccaccaccgcttcgaagatgccgcaggtaatggtggtggcacggaacttcatggatatggtggctgctcttcctgcgggcaagcttgatatgctctatgactcagcctttatctgtgaggcagtactcaggtcacttcccccactggcaaagaagtatgcactgcagatgttgtatgtgctggcaccagtgaccgctgcagcaatggaagagtgggtgcttgatgaatatgctgccaagcataaggttgccattgataagcttctacagctcagggtctttgttgaagtgcgcgacagacgacgggacgtgagctacaagatgaatcagaagttccagggaaacatgcagaagtatttggttgatggtggaagtttaccaagggaacctttaccattaagtgtcactggtcgattgcccacaccagcagatctggaagcctatgctcttgatcaatgggagggatggtgaagcttcaaagttgactgaaaatggcttccaatttcttctgatggaaacaaatgcacaactttggtacataatgagagaatacatttcatctgctgaggaacgtggagtggaccctacggagctgatatcatttctcttggaacttagctttcataaattgggagcggcttatagcttgaacactctgactgatgtccagaggattgccatcagggatcttgcagaattaggactagtcaaacagcagcagggtcgaaaggatagctggttcattcctacccaattggctactaatctttcagcaagcttgtcagattcgtcatctaacaaagagggatttgtggttgtggagacaaactttcgaatgtatgcatactctacttccaagttgcactgtgaaattctacgcctttttgcaagggtggagtatcaacttccaaacctcatcgtaggagctgttacaaaagaaagtatctatggtgcttttgaaaatgggataactgctgagcagataatttcatttcttaggcaaaatgctcaccctcgtgttgctgacaagatacccgctgtcccggagaatgtcacagatcaggttgtgggaaactgacctcaacagggttgagatgattccatcgcatttgtacgaagattttcctagcaaggaatggtttgaacaatgctgtgattatgcaagggataatgggtacttgctgtgggaggaccccaagagaatgagactaattgtacgaggggagttccaccccgaaatgagggagttccttcgcaggcaaagatgaggaacgaccttgtacttgacggaccatgctatgcttctttgtagtgcatagaaacactgtatcgggtaatagttctcctttaaatatcaggaaagggtctagaaaagggctcagtttttgaattattttggtgacctgtgagctgtggaagcatatgaataatgtggtgttcaatggagcaaggcccaacatccttgatctgcttctaaatgttactagtgactgtaccctatgctggtgtatggctggtggccaggtcctgttggaactcttaggtaggtagtatggtgggatggagttggtatgctcttaatttgttgttatttggattgattctatataggacggagtgattttaaaaatgaaaaaaactcaaa

SEQ ID NO: 23697 - DNA, 2610 bp, Zea Mays
acttttgcccttcgaactaaaagcgcctgcatctcaaacccgacggcgctctcttctctatcctctgtgtcccctccaccaaaaccgacgacgacgtcgctctcctccaccggtgctcggcgctctccctccaccagcggtggtccacagacgctcggcgagctccaccggcgggcgctggcggctggtcagatccgctcggcagtcatccatctggcacatcggccgaagctcccagcgtcctcctgcaggccgagctgaaggttcagcgcgccggtggagttagacgacgaaactccgtcacgtcatacctctccgcctcccgtcttccagacgtctctaatcggggtcccagcgtctcggagaagaggagcagcacggcacggcagctgtggcgaggaaggctcctgtcccatcccaacccagttagcagccgcccaaggaggaggagatccaatcggcgtgcgggcgtccgcggtccatccatcgatccaattccaatctgcaggcatctcgagtgcaccgtcggccgcaccagcaggcagcatcccgacaccgccgttccccagcagacagcagcaggtcgccgtcgttccccagcaggcagcaacaggtcgccagcgctagtcctcgacggacgacgaccagcatcagccgccgccccagtcgaccagcatccacggcggcacgagcccacgaccagcagatcaacgcggtggcagatcaacgagcccacgactagtcagaaaatttttacagcagcatatccaccggatacccgatacccgacgggtacccggtgggcacgggtgtatgtaattttgaagtaacaaaggatttggaacccagccctctgttctccaccaccgcttcgaagatgccgcaggtaatggtggtggcacggaacttcatggatatggtggctgctcttcctgcgggcaagcttgatatgctctatgactcagcctttatctgtgaggcagtactcaggtcacttcccccactggcaaagaagtatgcactgcagatgttgtatgtgctggcaccagtgaccgctgcagcaatggaagagtgggtgcttgatgaatatgctgccaagcataaggttgccattgataagcttctacagctcagggtctttgttgaagtgcgcgacagacgacgggacgtgagctacaagatgaatcagaagttccagggaaacatgcagaagtatttggttgatggtggaagtttaccaagggaacctttaccattaagtgtcactggtcgattgcccacaccagcagatctggaagcctatgctcttgatcaatgggagtgcttcttgttgcaattgatcaattcatctcaagtcgaaaaagggtcaagttttagctcctccatgatgaagacgtttcagcgtggtcttctgagttcaagggatggtgaagcttcaaagttgactgaaaatggcttccaatttcttctgatggaaacaaatgcacaactttggtacataatgagagaatacatttcatctgctgaggaacgtggagtggaccctacggagctgatatcatttctcttggaacttagctttcataaattgggagcggcttatagcttgaacactctgactgatgtccagaggattgccatcagggatcttgcagaattaggactagtcaaacagcagcagggtcgaaaggatagctggttcattcctacccaattggctactaatctttcagcaagcttgtcagattcgtcatctaacaaagagggatttgtggttgtggagacaaactttcgaatgtatgcatactctacttccaagttgcactgtgaaattctacgcctttttgcaagggtggagtatcaacttccaaacctcatcgtaggagctgttacaaaagaaagtatctatggtgcttttgaaaatgggataactgctgagcagataatttcatttcttaggcaaaatgctcaccctcgtgttgctgacaagatacccgctgtcccggagaatgtcacagatcagattaggttgtgggaaactgacctcaacagggttgagatgattccatcgcatttgtacgaagattttcctagcaaggaatggtttgaacaatgctgtgattatgcaagggataatgggtacttgctgtgggaggaccccaagagaatgagactaattgtacgaggggagttccaccccgaaatgagggagttccttcgcaggcaaagatgaggaacgaccttgtacttgacggaccatgctatgcttctttgtagtgcatagaaacactgtatcgggtaatagttctcctttaaatatcaggaaagggtctagaaaagggctcagtttttgaattattttggtgacctgtgagctgtggaagcatatgaataatgtggtgttcaatggagcaaggcccaacatccttgatctgcttctaaatgttactagtgactgtaccctatgctggtgtatggctggtggccaggtcctgttggaactcttaggtaggtagtatggtgggatggagttggtatgctcttaatttgttgttatttggattgattctatataggacggagtgattttaaaaatgaaaaaaactcaaa

SEQ ID NO: 23698 - DNA, 3093 bp, Zea Mays
acttttgcccttcgaactaaaagcgcctgcatctcaaacccgacggcgctctcttctctatcctctgtgtcccctccaccaaaaccgacgacgacgtcgctctcctccaccggtgctcggcgctctccctccaccagcggtggtccacagacgctcggcgagctccaccggcgggcgctggcggctggtcagatccgctcggcagtcatccatctggcacatcggccgaagctcccagcgtcctcctgcaggccgagctgaaggttcagcgcgccggtggagttagacgacgaaactccgtcacgtcatacctctccgcctcccgtcttccagacgtctctaatcggggtcccagcgtctcggagaagaggagcagcacggcacggcagctgtggcgaggaaggctcctgtcccatcccaacccagttagcagccgcccaaggaggaggagatccaatcggcgtgcgggcgtccgcggtccatccatcgatccaattccaatctgcaggcatctcgagtgcaccgtcggccgcaccagcaggcagcatcccgacaccgccgttccccagcagacagcagcaggtcgccgtcgttccccagcaggcagcaacaggtcgccagcgctagtcctcgacggacgacgaccagcatcagccgccgccccagtcgaccagcatccacggcggcacgagcccacgaccagcagatcaacgcggtggcagatcaacgagcccacgactagtcagaaaatttttacagcagcatatccaccggatacccgatacccgacgggtacccggtgggcacgggtatgggtccatttttttacccgattggcttggtgcgtatggatatttgtaaagggtcgagtatgatatcgggtcgggtattatacccgaacacaacccgacccgctgccatccctaaacgcagctattctgtcaattccttaaatagagcagcactgagcatatccggcggagaatttagttcagtgccggtttccatttcacttcatatctgggcttaatcttgtgtcagcttacctacacattgcaattgttgtcacatagcttatgaatgaagcacggaaatgatcgagttatattagaactatctacaccgacgtattgtgttgaatttaagatgccatcgatgccttttaaatgtgtatagtgctttcgacagccttgtgtttgcatgccgaatttcttacaagtatcatacatgtataccgaactgtgaatttaggttatactcaaactgcacacagtagcatccttctggtacaggtgtatgtaattttgaagtaacaaaggatttggaacccagccctctgttctccaccaccgcttcgaagatgccgcaggtaatggtggtggcacggaacttcatggatatggtggctgctcttcctgcgggcaagcttgatatgctctatgactcagcctttatctgtgaggcagtactcaggtcacttcccccactggcaaagaagtatgcactgcagatgttgtatgtgctggcaccagtgaccgctgcagcaatggaagagtgggtgcttgatgaatatgctgccaagcataaggttgccattgataagcttctacagctcagggtctttgttgaagtgcgcgacagacgacgggacgtgagctacaagatgaatcagaagttccagggaaacatgcagaagtatttggttgatggtggaagtttaccaagggaacctttaccattaagtgtcactggtcgattgcccacaccagcagatctggaagcctatgctcttgatcaatgggagtgcttcttgttgcaattgatcaattcatctcaagtcgaaaaagggtcaagttttagctcctccatgatgaagacgtttcagcgtggtcttctgagttcaagggatggtgaagcttcaaagttgactgaaaatggcttccaatttcttctgatggaaacaaatgcacaactttggtacataatgagagaatacatttcatctgctgaggaacgtggagtggaccctacggagctgatatcatttctcttggaacttagctttcataaattgggagcggcttatagcttgaacactctgactgatgtccagaggattgccatcagggatcttgcagaattaggactagtcaaacagcagcagggtcgaaaggatagctggttcattcctacccaattggctactaatctttcagcaagcttgtcagattcgtcatctaacaaagagggatttgtggttgtggagacaaactttcgaatgtatgcatactctacttccaagttgcactgtgaaattctacgcctttttgcaagggtggagtatcaacttccaaacctcatcgtaggagctgttacaaaagaaagtatctatggtgcttttgaaaatgggataactgctgagcagataatttcatttcttaggcaaaatgctcaccctcgtgttgctgacaagatacccgctgtcccggagaatgtcacagatcagattaggttgtgggaaactgacctcaacagggttgagatgattccatcgcatttgtacgaagattttcctagcaaggaatggtttgaacaatgctgtgattatgcaagggataatgggtacttgctgtgggaggaccccaagagaatgagactaattgtacgaggggagttccaccccgaaatgagggagttccttcgcaggcaaagatgaggaacgaccttgtacttgacggaccatgctatgcttctttgtagtgcatagaaacactgtatcgggtaatagttctcctttaaatatcaggaaagggtctagaaaagggctcagtttttgaattattttggtgacctgtgagctgtggaagcatatgaataatgtggtgttcaatggagcaaggcccaacatccttgatctgcttctaaatgttactagtgactgtaccctatgctggtgtatggctggtggccaggtcctgttggaactcttaggtaggtagtatggtgggatggagttggtatgctcttaatttgttgttatttggattgattctatataggacggagtgattttaaaaatgaaaaaaactcaaa

SEQ ID NO: 23699 - DNA, 2757 bp, Zea Mays
acttttgcccttcgaactaaaagcgcctgcatctcaaacccgacggcgctctcttctctatcctctgtgtcccctccaccaaaaccgacgacgacgtcgctctcctccaccggtgctcggcgctctccctccaccagcggtggtccacagacgctcggcgagctccaccggcgggcgctggcggctggtcagatccgctcggcagtcatccatctggcacatcggccgaagctcccagcgtcctcctgcaggccgagctgaaggttcagcgcgccggtggagttagacgacgaaactccgtcacgtcatacctctccgcctcccgtcttccagacgtctctaatcggggtcccagcgtctcggagaagaggagcagcacggcacggcagctgtggcgaggaaggctcctgtcccatcccaacccagttagcagccgcccaaggaggaggagatccaatcggcgtgcgggcgtccgcggtccatccatcgatccaattccaatctgcaggcatctcgagtgcaccgtcggccgcaccagcaggcagcatcccgacaccgccgttccccagcagacagcagcaggtcgccgtcgttccccagcaggcagcaacaggtcgccagctcgcccccgcgtttgcttccggtcagctgatgtcgcatgcttttcggcagcgctagtcctcgacggacgacgaccagcatcagccgccgccccagtcgaccagcatccacggcggcacgagcccacgaccagcagatcaacgcggtggcagatcaacgagcccacgactagtcagaaaatttttacagcagcatatccaccggatacccgatacccgacgggtacccggtgggcacgggtacacccttccctcccggctgtgcgaagcaactccaccctaatttattttgcagaaaaagttatcggtccgcccttggttactgaaactggtcaggtgtatgtaattttgaagtaacaaaggatttggaacccagccctctgttctccaccaccgcttcgaagatgccgcaggtaatggtggtggcacggaacttcatggatatggtggctgctcttcctgcgggcaagcttgatatgctctatgactcagcctttatctgtgaggcagtactcaggtcacttcccccactggcaaagaagtatgcactgcagatgttgtatgtgctggcaccagtgaccgctgcagcaatggaagagtgggtgcttgatgaatatgctgccaagcataaggttgccattgataagcttctacagctcagggtctttgttgaagtgcgcgacagacgacgggacgtgagctacaagatgaatcagaagttccagggaaacatgcagaagtatttggttgatggtggaagtttaccaagggaacctttaccattaagtgtcactggtcgattgcccacaccagcagatctggaagcctatgctcttgatcaatgggagtgcttcttgttgcaattgatcaattcatctcaagtcgaaaaagggtcaagttttagctcctccatgatgaagacgtttcagcgtggtcttctgagttcaagggatggtgaagcttcaaagttgactgaaaatggcttccaatttcttctgatggaaacaaatgcacaactttggtacataatgagagaatacatttcatctgctgaggaacgtggagtggaccctacggagctgatatcatttctcttggaacttagctttcataaattgggagcggcttatagcttgaacactctgactgatgtccagaggattgccatcagggatcttgcagaattaggactagtcaaacagcagcagggtcgaaaggatagctggttcattcctacccaattggctactaatctttcagcaagcttgtcagattcgtcatctaacaaagagggatttgtggttgtggagacaaactttcgaatgtatgcatactctacttccaagttgcactgtgaaattctacgcctttttgcaagggtggagtatcaacttccaaacctcatcgtaggagctgttacaaaagaaagtatctatggtgcttttgaaaatgggataactgctgagcagataatttcatttcttaggcaaaatgctcaccctcgtgttgctgacaagatacccgctgtcccggagaatgtcacagatcagattaggttgtgggaaactgacctcaacagggttgagatgattccatcgcatttgtacgaagattttcctagcaaggaatggtttgaacaatgctgtgattatgcaagggataatgggtacttgctgtgggaggaccccaagagaatgagactaattgtacgaggggagttccaccccgaaatgagggagttccttcgcaggcaaagatgaggaacgaccttgtacttgacggaccatgctatgcttctttgtagtgcatagaaacactgtatcgggtaatagttctcctttaaatatcaggaaagggtctagaaaagggctcagtttttgaattattttggtgacctgtgagctgtggaagcatatgaataatgtggtgttcaatggagcaaggcccaacatccttgatctgcttctaaatgttactagtgactgtaccctatgctggtgtatggctggtggccaggtcctgttggaactcttaggtaggtagtatggtgggatggagttggtatgctcttaatttgttgttatttggattgattctatataggacggagtgattttaaaaatgaaaaaaactcaaa

SEQ ID NO: 23700 - DNA, 2400 bp, Zea Mays
acttttgcccttcgaactaaaagcgcctgcatctcaaacccgacggcgctctcttctctatcctctgtgtcccctccaccaaaaccgacgacgacgtcgctctcctccaccggtgctcggcgctctccctccaccagcggtggtccacagacgctcggcgagctccaccggcgggcgctggcggctggtcagatccgctcggcagtcatccatctggcacatcggccgaagctcccagcgtcctcctgcaggccgagctgaaggttcagcgcgccggtggagttagacgacgaaactccgtcacgtcatacctctccgcctcccgtcttccagacgtctctaatcggggtcccagcgtctcggagaagaggagcagcacggcacggcagctgtggcgaggaaggctcctgtcccatcccaacccagttagcagccgcccaaggaggaggagatccaatcggcgtgcgggcgtccgcggtccatccatcgatccaattccaatctgcaggtacacccttccctcccggctgtgcgaagcaactccaccctaatttattttgcagaaaaagttatcggtccgcccttggttactgaaactggtcaggtgtatgtaattttgaagtaacaaaggatttggaacccagccctctgttctccaccaccgcttcgaagatgccgcaggtaatggtggtggcacggaacttcatggatatggtggctgctcttcctgcgggcaagcttgatatgctctatgactcagcctttatctgtgaggcagtactcaggtcacttcccccactggcaaagaagtatgcactgcagatgttgtatgtgctggcaccagtgaccgctgcagcaatggaagagtgggtgcttgatgaatatgctgccaagcataaggttgccattgataagcttctacagctcagggtctttgttgaagtgcgcgacagacgacgggacgtgagctacaagatgaatcagaagttccagggaaacatgcagaagtatttggttgatggtggaagtttaccaagggaacctttaccattaagtgtcactggtcgattgcccacaccagcagatctggaagcctatgctcttgatcaatgggagtgcttcttgttgcaattgatcaattcatctcaagtcgaaaaagggtcaagttttagctcctccatgatgaagacgtttcagcgtggtcttctgagttcaagggatggtgaagcttcaaagttgactgaaaatggcttccaatttcttctgatggaaacaaatgcacaactttggtacataatgagagaatacatttcatctgctgaggaacgtggagtggaccctacggagctgatatcatttctcttggaacttagctttcataaattgggagcggcttatagcttgaacactctgactgatgtccagaggattgccatcagggatcttgcagaattaggactagtcaaacagcagcagggtcgaaaggatagctggttcattcctacccaattggctactaatctttcagcaagcttgtcagattcgtcatctaacaaagagggatttgtggttgtggagacaaactttcgaatgtatgcatactctacttccaagttgcactgtgaaattctacgcctttttgcaagggtggagtatcaacttccaaacctcatcgtaggagctgttacaaaagaaagtatctatggtgcttttgaaaatgggataactgctgagcagataatttcatttcttaggcaaaatgctcaccctcgtgttgctgacaagatacccgctgtcccggagaatgtcacagatcaggttgtgggaaactgacctcaacagggttgagatgattccatcgcatttgtacgaagattttcctagcaaggaatggtttgaacaatgctgtgattatgcaagggataatgggtacttgctgtgggaggaccccaagagaatgagactaattgtacgaggggagttccaccccgaaatgagggagttccttcgcaggcaaagatgaggaacgaccttgtacttgacggaccatgctatgcttctttgtagtgcatagaaacactgtatcgggtaatagttctcctttaaatatcaggaaagggtctagaaaagggctcagtttttgaattattttggtgacctgtgagctgtggaagcatatgaataatgtggtgttcaatggagcaaggcccaacatccttgatctgcttctaaatgttactagtgactgtaccctatgctggtgtatggctggtggccaggtcctgttggaactcttaggtaggtagtatggtgggatggagttggtatgctcttaatttgttgttatttggattgattctatataggacggagtgattttaaaaatgaaaaaaactcaaa

SEQ ID NO: 23701 - DNA, 2350 bp, Zea Mays
acttttgcccttcgaactaaaagcgcctgcatctcaaacccgacggcgctctcttctctatcctctgtgtcccctccaccaaaaccgacgacgacgtcgctctcctccaccggtgctcggcgctctccctccaccagcggtggtccacagacgctcggcgagctccaccggcgggcgctggcggctggtcagatccgctcggcagtcatccatctggcacatcggccgaagctcccagcgtcctcctgcaggccgagctgaaggttcagcgcgccggtggagttagacgacgaaactccgtcacgtcatacctctccgcctcccgtcttccagacgtctctaatcggggtcccagcgtctcggagaagaggagcagcacggcacggcagctgtggcgaggaaggctcctgtcccatcccaacccagttagcagccgcccaaggaggaggagatccaatcggcgtgcgggcgtccgcggtccatccatcgatccaattccaatctgcaggttatactcaaactgcacacagtagcatccttctggtacaggtgtatgtaattttgaagtaacaaaggatttggaacccagccctctgttctccaccaccgcttcgaagatgccgcaggtaatggtggtggcacggaacttcatggatatggtggctgctcttcctgcgggcaagcttgatatgctctatgactcagcctttatctgtgaggcagtactcaggtcacttcccccactggcaaagaagtatgcactgcagatgttgtatgtgctggcaccagtgaccgctgcagcaatggaagagtgggtgcttgatgaatatgctgccaagcataaggttgccattgataagcttctacagctcagggtctttgttgaagtgcgcgacagacgacgggacgtgagctacaagatgaatcagaagttccagggaaacatgcagaagtatttggttgatggtggaagtttaccaagggaacctttaccattaagtgtcactggtcgattgcccacaccagcagatctggaagcctatgctcttgatcaatgggagtgcttcttgttgcaattgatcaattcatctcaagtcgaaaaagggtcaagttttagctcctccatgatgaagacgtttcagcgtggtcttctgagttcaagggatggtgaagcttcaaagttgactgaaaatggcttccaatttcttctgatggaaacaaatgcacaactttggtacataatgagagaatacatttcatctgctgaggaacgtggagtggaccctacggagctgatatcatttctcttggaacttagctttcataaattgggagcggcttatagcttgaacactctgactgatgtccagaggattgccatcagggatcttgcagaattaggactagtcaaacagcagcagggtcgaaaggatagctggttcattcctacccaattggctactaatctttcagcaagcttgtcagattcgtcatctaacaaagagggatttgtggttgtggagacaaactttcgaatgtatgcatactctacttccaagttgcactgtgaaattctacgcctttttgcaagggtggagtatcaacttccaaacctcatcgtaggagctgttacaaaagaaagtatctatggtgcttttgaaaatgggataactgctgagcagataatttcatttcttaggcaaaatgctcaccctcgtgttgctgacaagatacccgctgtcccggagaatgtcacagatcagattaggttgtgggaaactgacctcaacagggttgagatgattccatcgcatttgtacgaagattttcctagcaaggaatggtttgaacaatgctgtgattatgcaagggataatgggtacttgctgtgggaggaccccaagagaatgagactaattgtacgaggggagttccaccccgaaatgagggagttccttcgcaggcaaagatgaggaacgaccttgtacttgacggaccatgctatgcttctttgtagtgcatagaaacactgtatcgggtaatagttctcctttaaatatcaggaaagggtctagaaaagggctcagtttttgaattattttggtgacctgtgagctgtggaagcatatgaataatgtggtgttcaatggagcaaggcccaacatccttgatctgcttctaaatgttactagtgactgtaccctatgctggtgtatggctggtggccaggtcctgttggaactcttaggtaggtagtatggtgggatggagttggtatgctcttaatttgttgttatttggattgattctatataggacggagtgattttaaaaatgaaaaaaactcaaa

SEQ ID NO: 23702 - DNA, 3075 bp, Zea Mays
acttttgcccttcgaactaaaagcgcctgcatctcaaacccgacggcgctctcttctctatcctctgtgtcccctccaccaaaaccgacgacgacgtcgctctcctccaccggtgctcggcgctctccctccaccagcggtggtccacagacgctcggcgagctccaccggcgggcgctggcggctggtcagatccgctcggcagtcatccatctggcacatcggccgaagctcccagcgtcctcctgcaggccgagctgaaggttcagcgcgccggtggagttagacgacgaaactccgtcacgtcatacctctccgcctcccgtcttccagacgtctctaatcggggtcccagcgtctcggagaagaggagcagcacggcacggcagctgtggcgaggaaggctcctgtcccatcccaacccagttagcagccgcccaaggaggaggagatccaatcggcgtgcgggcgtccgcggtccatccatcgatccaattccaatctgcaggcatctcgagtgcaccgtcggccgcaccagcaggcagcatcccgacaccgccgttccccagcagacagcagcaggtcgccgtcgttccccagcaggcagcaacaggtcgccagcgctagtcctcgacggacgacgaccagcatcagccgccgccccagtcgaccagcatccacggcggcacgagcccacgaccagcagatcaacgcggtggcagatcaacgagcccacgactagtcagaaaatttttacagcagcatatccaccggatacccgatacccgacgggtacccggtgggcacgggtatgggtccatttttttacccgattggcttggtgcgtatggatatttgtaaagggtcgagtatgatatcgggtcgggtattatacccgaacacaacccgacccgctgccatccctaaacgcagctattctgtcaattccttaaatagagcagcactgagcatatccggcggagaatttagttcagtgccggtttccatttcacttcatatctgggcttaatcttgtgtcagcttacctacacattgcaattgttgtcacatagcttatgaatgaagcacggaaatgatcgagttatattagaactatctacaccgacgtattgtgttgaatttaagatgccatcgatgccttttaaatgtgtatagtgctttcgacagccttgtgtttgcatgccgaatttcttacaagtatcatacatgtataccgaactgtgaatttaggttatactcaaactgcacacagtagcatccttctggtacagtaacaaaggatttggaacccagccctctgttctccaccaccgcttcgaagatgccgcaggtaatggtggtggcacggaacttcatggatatggtggctgctcttcctgcgggcaagcttgatatgctctatgactcagcctttatctgtgaggcagtactcaggtcacttcccccactggcaaagaagtatgcactgcagatgttgtatgtgctggcaccagtgaccgctgcagcaatggaagagtgggtgcttgatgaatatgctgccaagcataaggttgccattgataagcttctacagctcagggtctttgttgaagtgcgcgacagacgacgggacgtgagctacaagatgaatcagaagttccagggaaacatgcagaagtatttggttgatggtggaagtttaccaagggaacctttaccattaagtgtcactggtcgattgcccacaccagcagatctggaagcctatgctcttgatcaatgggagtgcttcttgttgcaattgatcaattcatctcaagtcgaaaaagggtcaagttttagctcctccatgatgaagacgtttcagcgtggtcttctgagttcaagggatggtgaagcttcaaagttgactgaaaatggcttccaatttcttctgatggaaacaaatgcacaactttggtacataatgagagaatacatttcatctgctgaggaacgtggagtggaccctacggagctgatatcatttctcttggaacttagctttcataaattgggagcggcttatagcttgaacactctgactgatgtccagaggattgccatcagggatcttgcagaattaggactagtcaaacagcagcagggtcgaaaggatagctggttcattcctacccaattggctactaatctttcagcaagcttgtcagattcgtcatctaacaaagagggatttgtggttgtggagacaaactttcgaatgtatgcatactctacttccaagttgcactgtgaaattctacgcctttttgcaagggtggagtatcaacttccaaacctcatcgtaggagctgttacaaaagaaagtatctatggtgcttttgaaaatgggataactgctgagcagataatttcatttcttaggcaaaatgctcaccctcgtgttgctgacaagatacccgctgtcccggagaatgtcacagatcagattaggttgtgggaaactgacctcaacagggttgagatgattccatcgcatttgtacgaagattttcctagcaaggaatggtttgaacaatgctgtgattatgcaagggataatgggtacttgctgtgggaggaccccaagagaatgagactaattgtacgaggggagttccaccccgaaatgagggagttccttcgcaggcaaagatgaggaacgaccttgtacttgacggaccatgctatgcttctttgtagtgcatagaaacactgtatcgggtaatagttctcctttaaatatcaggaaagggtctagaaaagggctcagtttttgaattattttggtgacctgtgagctgtggaagcatatgaataatgtggtgttcaatggagcaaggcccaacatccttgatctgcttctaaatgttactagtgactgtaccctatgctggtgtatggctggtggccaggtcctgttggaactcttaggtaggtagtatggtgggatggagttggtatgctcttaatttgttgttatttggattgattctatataggacggagtgattttaaaaatgaaaaaaactcaaa

SEQ ID NO: 23703 - DNA, 2347 bp, Zea Mays
agtaaccgcagtaaccggacacttttgcccttcgaactaaaagcgcctgcatctcaaacccgacggcgctctcttctctatcctctgtgtcccctccaccaaaaccgacgacgacgtcgctctcctccaccggtgctcggcgctctccctccaccagcggtggtccacagacgctcggcgagctccaccggcgggcgctggcggctggtcagatccgctcggcagtcatccatctggcacatcggccgaagctcccagcgtcctcctgcaggccgagctgaaggttcagcgcgccggtggagttagacgacgaaactccgtcacgtcatacctctccgcctcccgtcttccagacgtctctaatcggggtcccagcgtctcggagaagaggagcagcacggcacggcagctgtggcgaggaaggctcctgtcccatcccaacccagttagcagccgcccaaggaggaggagatccaatcggcgtgcgggcgtccgcggtccatccatcgatccaattccaatctgcaggttatactcaaactgcacacagtagcatccttctggtacagtaacaaaggatttggaacccagccctctgttctccaccaccgcttcgaagatgccgcaggtaatggtggtggcacggaacttcatggatatggtggctgctcttcctgcgggcaagcttgatatgctctatgactcagcctttatctgtgaggcagtactcaggtcacttcccccactggcaaagaagtatgcactgcagatgttgtatgtgctggcaccagtgaccgctgcagcaatggaagagtgggtgcttgatgaatatgctgccaagcataaggttgccattgataagcttctacagctcagggtctttgttgaagtgcgcgacagacgacgggacgtgagctacaagatgaatcagaagttccagggaaacatgcagaagtatttggttgatggtggaagtttaccaagggaacctttaccattaagtgtcactggtcgattgcccacaccagcagatctggaagcctatgctcttgatcaatgggagtgcttcttgttgcaattgatcaattcatctcaagtcgaaaaagggtcaagttttagctcctccatgatgaagacgtttcagcgtggtcttctgagttcaagggatggtgaagcttcaaagttgactgaaaatggcttccaatttcttctgatggaaacaaatgcacaactttggtacataatgagagaatacatttcatctgctgaggaacgtggagtggaccctacggagctgatatcatttctcttggaacttagctttcataaattgggagcggcttatagcttgaacactctgactgatgtccagaggattgccatcagggatcttgcagaattaggactagtcaaacagcagcagggtcgaaaggatagctggttcattcctacccaattggctactaatctttcagcaagcttgtcagattcgtcatctaacaaagagggatttgtggttgtggagacaaactttcgaatgtatgcatactctacttccaagttgcactgtgaaattctacgcctttttgcaagggtggagtatcaacttccaaacctcatcgtaggagctgttacaaaagaaagtatctatggtgcttttgaaaatgggataactgctgagcagataatttcatttcttaggcaaaatgctcaccctcgtgttgctgacaagatacccgctgtcccggagaatgtcacagatcaggttgtgggaaactgacctcaacagggttgagatgattccatcgcatttgtacgaagattttcctagcaaggaatggtttgaacaatgctgtgattatgcaagggataatgggtacttgctgtgggaggaccccaagagaatgagactaattgtacgaggggagttccaccccgaaatgagggagttccttcgcaggcaaagatgaggaacgaccttgtacttgacggaccatgctatgcttctttgtagtgcatagaaacactgtatcgggtaatagttctcctttaaatatcaggaaagggtctagaaaagggctcagtttttgaattattttggtgacctgtgagctgtggaagcatatgaataatgtggtgttcaatggagcaaggcccaacatccttgatctgcttctaaatgttactagtgactgtaccctatgctggtgtatggctggtggccaggtcctgttggaactcttaggtaggtagtatggtgggatggagttggtatgctcttaatttgttgttatttggattgattctatataggacggagtgattttaaaaatgaaaaaaactcaaa

SEQ ID NO: 23704 - DNA, 3387 bp, Zea Mays
cgcccagccgcccagggcctaggccaccgtcagcgccgcccgcctccatctccgccccgagcggctgcgccccgcccgccgcccgcccgcagtccaccaggcgtcgagccccgccccggctcgcgcgcgtcgagcctctgtccggccccggctgcaacccactcactcagccagacctggcttctctgcagactgcaggttctcagtttctcttataacagccagtaaccgcagtaaccggacacttttgcccttcgaactaaaagcgcctgcatctcaaacccgacggcgctctcttctctatcctctgtgtcccctccaccaaaaccgacgacgacgtcgctctcctccaccggtgctcggcgctctccctccaccagcggtggtccacagacgctcggcgagctccaccggcgggcgctggcggctggtcagatccgctcggcagtcatccatctggcacatcggccgaagctcccagcgtcctcctgcaggccgagctgaaggttcagcgcgccggtggagttagacgacgaaactccgtcacgtcatacctctccgcctcccgtcttccagacgtctctaatcggggtcccagcgtctcggagaagaggagcagcacggcacggcagctgtggcgaggaaggctcctgtcccatcccaacccagttagcagccgcccaaggaggaggagatccaatcggcgtgcgggcgtccgcggtccatccatcgatccaattccaatctgcaggcatctcgagtgcaccgtcggccgcaccagcaggcagcatcccgacaccgccgttccccagcagacagcagcaggtcgccgtcgttccccagcaggcagcaacaggtcgccagctcgcccccgcgtttgcttccggtcagctgatgtcgcatgcttttcggcagcgctagtcctcgacggacgacgaccagcatcagccgccgccccagtcgaccagcatccacggcggcacgagcccacgaccagcagatcaacgcggtggcagatcaacgagcccacgactagtcagaaaatttttacagcagcatatccaccggatacccgatacccgacgggtacccggtgggcacgggtatgggtccatttttttacccgattggcttggtgcgtatggatatttgtaaagggtcgagtatgatatcgggtcgggtattatacccgaacacaacccgacccgctgccatccctaaacgcagctattctgtcaattccttaaatagagcagcactgagcatatccggcggagaatttagttcagtgccggtttccatttcacttcatatctgggcttaatcttgtgtcagcttacctacacattgcaattgttgtcacatagcttatgaatgaagcacggaaatgatcgagttatattagaactatctacaccgacgtattgtgttgaatttaagatgccatcgatgccttttaaatgtgtatagtgctttcgacagccttgtgtttgcatgccgaatttcttacaagtatcatacatgtataccgaactgtgaatttaggttatactcaaactgcacacagtagcatccttctggtacaggtgtatgtaattttgaagtaacaaaggatttggaacccagccctctgttctccaccaccgcttcgaagatgccgcaggtaatggtggtggcacggaacttcatggatatggtggctgctcttcctgcgggcaagcttgatatgctctatgactcagcctttatctgtgaggcagtactcaggtcacttcccccactggcaaagaagtatgcactgcagatgttgtatgtgctggcaccagtgaccgctgcagcaatggaagagtgggtgcttgatgaatatgctgccaagcataaggttgccattgataagcttctacagctcagggtctttgttgaagtgcgcgacagacgacgggacgtgagctacaagatgaatcagaagttccagggaaacatgcagaagtatttggttgatggtggaagtttaccaagggaacctttaccattaagtgtcactggtcgattgcccacaccagcagatctggaagcctatgctcttgatcaatgggagtgcttcttgttgcaattgatcaattcatctcaagtcgaaaaagggtcaagttttagctcctccatgatgaagacgtttcagcgtggtcttctgagttcaagggatggtgaagcttcaaagttgactgaaaatggcttccaatttcttctgatggaaacaaatgcacaactttggtacataatgagagaatacatttcatctgctgaggaacgtggagtggaccctacggagctgatatcatttctcttggaacttagctttcataaattgggagcggcttatagcttgaacactctgactgatgtccagaggattgccatcagggatcttgcagaattaggactagtcaaacagcagcagggtcgaaaggatagctggttcattcctacccaattggctactaatctttcagcaagcttgtcagattcgtcatctaacaaagagggatttgtggttgtggagacaaactttcgaatgtatgcatactctacttccaagttgcactgtgaaattctacgcctttttgcaagggtggagtatcaacttccaaacctcatcgtaggagctgttacaaaagaaagtatctatggtgcttttgaaaatgggataactgctgagcagataatttcatttcttaggcaaaatgctcaccctcgtgttgctgacaagatacccgctgtcccggagaatgtcacagatcagattaggttgtgggaaactgacctcaacagggttgagatgattccatcgcatttgtacgaagattttcctagcaaggaatggtttgaacaatgctgtgattatgcaagggataatgggtacttgctgtgggaggaccccaagagaatgagactaattgtacgaggggagttccaccccgaaatgagggagttccttcgcaggcaaagatgaggaacgaccttgtacttgacggaccatgctatgcttctttgtagtgcatagaaacactgtatcgggtaatagttctcctttaaatatcaggaaagggtctagaaaagggctcagtttttgaattattttggtgacctgtgagctgtggaagcatatgaataatgtggtgttcaatggagcaaggcccaacatccttgatctgcttctaaatgttactagtgactgtaccctatgctggtgtatggctggtggccaggtcctgttggaactcttaggtaggtagtatggtgggatggagttggtatgctcttaatttgttgttatttggattgattctatataggacggagtgattttaaaaatgaaaaaaactcaaa

SEQ ID NO: 23705 - DNA, 2022 bp, Zea Mays
cgcccagccgcccagggcctaggccaccgtcagcgccgcccgcctccatctccgccccgagcggctgcgccccgcccgccgcccgcccgcagtccaccaggcgtcgagccccgccccggctcgcgcgcgtcgagcctctgtccggccccggctgcaacccactcactcagccagacctggcttctctgcagactgcaggttctcagtttctcttataacaggtgtatgtaattttgaagtaacaaaggatttggaacccagccctctgttctccaccaccgcttcgaagatgccgcaggtaatggtggtggcacggaacttcatggatatggtggctgctcttcctgcgggcaagcttgatatgctctatgactcagcctttatctgtgaggcagtactcaggtcacttcccccactggcaaagaagtatgcactgcagatgttgtatgtgctggcaccagtgaccgctgcagcaatggaagagtgggtgcttgatgaatatgctgccaagcataaggttgccattgataagcttctacagctcagggtctttgttgaagtgcgcgacagacgacgggacgtgagctacaagatgaatcagaagttccagggaaacatgcagaagtatttggttgatggtggaagtttaccaagggaacctttaccattaagtgtcactggtcgattgcccacaccagcagatctggaagcctatgctcttgatcaatgggagtgcttcttgttgcaattgatcaattcatctcaagtcgaaaaagggtcaagttttagctcctccatgatgaagacgtttcagcgtggtcttctgagttcaagggatggtgaagcttcaaagttgactgaaaatggcttccaatttcttctgatggaaacaaatgcacaactttggtacataatgagagaatacatttcatctgctgaggaacgtggagtggaccctacggagctgatatcatttctcttggaacttagctttcataaattgggagcggcttatagcttgaacactctgactgatgtccagaggattgccatcagggatcttgcagaattaggactagtcaaacagcagcagggtcgaaaggatagctggttcattcctacccaattggctactaatctttcagcaagcttgtcagattcgtcatctaacaaagagggatttgtggttgtggagacaaactttcgaatgtatgcatactctacttccaagttgcactgtgaaattctacgcctttttgcaagggtggagtatcaacttccaaacctcatcgtaggagctgttacaaaagaaagtatctatggtgcttttgaaaatgggataactgctgagcagataatttcatttcttaggcaaaatgctcaccctcgtgttgctgacaagatacccgctgtcccggagaatgtcacagatcagattaggttgtgggaaactgacctcaacagggttgagatgattccatcgcatttgtacgaagattttcctagcaaggaatggtttgaacaatgctgtgattatgcaagggataatgggtacttgctgtgggaggaccccaagagaatgagactaattgtacgaggggagttccaccccgaaatgagggagttccttcgcaggcaaagatgaggaacgaccttgtacttgacggaccatgctatgcttctttgtagtgcatagaaacactgtatcgggtaatagttctcctttaaatatcaggaaagggtctagaaaagggctcagtttttgaattattttggtgacctgtgagctgtggaagcatatgaataatgtggtgttcaatggagcaaggcccaacatccttgatctgcttctaaatgttactagtgactgtaccctatgctggtgtatggctggtggccaggtcctgttggaactcttaggtaggtagtatggtgggatggagttggtatgctcttaatttgttgttatttggattgattctatataggacggagtgattttaaaaatgaaaaaaactcaaa

SEQ ID NO: 23706 - DNA, 2159 bp, Zea Mays
cgcccagccgcccagggcctaggccaccgtcagcgccgcccgcctccatctccgccccgagcggctgcgccccgcccgccgcccgcccgcagtccaccaggcgtcgagccccgccccggctcgcgcgcgtcgagcctctgtccggccccggctgcaacccactcactcagccagacctggcttctctgcagactgcaggttctcagtttctcttataacaggttatactcaaactgcacacagtagcatccttctggtacaggtacacccttccctcccggctgtgcgaagcaactccaccctaatttattttgcagaaaaagttatcggtccgcccttggttactgaaactggtcaggtgtatgtaattttgaagtaacaaaggatttggaacccagccctctgttctccaccaccgcttcgaagatgccgcaggtaatggtggtggcacggaacttcatggatatggtggctgctcttcctgcgggcaagcttgatatgctctatgactcagcctttatctgtgaggcagtactcaggtcacttcccccactggcaaagaagtatgcactgcagatgttgtatgtgctggcaccagtgaccgctgcagcaatggaagagtgggtgcttgatgaatatgctgccaagcataaggttgccattgataagcttctacagctcagggtctttgttgaagtgcgcgacagacgacgggacgtgagctacaagatgaatcagaagttccagggaaacatgcagaagtatttggttgatggtggaagtttaccaagggaacctttaccattaagtgtcactggtcgattgcccacaccagcagatctggaagcctatgctcttgatcaatgggagtgcttcttgttgcaattgatcaattcatctcaagtcgaaaaagggtcaagttttagctcctccatgatgaagacgtttcagcgtggtcttctgagttcaagggatggtgaagcttcaaagttgactgaaaatggcttccaatttcttctgatggaaacaaatgcacaactttggtacataatgagagaatacatttcatctgctgaggaacgtggagtggaccctacggagctgatatcatttctcttggaacttagctttcataaattgggagcggcttatagcttgaacactctgactgatgtccagaggattgccatcagggatcttgcagaattaggactagtcaaacagcagcagggtcgaaaggatagctggttcattcctacccaattggctactaatctttcagcaagcttgtcagattcgtcatctaacaaagagggatttgtggttgtggagacaaactttcgaatgtatgcatactctacttccaagttgcactgtgaaattctacgcctttttgcaagggtggagtatcaacttccaaacctcatcgtaggagctgttacaaaagaaagtatctatggtgcttttgaaaatgggataactgctgagcagataatttcatttcttaggcaaaatgctcaccctcgtgttgctgacaagatacccgctgtcccggagaatgtcacagatcagattaggttgtgggaaactgacctcaacagggttgagatgattccatcgcatttgtacgaagattttcctagcaaggaatggtttgaacaatgctgtgattatgcaagggataatgggtacttgctgtgggaggaccccaagagaatgagactaattgtacgaggggagttccaccccgaaatgagggagttccttcgcaggcaaagatgaggaacgaccttgtacttgacggaccatgctatgcttctttgtagtgcatagaaacactgtatcgggtaatagttctcctttaaatatcaggaaagggtctagaaaagggctcagtttttgaattattttggtgacctgtgagctgtggaagcatatgaataatgtggtgttcaatggagcaaggcccaacatccttgatctgcttctaaatgttactagtgactgtaccctatgctggtgtatggctggtggccaggtcctgttggaactcttaggtaggtagtatggtgggatggagttggtatgctcttaatttgttgttatttggattgattctatataggacggagtgattttaaaaatgaaaaaaactcaaa

SEQ ID NO: 23707 - DNA, 3369 bp, Zea Mays
cgcccagccgcccagggcctaggccaccgtcagcgccgcccgcctccatctccgccccgagcggctgcgccccgcccgccgcccgcccgcagtccaccaggcgtcgagccccgccccggctcgcgcgcgtcgagcctctgtccggccccggctgcaacccactcactcagccagacctggcttctctgcagactgcaggttctcagtttctcttataacagccagtaaccgcagtaaccggacacttttgcccttcgaactaaaagcgcctgcatctcaaacccgacggcgctctcttctctatcctctgtgtcccctccaccaaaaccgacgacgacgtcgctctcctccaccggtgctcggcgctctccctccaccagcggtggtccacagacgctcggcgagctccaccggcgggcgctggcggctggtcagatccgctcggcagtcatccatctggcacatcggccgaagctcccagcgtcctcctgcaggccgagctgaaggttcagcgcgccggtggagttagacgacgaaactccgtcacgtcatacctctccgcctcccgtcttccagacgtctctaatcggggtcccagcgtctcggagaagaggagcagcacggcacggcagctgtggcgaggaaggctcctgtcccatcccaacccagttagcagccgcccaaggaggaggagatccaatcggcgtgcgggcgtccgcggtccatccatcgatccaattccaatctgcaggcatctcgagtgcaccgtcggccgcaccagcaggcagcatcccgacaccgccgttccccagcagacagcagcaggtcgccgtcgttccccagcaggcagcaacaggtcgccagctcgcccccgcgtttgcttccggtcagctgatgtcgcatgcttttcggcagcgctagtcctcgacggacgacgaccagcatcagccgccgccccagtcgaccagcatccacggcggcacgagcccacgaccagcagatcaacgcggtggcagatcaacgagcccacgactagtcagaaaatttttacagcagcatatccaccggatacccgatacccgacgggtacccggtgggcacgggtatgggtccatttttttacccgattggcttggtgcgtatggatatttgtaaagggtcgagtatgatatcgggtcgggtattatacccgaacacaacccgacccgctgccatccctaaacgcagctattctgtcaattccttaaatagagcagcactgagcatatccggcggagaatttagttcagtgccggtttccatttcacttcatatctgggcttaatcttgtgtcagcttacctacacattgcaattgttgtcacatagcttatgaatgaagcacggaaatgatcgagttatattagaactatctacaccgacgtattgtgttgaatttaagatgccatcgatgccttttaaatgtgtatagtgctttcgacagccttgtgtttgcatgccgaatttcttacaagtatcatacatgtataccgaactgtgaatttaggttatactcaaactgcacacagtagcatccttctggtacagtaacaaaggatttggaacccagccctctgttctccaccaccgcttcgaagatgccgcaggtaatggtggtggcacggaacttcatggatatggtggctgctcttcctgcgggcaagcttgatatgctctatgactcagcctttatctgtgaggcagtactcaggtcacttcccccactggcaaagaagtatgcactgcagatgttgtatgtgctggcaccagtgaccgctgcagcaatggaagagtgggtgcttgatgaatatgctgccaagcataaggttgccattgataagcttctacagctcagggtctttgttgaagtgcgcgacagacgacgggacgtgagctacaagatgaatcagaagttccagggaaacatgcagaagtatttggttgatggtggaagtttaccaagggaacctttaccattaagtgtcactggtcgattgcccacaccagcagatctggaagcctatgctcttgatcaatgggagtgcttcttgttgcaattgatcaattcatctcaagtcgaaaaagggtcaagttttagctcctccatgatgaagacgtttcagcgtggtcttctgagttcaagggatggtgaagcttcaaagttgactgaaaatggcttccaatttcttctgatggaaacaaatgcacaactttggtacataatgagagaatacatttcatctgctgaggaacgtggagtggaccctacggagctgatatcatttctcttggaacttagctttcataaattgggagcggcttatagcttgaacactctgactgatgtccagaggattgccatcagggatcttgcagaattaggactagtcaaacagcagcagggtcgaaaggatagctggttcattcctacccaattggctactaatctttcagcaagcttgtcagattcgtcatctaacaaagagggatttgtggttgtggagacaaactttcgaatgtatgcatactctacttccaagttgcactgtgaaattctacgcctttttgcaagggtggagtatcaacttccaaacctcatcgtaggagctgttacaaaagaaagtatctatggtgcttttgaaaatgggataactgctgagcagataatttcatttcttaggcaaaatgctcaccctcgtgttgctgacaagatacccgctgtcccggagaatgtcacagatcagattaggttgtgggaaactgacctcaacagggttgagatgattccatcgcatttgtacgaagattttcctagcaaggaatggtttgaacaatgctgtgattatgcaagggataatgggtacttgctgtgggaggaccccaagagaatgagactaattgtacgaggggagttccaccccgaaatgagggagttccttcgcaggcaaagatgaggaacgaccttgtacttgacggaccatgctatgcttctttgtagtgcatagaaacactgtatcgggtaatagttctcctttaaatatcaggaaagggtctagaaaagggctcagtttttgaattattttggtgacctgtgagctgtggaagcatatgaataatgtggtgttcaatggagcaaggcccaacatccttgatctgcttctaaatgttactagtgactgtaccctatgctggtgtatggctggtggccaggtcctgttggaactcttaggtaggtagtatggtgggatggagttggtatgctcttaatttgttgttatttggattgattctatataggacggagtgattttaaaaatgaaaaaaactcaaa

SEQ ID NO: 23708 - DNA, 2589 bp, Zea Mays
cgcccagccgcccagggcctaggccaccgtcagcgccgcccgcctccatctccgccccgagcggctgcgccccgcccgccgcccgcccgcagtccaccaggcgtcgagccccgccccggctcgcgcgcgtcgagcctctgtccggccccggctgcaacccactcactcagccagacctggcttctctgcagactgcaggttctcagtttctcttataacagtaaccgcagtaaccggacacttttgcccttcgaactaaaagcgcctgcatctcaaacccgacggcgctctcttctctatcctctgtgtcccctccaccaaaaccgacgacgacgtcgctctcctccaccggtgctcggcgctctccctccaccagcggtggtccacagacgctcggcgagctccaccggcgggcgctggcggctggtcagatccgctcggcagtcatccatctggcacatcggccgaagctcccagcgtcctcctgcaggccgagctgaaggttcagcgcgccggtggagttagacgacgaaactccgtcacgtcatacctctccgcctcccgtcttccagacgtctctaatcggggtcccagcgtctcggagaagaggagcagcacggcacggcagctgtggcgaggaaggctcctgtcccatcccaacccagttagcagccgcccaaggaggaggagatccaatcggcgtgcgggcgtccgcggtccatccatcgatccaattccaatctgcagaaaaagttatcggtccgcccttggttactgaaactggtcaggtgtatgtaattttgaagtaacaaaggatttggaacccagccctctgttctccaccaccgcttcgaagatgccgcaggtaatggtggtggcacggaacttcatggatatggtggctgctcttcctgcgggcaagcttgatatgctctatgactcagcctttatctgtgaggcagtactcaggtcacttcccccactggcaaagaagtatgcactgcagatgttgtatgtgctggcaccagtgaccgctgcagcaatggaagagtgggtgcttgatgaatatgctgccaagcataaggttgccattgataagcttctacagctcagggtctttgttgaagtgcgcgacagacgacgggacgtgagctacaagatgaatcagaagttccagggaaacatgcagaagtatttggttgatggtggaagtttaccaagggaacctttaccattaagtgtcactggtcgattgcccacaccagcagatctggaagcctatgctcttgatcaatgggagtgcttcttgttgcaattgatcaattcatctcaagtcgaaaaagggtcaagttttagctcctccatgatgaagacgtttcagcgtggtcttctgagttcaagggatggtgaagcttcaaagttgactgaaaatggcttccaatttcttctgatggaaacaaatgcacaactttggtacataatgagagaatacatttcatctgctgaggaacgtggagtggaccctacggagctgatatcatttctcttggaacttagctttcataaattgggagcggcttatagcttgaacactctgactgatgtccagaggattgccatcagggatcttgcagaattaggactagtcaaacagcagcagggtcgaaaggatagctggttcattcctacccaattggctactaatctttcagcaagcttgtcagattcgtcatctaacaaagagggatttgtggttgtggagacaaactttcgaatgtatgcatactctacttccaagttgcactgtgaaattctacgcctttttgcaagggtggagtatcaacttccaaacctcatcgtaggagctgttacaaaagaaagtatctatggtgcttttgaaaatgggataactgctgagcagataatttcatttcttaggcaaaatgctcaccctcgtgttgctgacaagatacccgctgtcccggagaatgtcacagatcagattaggttgtgggaaactgacctcaacagggttgagatgattccatcgcatttgtacgaagattttcctagcaaggaatggtttgaacaatgctgtgattatgcaagggataatgggtacttgctgtgggaggaccccaagagaatgagactaattgtacgaggggagttccaccccgaaatgagggagttccttcgcaggcaaagatgaggaacgaccttgtacttgacggaccatgctatgcttctttgtagtgcatagaaacactgtatcgggtaatagttctcctttaaatatcaggaaagggtctagaaaagggctcagtttttgaattattttggtgacctgtgagctgtggaagcatatgaataatgtggtgttcaatggagcaaggcccaacatccttgatctgcttctaaatgttactagtgactgtaccctatgctggtgtatggctggtggccaggtcctgttggaactcttaggtaggtagtatggtgggatggagttggtatgctcttaatttgttgttatttggattgattctatataggacggagtgattttaaaaatgaaaaaaactcaaa

SEQ ID NO: 23709 - DNA, 1207 bp, Zea Mays
acttttgcccttcgaactaaaagcgcctgcatctcaaacccgacggcgctctcttctctatcctctgtgtcccctccaccaaaaccgacgacgacgtcgctctcctccaccggtgctcggcgctctccctccaccagcggtggtccacagacgctcggcgagctccaccggcgggcgctggcggctggtcagatccgctcggcagtcatccatctggcacatcggccgaagctcccagcgtcctcctgcaggccgagctgaaggttcagcgcgccggtggagttagacgacgaaactccgtcacgtcatacctctccgcctcccgtcttccagacgtctctaatcggggtcccagcgtctcggagaagaggagcagcacggcacggcagctgtggcgaggaaggctcctgtcccatcccaacccagttagcagccgcccaaggaggaggagatccaatcggcgtgcgggcgtccgcggtccatccatcgatccaattccaatctgcaggcatctcgagtgcaccgtcggccgcaccagcaggcagcatcccgacaccgccgttccccagcagacagcagcaggtcgccgtcgttccccagcaggcagcaacagctcgcccccgcgtttgcttccggtcagctgatgtcgcatgcttttcggcagcgctagtcctcgacggacgacgaccagcatcagccgccgccccagtcgaccagcatccacggcggcacgagcccacgaccagcagatcaacgcggtggcagatcaacgagcccacgactagtcagaaaatttttacagcagcatatccaccggatacccgatacccgacgggtacccggtgggcacgggtatgggtccatttttttacccgattggcttggtgcgtatggatatttgtaaagggtcgagtatgatatcgggtcgggtattatacccgaacacaacccgacccgctgccatccctaaacgcagctattctgtcaattccttaaatagagcagcactgagcatatccggcggagaatttagttcagtgccggtttccatttcacttcatatctgggcttaatcttgtgtcagcttacctacacattgcaattgttgtcacatagcttatgaatgaagcacggaaatgatcgagttatattagaactatctacaccgacgtattgtgttgaatttaagatgccatcgatgcctttt

SEQ ID NO: 23710 - DNA, 2136 bp, Zea Mays
  misc_feature (2135)..(2136): n is a, c, g, or t
gtcgtcttcactgtcatagtcggtctcacggtcaggcccaagggtcctgagcaccatcccaagaacgattgatagcacctggagaactgaattcgttagcaccggatcactcgtgctcaaagggtttagtttctcttcagaaagtacagtttcggtggtgcagctaggcaagtttaacataagaataaggtcaagcaacatttgcgttcctccgaaacaaaacaggatgccagcatctgatttagtttctcttcagaaagtacagtttctaagcattctacagtggcagaatgttcaaacccaccacaataagctgcgcataccagtgtcttctatcaccacccacaagaacttgtacagtatttactagtcatatgcaaggtagaattatacgataatgaacggttcatttttactgcagtcaaggtgaatctaacctgagcagccaccactgagaggcctacccattcacatatctcggaattggatctcacaaagtgcttgaaatccccaaacttgcctgatgggtcaggagggaaaccctgaagttttttcaaaattatgaagtatcaaacttgcctgatgggtcaggtcataaaatagcagatataagggaaaattttcataaagtatcaaagttcacagctgagctccttacctcttcccagttgctattcagaaatacatccaaagtgattgcgccttccagtataataagcataaatacgatggtcatgtactacatgtgggttaaggaaaaagaagggcaatatcactgggaggtcgcactgcactaaacattacagagcttaaagaatgtaactgcaattcgaggccagcactctcactctcagatcagttctttttggcatctcatgtacagataattatataacctagaaaaaagatgtggtttctgcacctagctgaaaaccttggatgaaccagcagaagctgctaaccactcattcactatatgtagccaacaagcaaaaaacccaggtgatggcagctggataacatgtaactccatgtgatttagcataggtagtcagcaatcaaacacaaccaatggaggctggtatatggaacaacatttaaatctactatgtacctactaactaaaaggatacacagtagaggcagtgaccatttgcagtttcagcagcaatatgcccagagcaagtcagtatgcagagaaagatccccaggccaagaaatgtgtagatgaacctgcacgaccagtaatgctttctcagtgaaaccaccagtccgacagtatatactccgaaatattggaaggcgtaatttttttgacatggtcctcaaatttttattaaaaataaatcatatttaactgctacttatgttctcaaatatttgtagtccgctagtttatttttaaactaaaacacgataaataaaaaagaacggagggagaactattcttgaagtgtttaaagtgtcggttccacgcagcaatatcattagtaatggtggcagcaaaagcatggacgcttggcccatttgattaataactatagttgttaggatgaggaaatcagtattaatatactacagttgttaggatgaggaaagcgacggctaaacatgctcactgtttggcggtttaacatcagcatcgtcattgttttgtatatccttcatcagtgctcttgcccccaccaatcaactaaccgcggatctactttcgagttaggccgaccattgcatcatatcatgcgtcccgatctgacgccacattgcagccgccaccaagatctcctctggtgtacaagtccaaagcagcaacacggaagccgatcaccggccgtgcccaccgaatagcactagcgtccactagagggattcataggatggtggcttcttccctgtcatgcgtcactaactgtagccaaatctgccgtgcccatcacccccatcccaaaggagcaacctttaactgccacaggaaaattcaaaagcgctttcggcggtggctgggtagcttcgttttgtgcgccacagctgtgtaataatctcccgttcctgcacggcatcgtgaattggtcgcggaactacagtctagtctaatgaaaaaggtgtgatgaatgaaacagttggctgcgaattcnn

SEQ ID NO: 23711 - DNA, 1574 bp, Zea Mays
agaaaatccatacattcttttggaaaaatgctatggaacttgagaaaaaagaacagaaggagaaggagctacgtgcccaaataattgctgaagcagaagaattcaagaaagctttttttgagaagaggatacagaactgtgcgtcgaatatggtcaacaacagagaaagggagaagatttttgtagccagccaggagaaattccatgccaacgcagacaagcagtactggaaatcgatctcggatctcatcccgcatgaaatagccaccattgagaagcggggaaagaaagacaaggacaagaagccatccgtcacagttattcagggccccaagcctggcaagcccaccgacctctcccggatgcgccatatcttagtgaagctgaagcacgctccaccgccacatatgttgcaacctccaccagcacctgctgctaaagagggcgcaaaggatggctccaaagaaggtggaaaggatggtggtgccaaagacggcgcggcagccccagcaaacgacgccaagcagcctgcagagagccaagaaaccagcaccgccaatggcccctcggaggccgagaaagagcagcctgcggcgtcggagtgaccggaaaggaaagcgtagcattacagaaacacaagaggcttgactgtcagtagatggaaacgtgtttttgtttctgatgatttcgcagacccgtttatcccgtactgatcttttgcagagatctgcatcaggatgtcttcgtatgagcacagaacattcataatttagtatcaccacagtagtcgtatctttgctgttttcacccctgtccagttgtgtcgtcactgagatgcctgtgatctcatacaagttgaggtctgaaactgttacgatgatatggtactgccctaataataatctgaagctgtgcaacaaacagcaatcttgcattgctctgggtctggcatggattcactaatctatatgtacaagatctagctgccgcatttgcaggaggaaaacacacttggcactacatcatatagtcgccgccggttgacaaaacgcaaggaaggaattagtcaaaattacatggcggttgcttcacctggggctcatctcggtcaccgtgggtggcaccaccgtgctgaacatgttggagtcctcctgggacgccaggttcttgaacctggagtcggtggaagtggtggccttggacaaggggctccgcctgctgtactcctggaggtaccccggcgccgtcagctcgctctcgttgatccggacgggcttggacagcatggtgacgacctggggcatcgtcggccggcgcgcggcggccgcctgtaggcagaagagggccaccatgatgtacctgatggcttcttcgtcagggcagtctacaagggctggatccaccagttccttgagcctcttcgcttcgtacagctcccatgccttctctaggagaatcttgtcatccatgagtatgctcctggagctactagtgccgctcactatctccaggacaaggacaccaaagctgtagatgtccgctttcttggtgagctggccatgccaggcgtactc

SEQ ID NO: 23712 - DNA, 1622 bp, Zea Mays
gttcgagtcagatctaacgctttctggcgctctttcgactaactgtagccgcttcttctgcactacgaaggaaaaatgctatggaacttgagaaaaaagaacagaaggagaaggagctacgtgcccaaataattgctgaagcagaagaattcaagaaagctttttttgagaagaggatacagaactgtgcgtcgaatatggtcaacaacagagaaagggagaagatttttgtagccagccaggagaaattccatgccaacgcagacaagcagtactggaaatcgatctcggatctcatcccgcatgaaatagccaccattgagaagcggggaaagaaagacaaggacaagaagccatccgtcacagttattcagggccccaagcctggcaagcccaccgacctctcccggatgcgccatatcttagtgaagctgaagcacgctccaccgccacatatgttgcaacctccaccagcacctgctgctaaagagggcgcaaaggatggctccaaagaaggtggaaaggatggtggtgccaaagacggcgcggcagccccagcaaacgacgccaagcagcctgcagagagccaagaaaccagcaccgccaatggcccctcggaggccgagaaagagcagcctgcggcgtcggagtgaccggaaaggaaagcgtagcattacagaaacacaagaggcttgactgtcagtagatggaaacgtgtttttgtttctgatgatttcgcagacccgtttatcccgtactgatcttttgcagagatctgcatcaggatgtcttcgtatgagcacagaacattcataatttagtatcaccacagtagtcgtatctttgctgttttcacccctgtccagttgtgtcgtcactgagatgcctgtgatctcatacaagttgaggtctgaaactgttacgatgatatggtactgccctaataataatctgaagctgtgcaacaaacagcaatcttgcattgctctgggtctggcatggattcactaatctatatgtacaagatctagctgccgcatttgcaggaggaaaacacacttggcactacatcatatagtcgccgccggttgacaaaacgcaaggaaggaattagtcaaaattacatggcggttgcttcacctggggctcatctcggtcaccgtgggtggcaccaccgtgctgaacatgttggagtcctcctgggacgccaggttcttgaacctggagtcggtggaagtggtggccttggacaaggggctccgcctgctgtactcctggaggtaccccggcgccgtcagctcgctctcgttgatccggacgggcttggacagcatggtgacgacctggggcatcgtcggccggcgcgcggcggccgcctgtaggcagaagagggccaccatgatgtacctgatggcttcttcgtcagggcagtctacaagggctggatccaccagttccttgagcctcttcgcttcgtacagctcccatgccttctctaggagaatcttgtcatccatgagtatgctcctggagctactagtgccgctcactatctccaggacaaggacaccaaagctgtagatgtccgctttcttggtgagctggccatgccaggcgtactc

SEQ ID NO: 23713 - DNA, 1800 bp, Zea Mays
aatggaataaattgaagggatacaaacacccactaagcctgacggagcaagcagaagaaagcaaagtgcagagcacgagcagcagcaccagtccaccaggccggcgccgcccaaaatctccgcgtccccccccccatggcctccttctttgcggacgacggcgccgacgacctcccgcgcgccacctcccaccccttcgactccgacgacttcggtgctgccgcagccgacgacgctagcgccggcgggaaaaatgctatggaacttgagaaaaaagaacagaaggagaaggagctacgtgcccaaataattgctgaagcagaagaattcaagaaagctttttttgagaagaggatacagaactgtgcgtcgaatatggtcaacaacagagaaagggagaagatttttgtagccagccaggagaaattccatgccaacgcagacaagcagtactggaaatcgatctcggatctcatcccgcatgaaatagccaccattgagaagcggggaaagaaagacaaggacaagaagccatccgtcacagttattcagggccccaagcctggcaagcccaccgacctctcccggatgcgccatatcttagtgaagctgaagcacgctccaccgccacatatgttgcaacctccaccagcacctgctgctaaagagggcgcaaaggatggctccaaagaaggtggaaaggatggtggtgccaaagacggcgcggcagccccagcaaacgacgccaagcagcctgcagagagccaagaaaccagcaccgccaatggcccctcggaggccgagaaagagcagcctgcggcgtcggagtgaccggaaaggaaagcgtagcattacagaaacacaagaggcttgactgtcagtagatggaaacgtgtttttgtttctgatgatttcgcagacccgtttatcccgtactgatcttttgcagagatctgcatcaggatgtcttcgtatgagcacagaacattcataatttagtatcaccacagtagtcgtatctttgctgttttcacccctgtccagttgtgtcgtcactgagatgcctgtgatctcatacaagttgaggtctgaaactgttacgatgatatggtactgccctaataataatctgaagctgtgcaacaaacagcaatcttgcattgctctgggtctggcatggattcactaatctatatgtacaagatctagctgccgcatttgcaggaggaaaacacacttggcactacatcatatagtcgccgccggttgacaaaacgcaaggaaggaattagtcaaaattacatggcggttgcttcacctggggctcatctcggtcaccgtgggtggcaccaccgtgctgaacatgttggagtcctcctgggacgccaggttcttgaacctggagtcggtggaagtggtggccttggacaaggggctccgcctgctgtactcctggaggtaccccggcgccgtcagctcgctctcgttgatccggacgggcttggacagcatggtgacgacctggggcatcgtcggccggcgcgcggcggccgcctgtaggcagaagagggccaccatgatgtacctgatggcttcttcgtcagggcagtctacaagggctggatccaccagttccttgagcctcttcgcttcgtacagctcccatgccttctctaggagaatcttgtcatccatgagtatgctcctggagctactagtgccgctcactatctccaggacaaggacaccaaagctgtagatgtccgctttcttggtgagctggccatgccaggcgtactc

SEQ ID NO: 23714 - DNA, 1337 bp, Zea Mays
ccccaatccatacaggcccttattgcccacggcccacggcccaatgccgaaccaggcccagctccattttcgccgccgccgttggccggcaacggcattgccgcgcgcccgccgtatctggcttcggctgccgtcgcctccctccccgccctgcgcaacccctcctcgccgcgccgtcaagacgcctgtcttcttctcatctcgtcggcgctcgtcctccctccctccctcccccaggtcctgcttcctccccatggcgtggatctggatggtcctcgcggcgggagccgtgctcctgtgggcgatctctctgggaaggatcttctcctccgccgcgccgtcctgtgtgcccctgagcccgcagttcatgccccctctccgcggcgacaggaggacccggaacgtgatgctcgtcgtcgcccaccccgacgacgagtccatgttctttgctccaactatccttttcctcaagtcaaaaggtcacaacattcacattctgtgcatgtctcgaggtaatgctgatggtctcggagatactcgtaaagaagaattgtaccatgcctgtgaaacccttaagattccacatgaacaagttgaagtcttggaccacccgaaattgcaggatggatttcatgagaaatgggaccatgaactagtatcagaacttgtcatggagcatgtccaactatgggtcattgacatgcctctgcttactggtgcaatatttgatggcattttagattgtgacatttgattcatatggagtatcaggccacccaaaccacagagatgttcattacggcatatgcaagtttctccatgcgaataggcaaggaaatgttgaagcttgggaactagcaagcctgaatattcttcgcaagtacagtggtccggttgacatttggctttcttcgctgatctccgtctcaaggtcaaagcagtcaatctatactctagttaacagtagcccgtccagaagctatgaggcaatggctgcacacagaagtcagtgggtttggtttagaagagtgttcgtcatgctctcaagttatacctacataaacatgctacagaaaatttagcacgtgatacgacgtcatatcagagcgagccgccattgtcgtctccaatgtcgtacttgtgcgttgtcaattgtatatttgtactgtatgtatcaatgattttataggcagtgctcatagggtgactgtacggcttcttgttcccaattctctaccatagtatatttgtaagttcttgggtgtggtcaaacgatttctggttcgatttgacgtccttgacgaactgacctgctaactaatcaatccttccgttct

SEQ ID NO: 23715 - DNA, 846 bp, Zea Mays
ccccaatccatacaggcccttattgcccacggcccacggcccaatgccgaaccaggcccagctccattttcgccgccgccgttggccggcaacggcattgccgcgcgcccgccgtatctggcttcggctgccgtcgcctccctccccgccctgcgcaacccctcctcgccgcgccgtcaagacgcctgtcttcttctcatctcgtcggcgctcgtcctccctccctccctcccccaggtcctgcttcctccccatggcgtggatctggatggtcctcgcggcgggagccgtgctcctgtgggcgatctctctgggaaggatcttctcctccgccgcgccgtcctgtgtgcccctgagcccgcagttcatgccccctctccgcggcgacaggaggacccggaacgtgatgctcgtcgtcgcccaccccgacgacgagtccatgttctttgctccaactatccttttcctcaagtcaaaaggtcacaacattcacattctgtgcatgtctcgaggtaatgctgatggtctcggagatactcgtaaagaagaattgtaccatgcctgtgaaacccttaagattccacatgaacaagttgaagtcttggaccacccgaaattgcaggatggatttcatgagaaatgggaccatgaactagtatcagaacttgtcatggagcatgtccaactatgggtcattgacatgattgtgacatttgattcatatggagtatcaggccacccaaaccacagagatgttcattacggcatatgcaagtttctccatgcgaataggcaaggaaatgttgaagcttgggaactacacataatattggaggaaagatgatc

SEQ ID NO: 23716 - DNA, 933 bp, Zea Mays
ccccaatccatacaggcccttattgcccacggcccacggcccaatgccgaaccaggcccagctccattttcgccgccgccgttggccggcaacggcattgccgcgcgcccgccgtatctggcttcggctgccgtcgcctccctccccgccctgcgcaacccctcctcgccgcgccgtcaagacgcctgtcttcttctcatctcgtcggcgctcgtcctccctccctccctcccccaggtcctgcttcctccccatggcgtggatctggatggtcctcgcggcgggagccgtgctcctgtgggcgatctctctgggaaggatcttctcctccgccgcgccgtcctgtgtgcccctgagcccgcagttcatgccccctctccgcggcgacaggaggacccggaacgtgatgctcgtcgtcgcccaccccgacgacgagtccatgttctttgctccaactatccttttcctcaagtcaaaaggtcacaacattcacattctgtgcatgtctcgaggtaatgctgatggtctcggagatactcgtaaagaagaattgtaccatgcctgtgaaacccttaagattccacatgaacaagttgaagtcttggaccacccgaaattgcaggatggatttcatgagaaatgggaccatgaactagtatcagaacttgtcatggagcatgtccaactatgggtcattgacatgattgtgacatttgattcatatggagtatcaggccacccaaaccacagagatgttcattacggcatatgggatttcgttatgttggacatcaggacagttgttctttgactgtgcacaacacgttctcatttcatttacctgtgcatttattttacacatatgcctctcacatttatgagatactccctccattccaaactatagttagttttggcttttctagatacttg

SEQ ID NO: 23717 - DNA, 1326 bp, Zea Mays
cgccgcctccgtcgaacacagagtcacttcgccacgaacaaaagcgcatcgatctcgctgtcgtcactcctcgtcacccagccacgaacagaggcaccacccagcatggccctgcaggcggcgctcctcccatccaccctctcatccgtccccaagaagtgcagcatcgccgtcgcggcgaaggacacggcattccttagcgtatcccagaaggtgcaggcgctggcggagaccggcaagtggcacgtggtgatggcctgccgcgacttcctcaaggcggccaaggcggccaagggcgccggcatggcggacggcagctacaccatcatgcacctggacctggcctccctcgacagcgtgcggcagttcgtggacagcttccggcgcgccggcatgccgctcgactcgctcgtctgcaacgccgccatctaccggcccacggcaaggacgccgacgttcacggcggacggatacgagatgagcgtcggcgtcaaccacctgggccacttcctcctggcgcgcctgctcctggacgacatgcagaagtccgactacccgtcccgccgcctcatcatcctcggctccatcaccggcaacaccaacacgctggccgggaacatcccgcccaaggccgggctgggcgacctccgcggcctcgcggcggggctgcgcggccagaacggctctgccatgatcgacggctccgagagcttcgacggcgccaaggcgtacaaggacagcaagatctgcaacatgctcaccatgcaggagctgcaccggcggtaccacgaggagacgggcatcacgttcgcgtcgctctacccggggtgcatcgccaccacggggctgttccgcgagcacatcccgctgttccgcctgctcttcccgcctttccagaagttcgtcaccaagggcttcgtgtcggaggcggagtccggcaagaggctggcgcaggtggtcagcgaccccagcctcaccaagtcgggggtgtactggagctggaacaaggactcggcgtcgttcgagaaccagctgtcgcaggaggccagcgatccggagaaggccaagaagctctgggagatcagcgagaagctcgtggggcttgcctgagctcgccggcacggcgacggcgacatgatgactctgtcgagcagaggagctttcgcttcgttgtattatgtgtaccattagcatccattttgtttgtttctagaagttggtaatgaccgtcggagaagagcctgtaattgttcgatcatgtattattgcttacaaaatttttttcaaaaaccgatgaaataaaacaacaggcttaacatctctaag

SEQ ID NO: 23718 - DNA, 1320 bp, Zea Mays
cgccgcctccgtcgaacacagagtcacttcgccacgaacaaaagcgcatcgatctcgctgtcgtcactcctcgtcacccagccacgaacagaggcaccacccagcatggccctgcaggcggcgctcctcccatccaccctctcatccgtccccaagaagtgcagcatcgccgtcgcggcgaaggacacggcattccttagcgtatcccagaaggcgctggcggagaccggcaagtggcacgtggtgatggcctgccgcgacttcctcaaggcggccaaggcggccaagggcgccggcatggcggacggcagctacaccatcatgcacctggacctggcctccctcgacagcgtgcggcagttcgtggacagcttccggcgcgccggcatgccgctcgactcgctcgtctgcaacgccgccatctaccggcccacggcaaggacgccgacgttcacggcggacggatacgagatgagcgtcggcgtcaaccacctgggccacttcctcctggcgcgcctgctcctggacgacatgcagaagtccgactacccgtcccgccgcctcatcatcctcggctccatcaccggcaacaccaacacgctggccgggaacatcccgcccaaggccgggctgggcgacctccgcggcctcgcggcggggctgcgcggccagaacggctctgccatgatcgacggctccgagagcttcgacggcgccaaggcgtacaaggacagcaagatctgcaacatgctcaccatgcaggagctgcaccggcggtaccacgaggagacgggcatcacgttcgcgtcgctctacccggggtgcatcgccaccacggggctgttccgcgagcacatcccgctgttccgcctgctcttcccgcctttccagaagttcgtcaccaagggcttcgtgtcggaggcggagtccggcaagaggctggcgcaggtggtcagcgaccccagcctcaccaagtcgggggtgtactggagctggaacaaggactcggcgtcgttcgagaaccagctgtcgcaggaggccagcgatccggagaaggccaagaagctctgggagatcagcgagaagctcgtggggcttgcctgagctcgccggcacggcgacggcgacatgatgactctgtcgagcagaggagctttcgcttcgttgtattatgtgtaccattagcatccattttgtttgtttctagaagttggtaatgaccgtcggagaagagcctgtaattgttcgatcatgtattattgcttacaaaatttttttcaaaaaccgatgaaataaaacaacaggcttaacatctctaag

SEQ ID NO: 23719 - DNA, 953 bp, Zea Mays
gatattatcgacatgtctgtccgataaacaaaaatacaacatatttatattcatcatgaaccttccactgttataagtacttgatctcatcctccatggacaaaactgttaagctctgggacatcactaccagtacctgtttgaaaacattctctcatacggactatgtgacttgcatccagttcaaccctgtagatgataacttcttcattagtggatcactggatgagaaagttcgcatttggaatgtccgagatcgtaagattgaggattggaatgatcttcatgagatggttactgctgcttgctattcccctgatggacaggttgcgatggtgggctctcacaagggaagctgtcatatatttgatacatctgagaagaagcttcagtacaaaagtcagatagatttaagaattaggaaaaagaagtcaggccagaagaagataactggcttccagtttgctcctggaagctcctcggaagttctgattacttctgcagattcgagaatacgagttgttaacggcgatgaatttgttcacaagtttaaagggtttcggaacacgagtagccaaatctcatcttctgtagctcataacgggaaatacgtgatctgtgccagcgaggattctcacgtctatgtgtggagacatgacaacagttcccaccctagcaagagcaggagcacagttgacgtaaccaactcatacgaacatttccactgccatggtgtgaccgtggctgtcacatggcctggtgctgaagcccgatgttcgtttggacctgaaagcaacaagcacagtgattcatatgtggcaatgaactctggcccggacctcccagttgagaacactcggcacagctctgatgcatctgatatcatatgcaacgagagcccagcttgccaaggcgtgaccagcagaaccccagcagacactaggcgacggagc

SEQ ID NO: 23720 - DNA, 375 bp, Zea Mays
caaagaaggagttgattacaaagtacagaggctctgtcgaagagctccttaagggagatcaaagataaagaaagcatcataaggcttaatatttaaggatttattgtcgtcaatacttgaactctgttacttgaattcggtggtatgcatcaatagagccggaagatgttctggagtaaggacctggcagtgtgatacgggaatttgacatctgaatagatattctcccttgtccctctggtaaaaaaaactgttgtcacatttgccttcgctgtgacttggatgtatcatgtatatctttgaccattgatatcttggttaatcagacggtgcattacaatcctggcctcattcatataccacgattggtttgca

SEQ ID NO: 23721 - DNA, 1445 bp, Zea Mays
ctatcgtacaacaacagttctttagacggccatatcagctggacacagccaccgtactccgagattagcgcccccgtcggccaaacagtaccggactggccgccgttcacagttcacgccccgcgtggtccctatttcccggcgagcactaggctaccgccgccgccgtcaggtgccggtgcccagaccttcgtcgtgcccatttcaccggcgacgagcacccactagcccctgcccgcaggtgttgggaactggggatagagatggatcaccaccacccgcagcagcagcagcagcagtacggcgatccttaccgtgggctcatgacgtccccgcagcccgaccaccacctccacgctcttcagtaccatcagccgcagccgcagcaacagccggcgcttatgtctccaccgcagccacagccagcactgatgtctccacagccgcagcagacactgatgtctccaccgcagccgcagcagcatcaccacgcctctcttgcctcccacttccacctcctacatttggttacaagattagccgatgctattggtacaggaacaagggaccaaaatttcgatgcactggtaagaatcaccatttactaattttcatttgttttatggatcaatgttcttgtactcatagtgcatgatcttgtcagaaacaatagttgtagcttcttctaggcgtggagcctgaatattcttatacagagtttgaattgacatgtgatgtaattcttaaatcacttcccagagaagagacaggtcacaaacaatgctctagtgttggtggtgcacaggaagcttgggaccagcccagggtgacagggtctgcacggttcagttttccatagccaaaaccaagccagtggaagacatacccttagttatgcaattatgcaattgcagaagcatgttaaaattactactatgttgaagaattgaccagccagtttgctaggtgccaacaattgttgaactccatatcgggaacaataagctcaaagtctactacggttgagggacaaaggcagagtttggacgaaacacggcagctgcttgatcaaagaaaggagttgattacaaagtacagaggctctgtcgaagagctccttaagggagatcaaagataaagaaagcatcataaggcttaatatttaaggatttattgtcgtcaatacttgaactctgttacttgaattcggtggtatgcatcaatagagccggaagatgttctggagtaaggacctggcagtgtgatacgggaatttgacatctgaatagatattctcccttgtccctctggtaaaaaaaactgttgtcacatttgccttcgctgtgacttggatgtatcatgtatatctttgaccattgatatcttggttaatcagacggtgcattacaatcctggcctcattcatataccacgattggtttgca

SEQ ID NO: 23722 - DNA, 1082 bp, Zea Mays
ctatcgtacaacaacagttctttagacggccatatcagctggacacagccaccgtactccgagattagcgcccccgtcggccaaacagtaccggactggccgccgttcacagttcacgccccgcgtggtccctatttcccggcgagcactaggctaccgccgccgccgtcaggtgccggtgcccagaccttcgtcgtgcccatttcaccggcgacgagcacccactaggtgttgggaactggggatagagatggatcaccaccacccgcagcagcagcagcagcagtacggcgatccttaccgtgggctcatgacgtccccgcagcccgaccaccacctccacgctcttcagtaccatcagccgcagccgcagcaacagccggcgcttatgtctccaccgcagccacagccagcactgatgtctccacagccgcagcagacactgatgtctccaccgcagccgcagcagcatcaccacgcctctcttgcctcccacttccacctcctacatttggttacaagattagccgatgctattggtacaggaacaagggaccaaaatttcgatgcactggttgaagaattgaccagccagtttgctaggtgccaacaattgttgaactccatatcgggaacaataagctcaaagtctactacggttgagggacaaaggcagagtttggacgaaacacggcagctgcttgatcaaagaaaggagttgattacaaagtacagaggctctgtcgaagagctccttaagggagatcaaagataaagaaagcatcataaggcttaatatttaaggatttattgtcgtcaatacttgaactctgttacttgaattcggtggtatgcatcaatagagccggaagatgttctggagtaaggacctggcagtgtgatacgggaatttgacatctgaatagatattctcccttgtccctctggtaaaaaaaactgttgtcacatttgccttcgctgtgacttggatgtatcatgtatatctttgaccattgatatcttggttaatcagacggtgcattacaatcctggcctcattcatataccacgattggtttgca

SEQ ID NO: 23723 - DNA, 743 bp, Zea Mays
cagaagcacgccaaagatcataatgattcatgagcaactgatatatcatcatgaagatgagcaatggccaatggacacacatgtttctatttctccagtatattatgatcagagcccgcatatggtacaactcagcaacatgagtgggattaaatgaacaccaccaacaacaataacggcatcaaaactaagcaacacgttacgaatttcataagcctttgtgaagacgaacaccagtgtctcggcgacctcagtatgaaatgaatggatttgtaacacaattgtgatacattatgattcatctggggtagtttccccatgttggcagcaaccatccttcggtaaaatcttggggtagtttctctccaaggtgagcgccttatgtccatccaatacaaatgagataaaaaaaacatgcttggcctggttgtttccaactcatttgtacaggctgagtcccaggcccccaatatacagaacagtatacctcttgatgctctcctatcctatgaccttcctgatgacataccagaggtggcatgtatctccaaggagtgctccggaatgtaagcaaggcctgcagggcaacaatcacttctcaagtcttaaaaggataaaaggtagatgatacgaatacgaaccagccaaaacactgaatgtatttaagacatttggtagcctactatatccactgtattaatattcccagatcacttcaaaccaggatgacacaaataacaaac

SEQ ID NO: 23724 - DNA, 1105 bp, Zea Mays
cgcccacaaatctcggccgcggaacagaactggtggcgtactgtccactggcaacaccttcgagaagattcctctcctctcctccccgcgcgctgcctccgctccgctcatgtcgtccgcgccgagcaccacggcgtccaccatcgcagcctctatccacacgccgttctcctcgggtccccgcggggcccgccttccggccgcgctccgcctctcgctcgctcagctccggtcggccggatgccgcgcggcgccaggtcgcctcgctcgccctcgcgcgcgcgttcggtgcggcgcggcggccaggttcattgggcagggcgagttccccgcggaggtgctggagtcggagctgcccgtgctcgtggacttcgtcgccgactggtgcgggccgtgccgcctcatcgcgcccgtcgtcgattgggcctccgagctgattgaagagtacaaggtttatggtctcccgactttgattctcttcaaggatggccaagaggtgccaggcagccgacgagaaggggcaatgataaaagacaagttcaaggaatacctggaacctctgttgactacaattacaacagccgcttaaggtcgttgcctccagcttgagcactgaggatgccaacggcactgggaatgttgaaggtttttttccttacatgagcaccatgtttagtttgtaattaactacgttgcgggatcatgtttgactatgtatgattgtcatttgcgtatatttggtaaggtatacataaagggttgtgatgaggtatgcccccactaattttaatacaaagcaagttcgttttcgctatctttgtggcacataatggtctgttgtttccaaaattatagtatggctgatactacaaatgatcaatctgcagtgtaagttttgatatgcccatgttgtattcttggtcaaatatcccttcgcctctgaggttttgcacaaatttacccagtcaaagtatcaagcgcatcatatggaattatgaactgaaatacagaactggcttctttccatagcttgatgcattcagccaaaatacagaactagcttccattccatcagaacagagttcatctgatacatgcctggctt

SEQ ID NO: 23725 - DNA, 6134 bp, Zea Mays
ttctcttctgcgttgagattgtagttatggaaatgatttggttgagaggttttatgatcagttcctcccaatgcgtgttacacaggatgcttctttatgtactgcgaactccacgattatccgaatgccattatcgtcaaaatgcctcaaagaacttgaagcaggttgcaatatagtacagcgggtttttgaccgatttacacagaatccatccagtactctcctattcttgaggtcaatcattcaggtatctttatcaacatgggaggatggggcctctcagtcaactctgaattattctgtacttgttgacccatctgttgcttctttgagaaacccattttcggaaaagaaatggagaaaatttcaaatatccagaatattttcaagtacaagtgcagctatcaaaatgcaagctatagatgtgcatgtgattgagagtggctgcagttatattgacaaatggtttgttgccctttctcttggatcgggtcaaacacgaaacatggctcttgacaggcgttatcttgcctataacctaaccccagttgctggagtagcagcgcatatagctcggaatggagtatcaaccaatatacatccatctagttgtatattatctcccttaccactatctgggtttataagcatgccagtcacaactttggggcatttcattgtgaggcacagtggtgggcgctatatttttgacagtccacgtgatgcatctctgccagaacttaaagaggacagggtcaggttggttgaagcatggaataaggaacttatgttatgtgtgcgtgattcatatgttgagatggttctagaatttcaaaagcttaaaacagaccctctatcttctgctattgaaccaaggtctgcacaatctgttagtgctatattacagacatatggtgatagggtatactctttttggccaagatcgaagcagaatccaacttcgttcactgggcgtgtttctactggaactaatatggattcaccaagggcatctaaagcggattggcaatccttaatagagcaagtgataaaacctttctatgtacggttagctgatcttcctgtttggcaactttaccatggaaatcttgttaaagtggatgagggtatgttcttagctcactcaggaaatggagatgacgataacctcccatctgatagtgtttgtagtttcattaaagagcgctatcctgttttttctgtgccgtgggagttggttagtgagattcaggcagttggagttaccataagagagatcaggcctaaaatggtccggggactactaaaagcttctccatccattttacttagatccattgaaacatatatagatgttcttgaatattgcttctcagatatggacccttaccgcttctcggatgatctacctgatgaatcaagagttaacagccaacatgttggaacaacgaattcttcaatatcacattctatgccttcttcgagcagctcactgtcttaccaatcaagtactcagatggcaggtacttctggaggcgatgcacttgaaattatgacatactttggaaaagccctatatgactttggtaggggggttgttgaggatatcagcaaaaccaatagtccagcattccacaggactcaagctgctgaaactaatgtgttgtcatccatcatttctgagcttaaaggtgttccatttccaacatcgacaatgcgtctaacaaagttgggaatggctgaactctggatagccaatgagcagcagcagctattgatgagccctttgctggatcaatttatccattataaatgtctggaaaaacccttcttggctctgctgctttccactcaggttatccataggcctctgaaactgaggagcttttctccccacttactagcaggttatttgaagcgcatacttgatgagcgttggatacggattgtactagagaacaaatcctcatggattccttgggacaataatgctgaatcatcaactactccaactcccaaatggattagaagtttctggaaaatttttagttctttgaacggtgacctctctcttttgtctgattggcccttagttcctgcttatctggataagccagttctctgtcgtgtgaaggaacgccatctaatatttgtgccaccaattagtgattcaccagaccctcctggagatgatgtagctggacagcttgatacaccggactcccccagagaagatactagagcagaacagaatgcagtgcttgatactgcatttaggtcaatgaactcggaatttccatggttaacttctctgcttaaccagttgaatgtaccaatttttgatccctccttcccagagtgtggcgcaatgtgcaatttatttcctccaaatggtcgtactcttggacagacaattgtttataagttggttgcagccaaaaatgctgcacatttaccttcgctaattagcctatcaagtgaagattgcgataaactatttgggttatttgtttcggagttcatattaactaacaaccacttgtatcagagagaagaattggatgtcttgagaacacttccaatgtataagacagttacaggaacatacaccagtctgttaggttccgatcattgcattctttctcctacagcattctttcacccgagcgatgcccggtgcctttcttgctcatcaaatgcacatttgtttcttcaagctttgggggttgaacaattaaatgatcatgaaatactagtgaagtttgcgttgcctggatttggaaataaaacagctcaagagcaggaagacattttgacctacttgtatgctagctggaaagatcttcaactgaactctgctgtagtagaaaccttgaaggagacaaactttgtggcaaatgcaaatgaattttgtaaagagtttttcaaacctgaggaattacttgacccttcagatgctctgttgacttctgtgttttctggggagagaaataagttccctgctgaaaggttcatgtcagatggttggcttgttatactcagaaaagcaggccttaggacatccacagaagctgatatgataatacagtgcgcaagaaaaatagaaaccatgggacatgatattatgtcgtctttagaagatgctgatgactttgaggcagatttcacagacagcaaaaatgaaatcccttttgagatatgctctctggcagaatctgtagtaaatgtgctttttgcaaattttgctactttgtatgatagtgctttttgtgaaaagattggaaaaattgcatttgtgcctgctgaaaaaggttttccaagtattggtggtaagaggggtggtcgaagggtacttgcctcatacaatggagctatcttattaaaagactggccattagcatggagttctgctccaattcttaccaaacaaacaattgttcctcctgagtattcttggggagcatttcggcttaggagtccacctgccttcagtacagtttttaggcacttacagattgttggtagaggcaatggtgcggacacactagcacactggccaacctcagcagagataatgacggtggaagatgcctttctacaggtcttgcaatacttggataaaatatggggaacaatatcttcttcagaaaaaaaagaactggagaaactggcatttataccagttgcaaatggtactcgattggtcccagtgaagtcactttttgctcgtctgacaattaacatgtcaccttttgcttttgagcttccaagtcggtatcttccatttgtttcccttcttagagagattgggatgcaggaaagccttacaaattcatatgcaagagaacttcttttggatatccaaaaggcatgtggttaccagcgcttgaacccaaatgaactccgtgcagttatggaaatcttggaattcatgtgcaatggaatcaaccaaagtatcacagatggatcagatgggccttttgattcagtaataccagatgacggctgtaggctggtcactgctgcatcatgtgtgtatgttgacccatatggttctcgtttactgagtaacataattacatcaagactaagattcacccatccagaccttcctcagaatatctgcaaggccttgagcataaaaaagctctctgatgtcattgtggaggaacttgatggaaaagaagaaattaaagttgtcaatagcattcactcagttactctagacagaataaaagagaagctgcgaagtaaatctttgcaagatgcattaaggattgtgatgatcagcgtaaccaatcatttcccttcatttgaagcccttgctttggttcagatagaacggacactagaggatatatcacagaaactgcaactggttcaacgtctccatactcgctttctcttacttcccaatctccaagatgttacaagaaccatccagcgtccttctattcatgaatggtcaagcaacggaatgcaccgaagcatttgtttcgtcaacaaagctacgggttatattctaatcgcagagcccccaagttttttgacgatatatgatgttatcgcaattattgttagtcacaggttaggggcaccaatgatcttgccgattgcctcagtgtttgcatgcccagatggttcagagaaagaagtccttcaaattcttcacctgggttcagactttggagtttcaaaacgtgaagggagatacgacgcttcccttggagcagaattgttatctcaggatgctcggcaggtgcaattccttccattaagaccgttctatagtggtgaaattgtggcatggaagacaggcaaagagggggaaaagctcaggtatggtagggtccctgaagatgtaagaccctcagctggccaagcactttacagatttccagtagagacagctcctggcgaaactcgcatgatgctttccagtcatgtttactcatttaaaagtgtttcaatggctgatcttctgtctgcaccttcccaagtgaatggtgatgtggcattaggtggccaagagaacctcttggccaccaacactggcactgaagtcaccaaggatgcggatgctggacttgaatatggaaaagtatcttccactgaactggtacaagcggtccatgatatgctttcagctgcaggagtaaggatggatgctgagaaggaaacactctttgaggctactctttccttgcaagatcagcttaaagaatctcaagttgctctcttggtagagcaggagaaggcggaggcggctgtaaaagaggctgatgtcgccaaagcagcatgggcatgccgtatctgcctgaatgctgaggtcaacatgaccatcataccatgcggtcatgtcctatgtaaccgatgctcaagttcggtttcgcggtgcccattttgccggacgcaggtggccagaatgatgaaaatattcaggccataaaaaacattgaaggacgtttggtctgactaaccgcttcagcctgtgaatgtgttacgatatcggggctcggctcccttctggttgtgcgttgcattcctttctggtctgatgcatctcattattctccatcggtgatgattggtaatccgatatggggggtgcaagtatagttacgttgtacaggaacgatgcattgcagtgtacatattccaaaatgaaatcattttacacacttcgaagggcatcgatgtctgaagctggttttctcgtgcaatactttcagagtcaacactacactgccctggttatccattcagcatgtatggtggtgtccaacaaagacccattccttgtgaaaaaatcttagcactggctccttcaatacgaaagaaacgacatactgaaatcagctacgatgataggctgctagcctacgggctaaacgtggtttcgttactgagcagcgggtaaaattgtcaattcgtacaataaactggggcacctcggccctcagtcataggctcatagcatttgatgcaaccaggtgaccaggctactgttccatttgcatgtttctttttccagacttcctcgaatcatgctttcacagtcgactacaacttaatcccgttacccatgaattgaatgtgattggaaaaaattaaggagtttgacctacttggga

SEQ ID NO: 23726 - DNA, 12205 bp, Zea Mays
aatcaaggacaagaaacacggcgacgaaaaggctaggtagagtcaaatccccgggagaccaaccacccccgcaccgccacgaacacgcccaaatcggagagccataccaaaccaaagccttcgcatccctccggaaccctagcatcctccctcctcgctcctgggatgccccagtagctccgatcggcgcctcaccgccatggatccgggcggcgggggcgggatgctcctggaggacttcggccagcgcgtggacctcacgcgccgcatccgcgaggtgctcgccaactacccggagggcaccaccgcgctgcgggagctcatccagaacgccgacgacgctggcgccgggcgcgtccgcctctgcctcgaccgccgatcgcacgggagggcgtcgctgctgtcccccgcgctcgcgcagtggcagggtcccgcgctgcttgcttacaacgacgcggtgttcaccgacgaggacttcgccagcatctcccgcattggagacagcaggaaggtcgcccagacgtggaagactggccgcttcggggttggttttaactcagtttaccacttgactgatttgccatcgttcgtgagtggcaagtatgttgtcctattcgacccccagggtgcttatctaccaaatgtgtcggcatcaaatcctggaaagcgcatcgactatgtcagttcgtcagcaatcacaatgtaccatgatcagttttcaccctactgtgcgtttggctgcgacatgaaagcatcatttcagggaactctgtttcgttttcctttgaggagctctgagcaagcatcttcaagtcggttatcaagacagtcatacacagaagatgatattttatctctttttgcccaactgtaccaagaaggcgtatataatctgctgttccttaaaaatgttctatcacttgagatgtatgtgtgggaatctggtatgaccgagccaaaaataatatactcttgctacttagggccacagagtgaaaagctgtcctggcatcgccaagcccttgtcaggttctctggcactcctgttgaatcttctaagcagaagctggactctttctcgatggattttatatcagaagcattcttgggcaacaagattgagaagaagagctctacctattttatcatccagggaatggcatctgcatcaagtaaaattggtatttttgcaactgcagctgccaaggaatatgatcttcacttactgccttgggcttctgttgctgcttgcatctccaacacagggcttgaggatactgttctcagacagggtcaagctttctgttttcttcctttgccagtaaggacaggactatctgtgcacgtcaatggttattttgaagtttcatccaaccggcgtgacatttggtatggtgctgacatggacaggggtggtaagcttcgctctgattggaacaggctactgttggaagatgttgtcgctccgttgttcagagaactgctgatgaaattgcggacgctttctgactccacaatatcatattattcactgtggccaactggtttatatgaggatccctggagtatccttgtggagcaaatttacaaggttatttacacctcgccagtcttgcactcagagattgaaggcgggacctggatatcaccggctgatgccttgcttcacgatgagggattctcaggaagcaataatcttaatgaagccctcgtgttggtaggcatgccaattgttcgtgtatctaatgcaataggcgatatgttttcaaaattttatatgcagtctatgctcaaaatagtaagtcctgctatagtgaggcatttcctcaaggattatgctaaacttgctacgctaggaaagtctcataagttaatattattggaatattgtcttactgatgtttacaatactgatatcggtaaatgcatgaatggccttccactgattccactagcaaatatgcggtatgggactttttctgctagttcgcaagaggactattattatgtctgtgataacatcgaatatgagcttctagctgaagttggtgatagaatagttgacagaagcatccctcctgtactactagacaagctgtatcagatagccagtgattcccaggcgaacattaggttcattgatggcccaatcttctgccagctcttacccaggttatttcctcctggatggaagcttaaagatcaagttccctggaacccaggcttgggtgggtcatctcctacagcagcatggtttaaacttttttggcagtatatagggggacgctcgtatgaccttcatttgtttagtgattggcctatactgccatctacctttggccaccttcacagggcatgcacaagctcaaaattaatcaaaacagaatcactgtctagtttgatgaatgaactcctggcaaagtttggttgcaagatactggatgctgaatatttgagtgatcacaaacaattgtcattttatgtatatgatggtgatgcaactggagttcttcagtcaatctttgaggttatctcattggagggtgttgatttgcaatctctgtttcaacgcattactcctggtgaaaaaaatgagctgtaccagtttcttctggatccaaaatggtatttaggagcctgcctttctgtcgtaagtataaaccaatgtaaaaagcttccaatcttcagggtatttgatggaggttctcccagcacttatggtttctcggatttgtttagttcaagaaagtatctgccacctcttggtgttcctgaccatttactcaatgacgactttattttctctatttgcccaagcgatgaagatatcataatgagatattatggcattgaacgcatgccgaaatcgaacttctaccagaggtatgttctgaatagattagacaagctgcaaacggagttgcgtgattcagttcttttaacaatcttacaagatctgcctcagctgtccttggaggatccaatgttcaaggaaaccttgaaaattcttagatttgttcccactatcaatggaactttgaaaagcccacaatctctttatgatccccgggtggaagaactttatgttcttctccaggaatcgggttgctttccccatggtttatttcaaaatccagatgttcttgatatgctgctttgcttggggcttagaacttcagtttctaccgataccatattagaaagtgctcgtcagattgattcacttgtgaacatagatcagcagaaggcccattcaagggctaaggtccttctttcatatcttgaagttcatgctcacaaatggtatgtgaataagctatttgatggtcgtaagaaggtaaacatgctagctaaagttaccactgcgctcagacctcgtgacaaatcttgggaatttgatcttgagaagttctggagtgatctgagattgatttgctggtgtcctgtgttggctactgcaccaagtccagctttgccatggccttcagtatcatcaatgatagctccacctaagcaagtaaggatgcaggaagatatgtggattgtttctgctagctcacgcattctcgatggtgaatgcacctcctcggccttgtcgtacagtttaggttggttgtcgcctccatcagggagcgtgattgcagctcaactgcttgaattgggcaagaacaatgaaattgtgactgatcaagtccttcggcaagaattagctttggtgatgcctaagatttattctttgctgacaaacttgattggttctgatgaaatggatatagtgaaagtggttctagaaggatgcagatggatttgggtgggtgatggatttgcgaaaacagatgaagttgttttaagtggccaccttcatctagcaccatacattcgtgttgttccaattgatttagcagtgttcaaagacttgttcttggaactcggcataaaggagcacctgtaccctgttgattatgctagtattcttggcagaatggccataaggaaagcttcagcttcacttgaagctgaagaactaagaacagctatcctggttgtgcagcatttatctgagttccggtttcaggatcagcaaacacaaatatatttacctgattcttcgtctaggctttgtctatcttctgaacttgtattcaatgacgctccttggttgcttgattttggtcatgacatcagtgggagtgcatcaagcattgctttaagctcaaaaaagtatgttcacaattttgttcatggtaacatttctaatgatgtggcagaaaggcttggtgttcgatctcttcgccgcctattgcttgctgagagttctgattcaatgaatttgagtttatcaggggttgctgaggcgtttggacagcatgaagacttgactacacggctcaagcacattgttgagatgtatgcagatggccctggaattctctttgagttggtacagaatgcagaagatgctaaggcttctgaggttgtgtttttgctggataagactcagtatggaacttcatccattctttcgcctgaaatggctgaatggcaaggacctgctctctactgctttaatgattcagtttttagtccacaggacctatatgccatctcacgaataggtcaagacagtaaacttgagaaaccttttgcaattggaaggtttggtcttggcttcaattgtgtgtatcacttcacagatattcctggatttgtttccggtgagaatattgtcatgttcgatccacatgcctgttatttgccaggaatatctccgtctcatcctggtttaaggatacagtttgtaggaagaaggatcttagatcagtttcctgatcagttcgccccattcttacattttggttgcaatttgcaacagccatttccaggtacactcttccggtttccccttaggaatgcggctgctgcttcgagaagtcaaataaaacgagaacagtatgcaccacaagatgtggaaatgcttttctcttcattctccgaagttgtatctgaggctctactttttctccgcaatgttaaaaaggtaactctatatgtcaaggaaaacaacagtaaggagatgcgacttgttcatcgtgtctccaggcataatagctctcagataggtaaagaacctcatgcacttggtgcaatgcttgcgtttatacatggaagccaaccatcaggaatggatagaaatcagtttttcagtaagttgaataagactaaagacagtgacttgccctggagttgtcagaaggttactattcttgaggaaaacccttcttcacacttgttgcactcatggattttagctgaatgtataggtgggggtcatgctagaaagttgtcaactgcctctgttagtaaatctcacttctttgttccgtgggcatctgttgctgcatatctgcattcagtgagtgtagatgatacaaaaggactatcagctgaagctgaagtcaaccatgataactcagttttcacaaacccagatcttggatcttctaagttcaggaaaaattttgaggctcgggccttttgctttcttcctctaccaatcaatactagcataccagtgcatgtaaatgcttattttgaactctcttcaaatcgaagggatatctggatcggaaatgacatggctgggggaggaagagtacggtcagaatggaatttagcgctgcttgaagatgtcgttgctcctgcttatgggcacctgcttgcagctgttgctgaagagcttggtccctctgacttgtttctttcattttggcctagtgctgcaggtgtggaaccatggtcttccatggtgaggaaactctatgtttctattgcagaacttggaattcacgttttatatacaaaagctcgaggtggtcactggctgtcaacaaggcaggctatttttccagatttcagtttctcaaaggcaatggagctggcagaagttctctctcaagctggtttgcctgtggtatctgtaaccaagccaataattgacagtttcattaatgcatatccatcagttcatctactaaatcctcatttgctgagaaatttgttgatccgacggaagcgtggcttcagaagcagagaagaggctatacttgttcttgagtattgcttgagtgatatgggagatccttccttttgcgataaattgcaaggtttggctctccttcctgtggcaaatggatcattcacaacattcaacaagcgaggggagggtgagagagtattccttacttcacaaatagaatttgaacttcttaaggattccataccacatcttgttattgacaactctttaccagatggtgtttcgaagaagttatatgacatagcttattctgcgtgcatgaacatatatatattcacaagtaatcttctcattgagctgttgcctaggatcttgccacctgaatggcaacatgctaagcagttgtcttggtttcctgagcagcaaggtcagccaagtatggaatggatggtatcactctggaattttttgaggcattcctgtgacgatatttcagtttttgcaaagtggcctataatacctcttgtagatggcaaggttgtgcaacttgggaatgctgcaaatgtaataagagattatggatggagtgaaaatatgcattccttgcttcaaaaactgggatgtttatttctgcgatctgatctgcagatagaacatccccagttagcgaattttgttcaggaatccactgctgctggtgttttgaatgctgtgcagtctgtagcttctaatctccaggatatcaaggaattgtttatgagcacttcattggcagaagcacacgaactccgaagtttcattttccagtcaaagtggttttctggaaatcagatcagctcctcccatatgaatacaatcaggaacctcccaatatttgaatcttataaatctagggaacttgttagcttgacgaatcctagaaaatggcttaaaccagaaggggtgcatgaggatttattggatgcaagctttataagaactgaatctgtgaaggagaggtcaattttggtatcatactttgatatcaaggaacctcaaaaggttgaattttacaaggaccatgtccttcctcgaatgtcagagtttctattgcagccagctattatttcagcagttattcgtgatgtgaaactgttgatagataatgatgattcagcaagagctgcattatgtgagaccccttttgtcttagcagccaatggagcatgggtccagcccttcaggctctatgatcctcgtgtgcccgagttactgaagttgctgcaccaagatactttctttccttcagaaaagttcatgatgactgaagtaattgaattgttgggtagttttggattgaaaagaaatttcgggtttagtactttgcttgacatggcaaggtcagtttcactggtgcagaattcaggacaaggtgatgcgtttgattatgggcaaaagctacttgcctatctaaacattcttgagtccaaaacttcaaagatggagggcggagaaacttttcttgaggatgggaatctggaagcatctgaaattagtgaaactttggaacctaacaatcacggggatgtgtgtgatccaagcgaccaaactagtgtatctttgttctcaaatttcgattatgatatgccagaagatttattttggtcagagctgaaaaatatttcttggtgtccggtgcatgttgcaccattgctcaaaggacttccatggttcatatccgaagatatcatagcacctccagtcatcacaaggccgaaatcacagatgtggcttgtttcatcaaaaatgcgaattcttagtgcagattcctgttccatgtatctgcaaagaaaactaggctggtgtgatccaccaaatgtgagcacattgtcttcccagttagtcgagctctccaagtctcatgatgaactcaaaatgttttctgcagacacagacattgatgctattctgcaaaaggaggtccaagtaatgtactcaaaattgcaagacataattggcactcccagtggcaacgctctaaaaaagtatctggatggatttcaatgggtttatgtaggagataggttcgtggcaccacaggcacttgcttttgattcacctgtaaaatatcatccctatctttacacagttccatccgaactgtcagaatttaaaaagttactctccgagttgggtgtaaggcagacatttgatggaatggattatctgaatgcgcttcgccgtttagaaggagatgtcaaaggagagccgttgtccacagatcaactcagttttgttcactgtgtattggaagcatttgttgactgttaccctgacagtcaagcacctgatgtgttactgaactcattggcgattccggattcacttggggttctgacacctgctagaaaccttgtctataatgatgcaccctggatgaatgctaatcccacttcaaagaattttattcatctcagcattggcaatgaactggctaataggcttggtgtacgatctctccgtggatcatcattgttggatgatgagttaatgaggaatttgccctgcatggaatatgctaaaataagtgagttgttggctttgtatggtgagagtgactttcttttgtttgatcttatagagctagcagactattgcaatgcaaagaaagtgcatctgatttatgacaaaagagaacatccgaaacagtccttactgcagcagagtctaggtgacctccagggttcttcgttgacagtggtctttgaaggaaccataatgaaccgcgaagaagtttgcagcttccaacttcctcctccctggaaactgagagggaacatccttaattatggcttgggacttcttagtagttactttgtttgtgatgcattgactattctttctggaggttacttttacatttttgatcccttgggcttgactggtggtacgacttccactgctacctcatcagcaagatacttctctttgttaggaaatgatttggttgagaggttttatgatcagttcctcccaatgcgtgttacacaggatgcttctttatgtactgcgaactccacgattatccgaatgccattatcgtcaaaatgcctcaaagaacttgaagcaggttgcaatatagtacagcgggtttttgaccgatttacacagaatccatccagtactctcctattcttgaggtcaatcattcaggtatctttatcaacatgggaggatggggcctctcagtcaactctgaattattctgtacttgttgacccatctgttgcttctttgagaaacccattttcggaaaagaaatggagaaaatttcaaatatccagaatattttcaagtacaagtgcagctatcaaaatgcaagctatagatgtgcatgtgattgagagtggctgcagttatattgacaaatggtttgttgccctttctcttggatcgggtcaaacacgaaacatggctcttgacagattgttggtagaggcaatggtgcggacacactagcacactggccaacctcagcagagataatgacggtggaagatgcctttctacaggtcttgcaatacttggataaaatatggggaacaatatcttcttcagaaaaaaaagaactggagaaactggcatttataccagttgcaaatggtactcgattggtcccagtgaagtcactttttgctcgtctgacaattaacatgtcaccttttgcttttgagcttccaagtcggtatcttccatttgtttcccttcttagagagattgggatgcaggaaagccttacaaattcatatgcaagagaacttcttttggatatccaaaaggcatgtggttaccagcgcttgaacccaaatgaactccgtgcagttatggaaatcttggaattcatgtgcaatggaatcaaccaaagtatcacagatggatcagatgggccttttgattcagtaataccagatgacggctgtaggctggtcactgctgcatcatgtgtgtatgttgacccatatggttctcgtttactgagtaacataattacatcaagactaagattcacccatccagaccttcctcagaatatctgcaaggccttgagcataaaaaagctctctgatgtcattgtggaggaacttgatggaaaagaagaaattaaagttgtcaatagcattcactcagttactctagacagaataaaagagaagctgcgaagtaaatctttgcaagatgcattaaggattgtgatgatcagcgtaaccaatcatttcccttcatttgaagcccttgctttggttcagatagaacggacactagaggatatatcacagaaactgcaactggttcaacgtctccatactcgctttctcttacttcccaatctccaagatgttacaagaaccatccagcgtccttctattcatgaatggtcaagcaacggaatgcaccgaagcatttgtttcgtcaacaaagctacgggttatattctaatcgcagagcccccaagttttttgacgatatatgatgttatcgcaattattgttagtcacaggttaggggcaccaatgatcttgccgattgcctcagtgtttgcatgcccagatggttcagagaaagaagtccttcaaattcttcacctgggttcagactttggagtttcaaaacgtgaagggagatacgacgcttcccttggagcagaattgttatctcaggatgctcggcaggtgcaattccttccattaagaccgttctatagtggtgaaattgtggcatggaagacaggcaaagagggggaaaagctcaggtatggtagggtccctgaagatgtaagaccctcagctggccaagcactttacagatttccagtagagacagctcctggcgaaactcgcatgatgctttccagtcatgtttactcatttaaaagtgtttcaatggctgatcttctgtctgcaccttcccaagtgaatggtgatgtggcattaggtggccaagagaacctcttggccaccaacactggcactgaagtcaccaaggatgcggttggtttcccagtacaactactaccttttgcaagctgaattctgaatttgttaccctaattattgtgcttttactgtttacaggatgctggacttgaatatggaaaagtatcttccactgaactggtacaagcggtccatgatatgctttcagctgcaggagtaaggatggatgctgagaaggaaacactctttgaggctactctttccttgcaagatcagcttaaagaatctcaagttgctctcttggtagagcaggagaaggcggaggcggctgtaaaagaggctgatgtcgccaaagcagcatgggcatgccgtatctgcctgaatgctgaggtcaacatgaccatcataccatgcggtcatgtcctatgtaaccgatgctcaagttcggtttcgcggtgcccattttgccggacgcaggtggccagaatgatgaaaatattcaggccataaaaaacattgaaggacgtttggtctgactaaccgcttcagcctgtgaatgtgttacgatatcggggctcggctcccttctggttgtgcgttgcattcctttctggtctgatgcatctcattattctccatcggtgatgattggtaatccgatatggggggtgcaagtatagttacgttgtacaggaacgatgcattgcagtgtacatattccaaaatgaaatcattttacacacttcgaagggcatcgatgtctgaagctggttttctcgtgcaatactttcagagtcaacactacactgccctggttatccattcagcatgtatggtggtgtccaacaaagacccattccttgtgaaaaaatcttagcactggctccttcaatacgaaagaaacgacatactgaaatcagctacgatgataggctgctagcctacgggctaaacgtggtttcgttactgagcagcgggtaaaattgtcaattcgtacaataaactggggcacctcggccctcagtcataggctcatagcatttgatgcaaccaggtgaccaggctactgttccatttgcatgtttctttttccagacttcctcgaatcatgctttcacagtcgactacaacttaatcccgttacccatgaattgaatgtgattggaaaaaattaaggagtttgacctacttggga

SEQ ID NO: 23727 - DNA, 11119 bp, Zea Mays
aatcaaggacaagaaacacggcgacgaaaaggctaggtagagtcaaatccccgggagaccaaccacccccgcaccgccacgaacacgcccaaatcggagagccataccaaaccaaagccttcgcatccctccggaaccctagcatcctccctcctcgctcctgggatgccccagtagctccgatcggcgcctcaccgccatggatccgggcggcgggggcgggatgctcctggaggacttcggccagcgcgtggacctcacgcgccgcatccgcgaggtgctcgccaactacccggagggcaccaccgcgctgcgggagctcatccagaacgccgacgacgctggcgccgggcgcgtccgcctctgcctcgaccgccgatcgcacgggagggcgtcgctgctgtcccccgcgctcgcgcagtggcagggtcccgcgctgcttgcttacaacgacgcggtgttcaccgacgaggacttcgccagcatctcccgcattggagacagcaggaaggtcgcccagacgtggaagactggccgcttcggggttggttttaactcagtttaccacttgactgatttgccatcgttcgtgagtggcaagtatgttgtcctattcgacccccagggtgcttatctaccaaatgtgtcggcatcaaatcctggaaagcgcatcgactatgtcagttcgtcagcaatcacaatgtaccatgatcagttttcaccctactgtgcgtttggctgcgacatgaaagcatcatttcagggaactctgtttcgttttcctttgaggagctctgagcaagcatcttcaagtcggttatcaagacagtcatacacagaagatgatattttatctctttttgcccaactgtaccaagaaggcgtatataatctgctgttccttaaaaatgttctatcacttgagatgtatgtgtgggaatctggtatgaccgagccaaaaataatatactcttgctacttagggccacagagtgaaaagctgtcctggcatcgccaagcccttgtcaggttctctggcactcctgttgaatcttctaagcagaagctggactctttctcgatggattttatatcagaagcattcttgggcaacaagattgagaagaagagctctacctattttatcatccagggaatggcatctgcatcaagtaaaattggtatttttgcaactgcagctgccaaggaatatgatcttcacttactgccttgggcttctgttgctgcttgcatctccaacacagggcttgaggatactgttctcagacagggtcaagctttctgttttcttcctttgccagtaaggacaggactatctgtgcacgtcaatggttattttgaagtttcatccaaccggcgtgacatttggtatggtgctgacatggacaggggtggtaagcttcgctctgattggaacaggctactgttggaagatgttgtcgctccgttgttcagagaactgctgatgaaattgcggacgctttctgactccacaatatcatattattcactgtggccaactggtttatatgaggatccctggagtatccttgtggagcaaatttacaaggttatttacacctcgccagtcttgcactcagagattgaaggcgggacctggatatcaccggctgatgccttgcttcacgatgagggattctcaggaagcaataatcttaatgaagccctcgtgttggtgtggaaccatggtcttccatggtgaggaaactctatgtttctattgcagaacttggaattcacgttttatatacaaaagctcgaggtggtcactggctgtcaacaaggcaggctatttttccagatttcagtttctcaaaggcaatggagctggcagaagttctctctcaagctggtttgcctgtggtatctgtaaccaagccaataattgacagtttcattaatgcatatccatcagttcatctactaaatcctcatttgctgagaaatttgttgatccgacggaagcgtggcttcagaagcagagaagaggctatacttgttcttgagtattgcttgagtgatatgggagatccttccttttgcgataaattgcaaggtttggctctccttcctgtggcaaatggatcattcacaacattcaacaagcgaggggagggtgagagagtattccttacttcacaaatagaatttgaacttcttaaggattccataccacatcttgttattgacaactctttaccagatggtgtttcgaagaagttatatgacatagcttattctgcgtgcatgaacatatatatattcacaagtaatcttctcattgagctgttgcctaggatcttgccacctgaatggcaacatgctaagcagttgtcttggtttcctgagcagcaaggtcagccaagtatggaatggatggtatcactctggaattttttgaggcattcctgtgacgatatttcagtttttgcaaagtggcctataatacctcttgtagatggcaaggttgtgcaacttgggaatgctgcaaatgtaataagagattatggatggagtgaaaatatgcattccttgcttcaaaaactgggatgtttatttctgcgatctgatctgcagatagaacatccccagttagcgaattttgttcaggaatccactgctgctggtgttttgaatgctgtgcagtctgtagcttctaatctccaggatatcaaggaattgtttatgagcacttcattggcagaagcacacgaactccgaagtttcattttccagtcaaagtggttttctggaaatcagatcagctcctcccatatgaatacaatcaggaacctcccaatatttgaatcttataaatctagggaacttgttagcttgacgaatcctagaaaatggcttaaaccagaaggggtgcatgaggatttattggatgcaagctttataagaactgaatctgtgaaggagaggtcaattttggtatcatactttgatatcaaggaacctcaaaaggttgaattttacaaggaccatgtccttcctcgaatgtcagagtttctattgcagccagctattatttcagcagttattcgtgatgtgaaactgttgatagataatgatgattcagcaagagctgcattatgtgagaccccttttgtcttagcagccaatggagcatgggtccagcccttcaggctctatgatcctcgtgtgcccgagttactgaagttgctgcaccaagatactttctttccttcagaaaagttcatgatgactgaagtaattgaattgttgggtagttttggattgaaaagaaatttcgggtttagtactttgcttgacatggcaaggtcagtttcactggtgcagaattcaggacaaggtgatgcgtttgattatgggcaaaagctacttgcctatctaaacattcttgagtccaaaacttcaaagatggagggcggagaaacttttcttgaggatgggaatctggaagcatctgaaattagtgaaactttggaacctaacaatcacggggatgtgtgtgatccaagcgaccaaactagtgtatctttgttctcaaatttcgattatgatatgccagaagatttattttggtcagagctgaaaaatatttcttggtgtccggtgcatgttgcaccattgctcaaaggacttccatggttcatatccgaagatatcatagcacctccagtcatcacaaggccgaaatcacagatgtggcttgtttcatcaaaaatgcgaattcttagtgcagattcctgttccatgtatctgcaaagaaaactaggctggtgtgatccaccaaatgtgagcacattgtcttcccagttagtcgagctctccaagtctcatgatgaactcaaaatgttttctgcagacacagacattgatgctattctgcaaaaggaggtccaagtaatgtactcaaaattgcaagacataattggcactcccagtggcaacgctctaaaaaagtatctggatggatttcaatgggtttatgtaggagataggttcgtggcaccacaggcacttgcttttgattcacctgtaaaatatcatccctatctttacacagttccatccgaactgtcagaatttaaaaagttactctccgagttgggtgtaaggcagacatttgatggaatggattatctgaatgcgcttcgccgtttagaaggagatgtcaaaggagagccgttgtccacagatcaactcagttttgttcactgtgtattggaagcatttgttgactgttaccctgacagtcaagcacctgatgtgttactgaactcattggcgattccggattcacttggggttctgacacctgctagaaaccttgtctataatgatgcaccctggatgaatgctaatcccacttcaaagaattttattcatctcagcattggcaatgaactggctaataggcttggtgtacgatctctccgtggatcatcattgttggatgatgagttaatgaggaatttgccctgcatggaatatgctaaaataagtgagttgttggctttgtatggtgagagtgactttcttttgtttgatcttatagagctagcagactattgcaatgcaaagaaagtgcatctgatttatgacaaaagagaacatccgaaacagtccttactgcagcagagtctaggtgacctccagggttcttcgttgacagtggtctttgaaggaaccataatgaaccgcgaagaagtttgcagcttccaacttcctcctccctggaaactgagagggaacatccttaattatggcttgggacttcttagtagttactttgtttgtgatgcattgactattctttctggaggttacttttacatttttgatcccttgggcttgactggtggtacgacttccactgctacctcatcagcaagatacttctctttgttaggaaatgatttggttgagaggttttatgatcagttcctcccaatgcgtgttacacaggatgcttctttatgtactgcgaactccacgattatccgaatgccattatcgtcaaaatgcctcaaagaacttgaagcaggttgcaatatagtacagcgggtttttgaccgatttacacagaatccatccagtactctcctattcttgaggtcaatcattcaggtatctttatcaacatgggaggatggggcctctcagtcaactctgaattattctgtacttgttgacccatctgttgcttctttgagaaacccattttcggaaaagaaatggagaaaatttcaaatatccagaatattttcaagtacaagtgcagctatcaaaatgcaagctatagatgtgcatgtgattgagagtggctgcagttatattgacaaatggtttgttgccctttctcttggatcgggtcaaacacgaaacatggctcttgacaggcgttatcttgcctataacctaaccccagttgctggagtagcagcgcatatagctcggaatggagtatcaaccaatatacatccatctagttgtatattatctcccttaccactatctgggtttataagcatgccagtcacaactttggggcatttcattgtgaggcacagtggtgggcgctatatttttgacagtccacgtgatgcatctctgccagaacttaaagaggacagggtcaggttggttgaagcatggaataaggaacttatgttatgtgtgcgtgattcatatgttgagatggttctagaatttcaaaagcttaaaacagaccctctatcttctgctattgaaccaaggtctgcacaatctgttagtgctatattacagacatatggtgatagggtatactctttttggccaagatcgaagcagaatccaacttcgttcactgggcgtgtttctactggaactaatatggattcaccaagggcatctaaagcggattggcaatccttaatagagcaagtgataaaacctttctatgtacggttagctgatcttcctgtttggcaactttaccatggaaatcttgttaaagtggatgagggtatgttcttagctcactcaggaaatggagatgacgataacctcccatctgatagtgtttgtagtttcattaaagagcgctatcctgttttttctgtgccgtgggagttggttagtgagattcaggcagttggagttaccataagagagatcaggcctaaaatggtccggggactactaaaagcttctccatccattttacttagatccattgaaacatatatagatgttcttgaatattgcttctcagatatggacccttaccgcttctcggatgatctacctgatgaatcaagagttaacagccaacatgttggaacaacgaattcttcaatatcacattctatgccttcttcgagcagctcactgtcttaccaatcaagtactcagatggcaggtacttctggaggcgatgcacttgaaattatgacatactttggaaaagccctatatgactttggtaggggggttgttgaggatatcagcaaaaccaatagtccagcattccacaggactcaagctgctgaaactaatgtgttgtcatccatcatttctgagcttaaaggtgttccatttccaacatcgacaatgcgtctaacaaagttgggaatggctgaactctggatagccaatgagcagcagcagctattgatgagccctttgctggatcaatttatccattataaatgtctggaaaaacccttcttggctctgctgctttccactcaggttatccataggcctctgaaactgaggagcttttctccccacttactagcaggttatttgaagcgcatacttgatgagcgttggatacggattgtactagagaacaaatcctcatggattccttgggacaataatgctgaatcatcaactactccaactcccaaatggattagaagtttctggaaaatttttagttctttgaacggtgacctctctcttttgtctgattggcccttagttcctgcttatctggataagccagttctctgtcgtgtgaaggaacgccatctaatatttgtgccaccaattagtgattcaccagaccctcctggagatgatgtagctggacagcttgatacaccggactcccccagagaagatactagagcagaacagaatgcagtgcttgatactgcatttaggtcaatgaactcggaatttccatggttaacttctctgcttaaccagttgaatgtaccaatttttgatccctccttcccagagtgtggcgcaatgtgcaatttatttcctccaaatggtcgtactcttggacagacaattgtttataagttggttgcagccaaaaatgctgcacatttaccttcgctaattagcctatcaagtgaagattgcgataaactatttgggttatttgtttcggagttcatattaactaacaaccacttgtatcagagagaagaattggatgtcttgagaacacttccaatgtataagacagttacaggaacatacaccagtctgttaggttccgatcattgcattctttctcctacagcattctttcacccgagcgatgcccggtgcctttcttgctcatcaaatgcacatttgtttcttcaagctttgggggttgaacaattaaatgatcatgaaatactagtgaagtttgcgttgcctggatttggaaataaaacagctcaagagcaggaagacattttgacctacttgtatgctagctggaaagatcttcaactgaactctgctgtagtagaaaccttgaaggagacaaactttgtggcaaatgcaaatgaattttgtaaagagtttttcaaacctgaggaattacttgacccttcagatgctctgttgacttctgtgttttctggggagagaaataagttccctgctgaaaggttcatgtcagatggttggcttgttatactcagaaaagcaggccttaggacatccacagaagctgatatgataatacagtgcgcaagaaaaatagaaaccatgggacatgatattatgtcgtctttagaagatgctgatgactttgaggcagatttcacagacagcaaaaatgaaatcccttttgagatatgctctctggcagaatctgtagtaaatgtgctttttgcaaattttgctactttgtatgatagtgctttttgtgaaaagattggaaaaattgcatttgtgcctgctgaaaaaggttttccaagtattggtggtaagaggggtggtcgaagggtacttgcctcatacaatggagctatcttattaaaagactggccattagcatggagttctgctccaattcttaccaaacaaacaattgttcctcctgagtattcttggggagcatttcggcttaggagtccacctgccttcagtacagtttttaggcacttacaggtgaatgtcacaaaaaaattgaacaagtaatgttagaattatatcccttaactttctgtaatgaaacagattgttggtagaggcaatggtgcggacacactagcacactggccaacctcagcagagataatgacggtggaagatgcctttctacaggtcttgcaatacttggataaaatatggggaacaatatcttcttcagaaaaaaaagaactggagaaactggcatttataccagttgcaaatggtactcgattggtcccagtgaagtcactttttgctcgtctgacaattaacatgtcaccttttgcttttgagcttccaagtcggtatcttccatttgtttcccttcttagagagattgggatgcaggaaagccttacaaattcatatgcaagagaacttcttttggatatccaaaaggcatgtggttaccagcgcttgaacccaaatgaactccgtgcagttatggaaatcttggaattcatgtgcaatggaatcaaccaaagtatcacagatggatcagatgggccttttgattcagtaataccagatgacggctgtaggctggtcactgctgcatcatgtgtgtatgttgacccatatggttctcgtttactgagtaacataattacatcaagactaagattcacccatccagaccttcctcagaatatctgcaaggccttgagcataaaaaagctctctgatgtcattgtggaggaacttgatggaaaagaagaaattaaagttgtcaatagcattcactcagttactctagacagaataaaagagaagctgcgaagtaaatctttgcaagatgcattaaggattgtgatgatcagcgtaaccaatcatttcccttcatttgaagcccttgctttggttcagatagaacggacactagaggatatatcacagaaactgcaactggttcaacgtctccatactcgctttctcttacttcccaatctccaagatgttacaagaaccatccagcgtccttctattcatgaatggtcaagcaacggaatgcaccgaagcatttgtttcgtcaacaaagctacgggttatattctaatcgcagagcccccaagttttttgacgatatatgatgttatcgcaattattgttagtcacaggttaggggcaccaatgatcttgccgattgcctcagtgtttgcatgcccagatggttcagagaaagaagtccttcaaattcttcacctgggttcagactttggagtttcaaaacgtgaagggagatacgacgcttcccttggagcagaattgttatctcaggatgctcggcaggtgcaattccttccattaagaccgttctatagtggtgaaattgtggcatggaagacaggcaaagagggggaaaagctcaggtatggtagggtccctgaagatgtaagaccctcagctggccaagcactttacagatttccagtagagacagctcctggcgaaactcgcatgatgctttccagtcatgtttactcatttaaaagtgtttcaatggctgatcttctgtctgcaccttcccaagtgaatggtgatgtggcattaggtggccaagagaacctcttggccaccaacactggcactgaagtcaccaaggatgcggatgctggacttgaatatggaaaagtatcttccactgaactggtacaagcggtccatgatatgctttcagctgcaggagtaaggatggatgctgagaaggaaacactctttgaggctactctttccttgcaagatcagcttaaagaatctcaagttgctctcttggtagagcaggagaaggcggaggcggctgtaaaagaggctgatgtcgccaaagcagcatgggcatgccgtatctgcctgaatgctgaggtcaacatgaccatcataccatgcggtcatgtcctatgtaaccgatgctcaagttcggtttcgcggtgcccattttgccggacgcaggtggccagaatgatgaaaatattcaggccataaaaaacattgaaggacgtttggtctgactaaccgcttcagcctgtgaatgtgttacgatatcggggctcggctcccttctggttgtgcgttgcattcctttctggtctgatgcatctcattattctccatcggtgatgattggtaatccgatatggggggtgcaagtatagttacgttgtacaggaacgatgcattgcagtgtacatattccaaaatgaaatcattttacacacttcgaagggcatcgatgtctgaagctggttttctcgtgcaatactttcagagtcaacactacactgccctggttatccattcagcatgtatggtggtgtccaacaaagacccattccttgtgaaaaaatcttagcactggctccttcaatacgaaagaaacgacatactgaaatcagctacgatgataggctgctagcctacgggctaaacgtggtttcgttactgagcagcgggtaaaattgtcaattcgtacaataaactggggcacctcggccctcagtcataggctcatagcatttgatgcaaccaggtgaccaggctactgttccatttgcatgtttctttttccagacttcctcgaatcatgctttcacagtcgactacaacttaatcccgttacccatgaattgaatgtgattggaaaaaattaaggagtttgacctacttggga

SEQ ID NO: 23728 - DNA, 8087 bp, Zea Mays
aatcaaggacaagaaacacggcgacgaaaaggctaggtagagtcaaatccccgggagaccaaccacccccgcaccgccacgaacacgcccaaatcggagagccataccaaaccaaagccttcgcatccctccggaaccctagcatcctccctcctcgctcctgggatgccccagtagctccgatcggcgcctcaccgccatggatccgggcggcgggggcgggatgctcctggaggacttcggccagcgcgtggacctcacgcgccgcatccgcgaggtgctcgccaactacccggagggcaccaccgcgctgcgggagctcatccagaacgccgacgacgctggcgccgggcgcgtccgcctctgcctcgaccgccgatcgcacgggagggcgtcgctgctgtcccccgcgctcgcgcagtggcagggtcccgcgctgcttgcttacaacgacgcggtgttcaccgacgaggacttcgccagcatctcccgcattggagacagcaggaaggtcgcccagacgtggaagactggccgcttcggggttggttttaactcagtttaccacttgactgatttgccatcgttcgtgagtggcaagtatgttgtcctattcgacccccagggtgcttatctaccaaatgtgtcggcatcaaatcctggaaagcgcatcgactatgtcagttcgtcagcaatcacaatgtaccatgatcagttttcaccctactgtgcgtttggctgcgacatgaaagcatcatttcagggaactctgtttcgttttcctttgaggagctctgagcaagcatcttcaagtcggttatcaagacagtcatacacagaagatgatattttatctctttttgcccaactgtaccaagaaggcgtatataatctgctgttccttaaaaatgttctatcacttgagatgtatgtgtgggaatctggtatgaccgagccaaaaataatatactcttgctacttagggccacagagtgaaaagctgtcctggcatcgccaagcccttgtcaggttctctggcactcctgttgaatcttctaagcagaagctggactctttctcgatggattttatatcagaagcattcttgggcaacaagattgagaagaagagctctacctattttatcatccagggaatggcatctgcatcaagtaaaattggtatttttgcaactgcagctgccaaggaatatgatcttcacttactgccttgggcttctgttgctgcttgcatctccaacacagggcttgaggatactgttctcagacagggtcaagctttctgttttcttcctttgccagggtggtaagcttcgctctgattggaacaggctactgttggaagatgttgtcgctccgttgttcagagaactgctgatgaaattgcggacgctttctgactccacaatatcatattattcactgtggccaactggtttatatgaggatccctggagtatccttgtggagcaaatttacaaggttatttacacctcgccagtcttgcactcagagattgaaggcgggacctggatatcaccggctgatgccttgcttcacgatgagggattctcaggaagcaataatcttaatgaagccctcgtgttgagctagcagactattgcaatgcaaagaaagtgcatctgatttatgacaaaagagaacatccgaaacagtccttactgcagcagagtctaggtgacctccagggttcttcgttgacagtggtctttgaaggaaccataatgaaccgcgaagaagtttgcagcttccaacttcctcctccctggaaactgagagggaacatccttaattatggcttgggacttcttagtagttactttgtttgtgatgcattgactattctttctggaggttacttttacatttttgatcccttgggcttgactggtggtacgacttccactgctacctcatcagcaagatacttctctttgttaggaaatgatttggttgagaggttttatgatcagttcctcccaatgcgtgttacacaggatgcttctttatgtactgcgaactccacgattatccgaatgccattatcgtcaaaatgcctcaaagaacttgaagcaggttgcaatatagtacagcgggtttttgaccgatttacacagaatccatccagtactctcctattcttgaggtcaatcattcaggtatctttatcaacatgggaggatggggcctctcagtcaactctgaattattctgtacttgttgacccatctgttgcttctttgagaaacccattttcggaaaagaaatggagaaaatttcaaatatccagaatattttcaagtacaagtgcagctatcaaaatgcaagctatagatgtgcatgtgattgagagtggctgcagttatattgacaaatggtttgttgccctttctcttggatcgggtcaaacacgaaacatggctcttgacaggcgttatcttgcctataacctaaccccagttgctggagtagcagcgcatatagctcggaatggagtatcaaccaatatacatccatctagttgtatattatctcccttaccactatctgggtttataagcatgccagtcacaactttggggcatttcattgtgaggcacagtggtgggcgctatatttttgacagtccacgtgatgcatctctgccagaacttaaagaggacagggtcaggttggttgaagcatggaataaggaacttatgttatgtgtgcgtgattcatatgttgagatggttctagaatttcaaaagcttaaaacagaccctctatcttctgctattgaaccaaggtctgcacaatctgttagtgctatattacagacatatggtgatagggtatactctttttggccaagatcgaagcagaatccaacttcgttcactgggcgtgtttctactggaactaatatggattcaccaagggcatctaaagcggattggcaatccttaatagagcaagtgataaaacctttctatgtacggttagctgatcttcctgtttggcaactttaccatggaaatcttgttaaagtggatgagggtatgttcttagctcactcaggaaatggagatgacgataacctcccatctgatagtgtttgtagtttcattaaagagcgctatcctgttttttctgtgccgtgggagttggttagtgagattcaggcagttggagttaccataagagagatcaggcctaaaatggtccggggactactaaaagcttctccatccattttacttagatccattgaaacatatatagatgttcttgaatattgcttctcagatatggacccttaccgcttctcggatgatctacctgatgaatcaagagttaacagccaacatgttggaacaacgaattcttcaatatcacattctatgccttcttcgagcagctcactgtcttaccaatcaagtactcagatggcaggtacttctggaggcgatgcacttgaaattatgacatactttggaaaagccctatatgactttggtaggggggttgttgaggatatcagcaaaaccaatagtccagcattccacaggactcaagctgctgaaactaatgtgttgtcatccatcatttctgagcttaaaggtgttccatttccaacatcgacaatgcgtctaacaaagttgggaatggctgaactctggatagccaatgagcagcagcagctattgatgagccctttgctggatcaatttatccattataaatgtctggaaaaacccttcttggctctgctgctttccactcaggttatccataggcctctgaaactgaggagcttttctccccacttactagcaggttatttgaagcgcatacttgatgagcgttggatacggattgtactagagaacaaatcctcatggattccttgggacaataatgctgaatcatcaactactccaactcccaaatggattagaagtttctggaaaatttttagttctttgaacggtgacctctctcttttgtctgattggcccttagttcctgcttatctggataagccagttctctgtcgtgtgaaggaacgccatctaatatttgtgccaccaattagtgattcaccagaccctcctggagatgatgtagctggacagcttgatacaccggactcccccagagaagatactagagcagaacagaatgcagtgcttgatactgcatttaggtcaatgaactcggaatttccatggttaacttctctgcttaaccagttgaatgtaccaatttttgatccctccttcccagagtgtggcgcaatgtgcaatttatttcctccaaatggtcgtactcttggacagacaattgtttataagttggttgcagccaaaaatgctgcacatttaccttcgctaattagcctatcaagtgaagattgcgataaactatttgggttatttgtttcggagttcatattaactaacaaccacttgtatcagagagaagaattggatgtcttgagaacacttccaatgtataagacagttacaggaacatacaccagtctgttaggttccgatcattgcattctttctcctacagcattctttcacccgagcgatgcccggtgcctttcttgctcatcaaatgcacatttgtttcttcaagctttgggggttgaacaattaaatgatcatgaaatactagtgaagtttgcgttgcctggatttggaaataaaacagctcaagagcaggaagacattttgacctacttgtatgctagctggaaagatcttcaactgaactctgctgtagtagaaaccttgaaggagacaaactttgtggcaaatgcaaatgaattttgtaaagagtttttcaaacctgaggaattacttgacccttcagatgctctgttgacttctgtgttttctggggagagaaataagttccctgctgaaaggttcatgtcagatggttggcttgttatactcagaaaagcaggccttaggacatccacagaagctgatatgataatacagtgcgcaagaaaaatagaaaccatgggacatgatattatgtcgtctttagaagatgctgatgactttgaggcagatttcacagacagcaaaaatgaaatcccttttgagatatgctctctggcagaatctgtagtaaatgtgctttttgcaaattttgctactttgtatgatagtgctttttgtgaaaagattggaaaaattgcatttgtgcctgctgaaaaaggttttccaagtattggtggtaagaggggtggtcgaagggtacttgcctcatacaatggagctatcttattaaaagactggccattagcatggagttctgctccaattcttaccaaacaaacaattgttcctcctgagtattcttggggagcatttcggcttaggagtccacctgccttcagtacagtttttaggcacttacagattgttggtagaggcaatggtgcggacacactagcacactggccaacctcagcagagataatgacggtggaagatgcctttctacaggtcttgcaatacttggataaaatatggggaacaatatcttcttcagaaaaaaaagaactggagaaactggcatttataccagttgcaaatggtactcgattggtcccagtgaagtcactttttgctcgtctgacaattaacatgtcaccttttgcttttgagcttccaagtcggtatcttccatttgtttcccttcttagagagattgggatgcaggaaagccttacaaattcatatgcaagagaacttcttttggatatccaaaaggcatgtggttaccagcgcttgaacccaaatgaactccgtgcagttatggaaatcttggaattcatgtgcaatggaatcaaccaaagtatcacagatggatcagatgggccttttgattcagtaataccagatgacggctgtaggctggtcactgctgcatcatgtgtgtatgttgacccatatggttctcgtttactgagtaacataattacatcaagactaagattcacccatccagaccttcctcagaatatctgcaaggccttgagcataaaaaagctctctgatgtcattgtggaggaacttgatggaaaagaagaaattaaagttgtcaatagcattcactcagttactctagacagaataaaagagaagctgcgaagtaaatctttgcaagatgcattaaggattgtgatgatcagcgtaaccaatcatttcccttcatttgaagcccttgctttggttcagatagaacggacactagaggatatatcacagaaactgcaactggttcaacgtctccatactcgctttctcttacttcccaatctccaagatgttacaagaaccatccagcgtccttctattcatgaatggtcaagcaacggaatgcaccgaagcatttgtttcgtcaacaaagctacgggttatattctaatcgcagagcccccaagttttttgacgatatatgatgttatcgcaattattgttagtcacaggttaggggcaccaatgatcttgccgattgcctcagtgtttgcatgcccagatggttcagagaaagaagtccttcaaattcttcacctgggttcagactttggagtttcaaaacgtgaagggagatacgacgcttcccttggagcagaattgttatctcaggatgctcggcaggtgcaattccttccattaagaccgttctatagtggtgaaattgtggcatggaagacaggcaaagagggggaaaagctcaggtatggtagggtccctgaagatgtaagaccctcagctggccaagcactttacagatttccagtagagacagctcctggcgaaactcgcatgatgctttccagtcatgtttactcatttaaaagtgtttcaatggctgatcttctgtctgcaccttcccaagtgaatggtgatgtggcattaggtggccaagagaacctcttggccaccaacactggcactgaagtcaccaaggatgcggatgctggacttgaatatggaaaagtatcttccactgaactggtacaagcggtccatgatatgctttcagctgcaggagtaaggatggatgctgagaaggaaacactctttgaggctactctttccttgcaagatcagcttaaagaatctcaagttgctctcttggtagagcaggagaaggcggaggcggctgtaaaagaggctgatgtcgccaaagcagcatgggcatgccgtatctgcctgaatgctgaggtcaacatgaccatcataccatgcggtcatgtcctatgtaaccgatgctcaagttcggtttcgcggtgcccattttgccggacgcaggtggccagaatgatgaaaatattcaggccataaaaaacattgaaggacgtttggtctgactaaccgcttcagcctgtgaatgtgttacgatatcggggctcggctcccttctggttgtgcgttgcattcctttctggtctgatgcatctcattattctccatcggtgatgattggtaatccgatatggggggtgcaagtatagttacgttgtacaggaacgatgcattgcagtgtacatattccaaaatgaaatcattttacacacttcgaagggcatcgatgtctgaagctggttttctcgtgcaatactttcagagtcaacactacactgccctggttatccattcagcatgtatggtggtgtccaacaaagacccattccttgtgaaaaaatcttagcactggctccttcaatacgaaagaaacgacatactgaaatcagctacgatgataggctgctagcctacgggctaaacgtggtttcgttactgagcagcgggtaaaattgtcaattcgtacaataaactggggcacctcggccctcagtcataggctcatagcatttgatgcaaccaggtgaccaggctactgttccatttgcatgtttctttttccagacttcctcgaatcatgctttcacagtcgactacaacttaatcccgttacccatgaattgaatgtgattggaaaaaattaaggagtttgacctacttggga

SEQ ID NO: 23729 - DNA, 14255 bp, Zea Mays
aatcaaggacaagaaacacggcgacgaaaaggctaggtagagtcaaatccccgggagaccaaccacccccgcaccgccacgaacacgcccaaatcggagagccataccaaaccaaagccttcgcatccctccggaaccctagcatcctccctcctcgctcctgggatgccccagtagctccgatcggcgcctcaccgccatggatccgggcggcgggggcgggatgctcctggaggacttcggccagcgcgtggacctcacgcgccgcatccgcgaggtgctcgccaactacccggagggcaccaccgcgctgcgggagctcatccagaacgccgacgacgctggcgccgggcgcgtccgcctctgcctcgaccgccgatcgcacgggagggcgtcgctgctgtcccccgcgctcgcgcagtggcagggtcccgcgctgcttgcttacaacgacgcggtgttcaccgacgaggacttcgccagcatctcccgcattggagacagcaggaaggtcgcccagacgtggaagactggccgcttcggggttggttttaactcagtttaccacttgactgatttgccatcgttcgtgagtggcaagtatgttgtcctattcgacccccagggtgcttatctaccaaatgtgtcggcatcaaatcctggaaagcgcatcgactatgtcagttcgtcagcaatcacaatgtaccatgatcagttttcaccctactgtgcgtttggctgcgacatgaaagcatcatttcagggaactctgtttcgttttcctttgaggagctctgagcaagcatcttcaagtcggttatcaagacagtcatacacagaagatgatattttatctctttttgcccaactgtaccaagaaggcgtatataatctgctgttccttaaaaatgttctatcacttgagatgtatgtgtgggaatctggtatgaccgagccaaaaataatatactcttgctacttagggccacagagtgaaaagctgtcctggcatcgccaagcccttgtcaggttctctggcactcctgttgaatcttctaagcagaagctggactctttctcgatggattttatatcagaagcattcttgggcaacaagattgagaagaagagctctacctattttatcatccagggaatggcatctgcatcaagtaaaattggtatttttgcaactgcagctgccaaggaatatgatcttcacttactgccttgggcttctgttgctgcttgcatctccaacacagggcttgaggatactgttctcagacagggtcaagctttctgttttcttcctttgccagtaaggacaggactatctgtgcacgtcaatggttattttgaagtttcatccaaccggcgtgacatttggtatggtgctgacatggacaggggtggtaagcttcgctctgattggaacaggctactgttggaagatgttgtcgctccgttgttcagagaactgctgatgaaattgcggacgctttctgactccacaatatcatattattcactgtggccaactggtttatatgaggatccctggagtatccttgtggagcaaatttacaaggttatttacacctcgccagtcttgcactcagagattgaaggcgggacctggatatcaccggctgatgccttgcttcacgatgagggattctcaggaagcaataatcttaatgaagccctcgtgttggtaggcatgccaattgttcgtgtatctaatgcaataggcgatatgttttcaaaattttatatgcagtctatgctcaaaatagtaagtcctgctatagtgaggcatttcctcaaggattatgctaaacttgctacgctaggaaagtctcataagttaatattattggaatattgtcttactgatgtttacaatactgatatcggtaaatgcatgaatggccttccactgattccactagcaaatatgcggtatgggactttttctgctagttcgcaagaggactattattatgtctgtgataacatcgaatatgagcttctagctgaagttggtgatagaatagttgacagaagcatccctcctgtactactagacaagctgtatcagatagccagtgattcccaggcgaacattaggttcattgatggcccaatcttctgccagctcttacccaggttatttcctcctggatggaagcttaaagatcaagttccctggaacccaggcttgggtgggtcatctcctacagcagcatggtttaaacttttttggcagtatatagggggacgctcgtatgaccttcatttgtttagtgattggcctatactgccatctacctttggccaccttcacagggcatgcacaagctcaaaattaatcaaaacagaatcactgtctagtttgatgaatgaactcctggcaaagtttggttgcaagatactggatgctgaatatttgagtgatcacaaacaattgtcattttatgtatatgatggtgatgcaactggagttcttcagtcaatctttgaggttatctcattggagggtgttgatttgcaatctctgtttcaacgcattactcctggtgaaaaaaatgagctgtaccagtttcttctggatccaaaatggtatttaggagcctgcctttctgtcgtaagtataaaccaatgtaaaaagcttccaatcttcagggtatttgatggaggttctcccagcacttatggtttctcggatttgtttagttcaagaaagtatctgccacctcttggtgttcctgaccatttactcaatgacgactttattttctctatttgcccaagcgatgaagatatcataatgagatattatggcattgaacgcatgccgaaatcgaacttctaccagaggtatgttctgaatagattagacaagctgcaaacggagttgcgtgattcagttcttttaacaatcttacaagatctgcctcagctgtccttggaggatccaatgttcaaggaaaccttgaaaattcttagatttgttcccactatcaatggaactttgaaaagcccacaatctctttatgatccccgggtggaagaactttatgttcttctccaggaatcgggttgctttccccatggtttatttcaaaatccagatgttcttgatatgctgctttgcttggggcttagaacttcagtttctaccgataccatattagaaagtgctcgtcagattgattcacttgtgaacatagatcagcagaaggcccattcaagggctaaggtccttctttcatatcttgaagttcatgctcacaaatggtatgtgaataagctatttgatggtcgtaagaaggtaaacatgctagctaaagttaccactgcgctcagacctcgtgacaaatcttgggaatttgatcttgagaagttctggagtgatctgagattgatttgctggtgtcctgtgttggctactgcaccaagtccagctttgccatggccttcagtatcatcaatgatagctccacctaagcaagtaaggatgcaggaagatatgtggattgtttctgctagctcacgcattctcgatggtgaatgcacctcctcggccttgtcgtacagtttaggttggttgtcgcctccatcagggagcgtgattgcagctcaactgcttgaattgggcaagaacaatgaaattgtgactgatcaagtccttcggcaagaattagctttggtgatgcctaagatttattctttgctgacaaacttgattggttctgatgaaatggatatagtgaaagtggttctagaaggatgcagatggatttgggtgggtgatggatttgcgaaaacagatgaagttgttttaagtggccaccttcatctagcaccatacattcgtgttgttccaattgatttagcagtgttcaaagacttgttcttggaactcggcataaaggagcacctgtaccctgttgattatgctagtattcttggcagaatggccataaggaaagcttcagcttcacttgaagctgaagaactaagaacagctatcctggttgtgcagcatttatctgagttccggtttcaggatcagcaaacacaaatatatttacctgattcttcgtctaggctttgtctatcttctgaacttgtattcaatgacgctccttggttgcttgattttggtcatgacatcagtgggagtgcatcaagcattgctttaagctcaaaaaagtatgttcacaattttgttcatggtaacatttctaatgatgtggcagaaaggcttggtgttcgatctcttcgccgcctattgcttgctgagagttctgattcaatgaatttgagtttatcaggggttgctgaggcgtttggacagcatgaagacttgactacacggctcaagcacattgttgagatgtatgcagatggccctggaattctctttgagttggtacagaatgcagaagatgctaaggcttctgaggttgtgtttttgctggataagactcagtatggaacttcatccattctttcgcctgaaatggctgaatggcaaggacctgctctctactgctttaatgattcagtttttagtccacaggacctatatgccatctcacgaataggtcaagacagtaaacttgagaaaccttttgcaattggaaggtttggtcttggcttcaattgtgtgtatcacttcacagatattcctggatttgtttccggtgagaatattgtcatgttcgatccacatgcctgttatttgccaggaatatctccgtctcatcctggtttaaggatacagtttgtaggaagaaggatcttagatcagtttcctgatcagttcgccccattcttacattttggttgcaatttgcaacagccatttccaggtacactcttccggtttccccttaggaatgcggctgctgcttcgagaagtcaaataaaacgagaacagtatgcaccacaagatgtggaaatgcttttctcttcattctccgaagttgtatctgaggctctactttttctccgcaatgttaaaaaggtaactctatatgtcaaggaaaacaacagtaaggagatgcgacttgttcatcgtgtctccaggcataatagctctcagataggtaaagaacctcatgcacttggtgcaatgcttgcgtttatacatggaagccaaccatcaggaatggatagaaatcagtttttcagtaagttgaataagactaaagacagtgacttgccctggagttgtcagaaggttactattcttgaggaaaacccttcttcacacttgttgcactcatggattttagctgaatgtataggtgggggtcatgctagaaagttgtcaactgcctctgttagtaaatctcacttctttgttccgtgggcatctgttgctgcatatctgcattcagtgagtgtagatgatacaaaaggactatcagctgaagctgaagtcaaccatgataactcagttttcacaaacccagatcttggatcttctaagttcaggaaaaattttgaggctcgggccttttgctttcttcctctaccaatcaatactagcataccagtgcatgtaaatgcttattttgaactctcttcaaatcgaagggatatctggatcggaaatgacatggctgggggaggaagagtacggtcagaatggaatttagcgctgcttgaagatgtcgttgctcctgcttatgggcacctgcttgcagctgttgctgaagagcttggtccctctgacttgtttctttcattttggcctagtgctgcaggtgtggaaccatggtcttccatggtgaggaaactctatgtttctattgcagaacttggaattcacgttttatatacaaaagctcgaggtggtcactggctgtcaacaaggcaggctatttttccagatttcagtttctcaaaggcaatggagctggcagaagttctctctcaagctggtttgcctgtggtatctgtaaccaagccaataattgacagtttcattaatgcatatccatcagttcatctactaaatcctcatttgctgagaaatttgttgatccgacggaagcgtggcttcagaagcagagaagaggctatacttgttcttgagtattgcttgagtgatatgggagatccttccttttgcgataaattgcaaggtttggctctccttcctgtggcaaatggatcattcacaacattcaacaagcgaggggagggtgagagagtattccttacttcacaaatagaatttgaacttcttaaggattccataccacatcttgttattgacaactctttaccagatggtgtttcgaagaagttatatgacatagcttattctgcgtgcatgaacatatatatattcacaagtaatcttctcattgagctgttgcctaggatcttgccacctgaatggcaacatgctaagcagttgtcttggtttcctgagcagcaaggtcagccaagtatggaatggatggtatcactctggaattttttgaggcattcctgtgacgatatttcagtttttgcaaagtggcctataatacctcttgtagatggcaaggttgtgcaacttgggaatgctgcaaatgtaataagagattatggatggagtgaaaatatgcattccttgcttcaaaaactgggatgtttatttctgcgatctgatctgcagatagaacatccccagttagcgaattttgttcaggaatccactgctgctggtgttttgaatgctgtgcagtctgtagcttctaatctccaggatatcaaggaattgtttatgagcacttcattggcagaagcacacgaactccgaagtttcattttccagtcaaagtggttttctggaaatcagatcagctcctcccatatgaatacaatcaggaacctcccaatatttgaatcttataaatctagggaacttgttagcttgacgaatcctagaaaatggcttaaaccagaaggggtgcatgaggatttattggatgcaagctttataagaactgaatctgtgaaggagaggtcaattttggtatcatactttgatatcaaggaacctcaaaaggttgaattttacaaggaccatgtccttcctcgaatgtcagagtttctattgcagccagctattatttcagcagttattcgtgatgtgaaactgttgatagataatgatgattcagcaagagctgcattatgtgagaccccttttgtcttagcagccaatggagcatgggtccagcccttcaggctctatgatcctcgtgtgcccgagttactgaagttgctgcaccaagatactttctttccttcagaaaagttcatgatgactgaagtaattgaattgttgggtagttttggattgaaaagaaatttcgggtttagtactttgcttgacatggcaaggtcagtttcactggtgcagaattcaggacaaggtgatgcgtttgattatgggcaaaagctacttgcctatctaaacattcttgagtccaaaacttcaaagatggagggcggagaaacttttcttgaggatgggaatctggaagcatctgaaattagtgaaactttggaacctaacaatcacggggatgtgtgtgatccaagcgaccaaactagtgtatctttgttctcaaatttcgattatgatatgccagaagatttattttggtcagagctgaaaaatatttcttggtgtccggtgcatgttgcaccattgctcaaaggacttccatggttcatatccgaagatatcatagcacctccagtcatcacaaggccgaaatcacagatgtggcttgtttcatcaaaaatgcgaattcttagtgcagattcctgttccatgtatctgcaaagaaaactaggctggtgtgatccaccaaatgtgagcacattgtcttcccagttagtcgagctctccaagtctcatgatgaactcaaaatgttttctgcagacacagacattgatgctattctgcaaaaggaggtccaagtaatgtactcaaaattgcaagacataattggcactcccagtggcaacgctctaaaaaagtatctggatggatttcaatgggtttatgtaggagataggttcgtggcaccacaggcacttgcttttgattcacctgtaaaatatcatccctatctttacacagttccatccgaactgtcagaatttaaaaagttactctccgagttgggtgtaaggcagacatttgatggaatggattatctgaatgcgcttcgccgtttagaaggagatgtcaaaggagagccgttgtccacagatcaactcagttttgttcactgtgtattggaagcatttgttgactgttaccctgacagtcaagcacctgatgtgttactgaactcattggcgattccggattcacttggggttctgacacctgctagaaaccttgtctataatgatgcaccctggatgaatgctaatcccacttcaaagaattttattcatctcagcattggcaatgaactggctaataggcttggtgtacgatctctccgtggatcatcattgttggatgatgagttaatgaggaatttgccctgcatggaatatgctaaaataagtgagttgttggctttgtatggtgagagtgactttcttttgtttgatcttatagagctagcagactattgcaatgcaaagaaagtgcatctgatttatgacaaaagagaacatccgaaacagtccttactgcagcagagtctaggtgacctccagggttcttcgttgacagtggtctttgaaggaaccataatgaaccgcgaagaagtttgcagcttccaacttcctcctccctggaaactgagagggaacatccttaattatggcttgggacttcttagtagttactttgtttgtgatgcattgactattctttctggaggttacttttacatttttgatcccttgggcttgactggtggtacgacttccactgctacctcatcagcaagatacttctctttgttaggaaatgatttggttgagaggttttatgatcagttcctcccaatgcgtgttacacaggatgcttctttatgtactgcgaactccacgattatccgaatgccattatcgtcaaaatgcctcaaagaacttgaagcaggttgcaatatagtacagcgggtttttgaccgatttacacagaatccatccagtactctcctattcttgaggtcaatcattcaggtatctttatcaacatgggaggatggggcctctcagtcaactctgaattattctgtacttgttgacccatctgttgcttctttgagaaacccattttcggaaaagaaatggagaaaatttcaaatatccagaatattttcaagtacaagtgcagctatcaaaatgcaagctatagatgtgcatgtgattgagagtggctgcagttatattgacaaatggtttgttgccctttctcttggatcgggtcaaacacgaaacatggctcttgacaggcgttatcttgcctataacctaaccccagttgctggagtagcagcgcatatagctcggaatggagtatcaaccaatatacatccatctagttgtatattatctcccttaccactatctgggtttataagcatgccagtcacaactttggggcatttcattgtgaggcacagtggtgggcgctatatttttgacagtccacgtgatgcatctctgccagaacttaaagaggacagggtcaggttggttgaagcatggaataaggaacttatgttatgtgtgcgtgattcatatgttgagatggttctagaatttcaaaagcttaaaacagaccctctatcttctgctattgaaccaaggtctgcacaatctgttagtgctatattacagacatatggtgatagggtatactctttttggccaagatcgaagcagaatccaacttcgttcactgggcgtgtttctactggaactaatatggattcaccaagggcatctaaagcggattggcaatccttaatagagcaagtgataaaacctttctatgtacggttagctgatcttcctgtttggcaactttaccatggaaatcttgttaaagtggatgagggtatgttcttagctcactcaggaaatggagatgacgataacctcccatctgatagtgtttgtagtttcattaaagagcgctatcctgttttttctgtgccgtgggagttggttagtgagattcaggcagttggagttaccataagagagatcaggcctaaaatggtccggggactactaaaagcttctccatccattttacttagatccattgaaacatatatagatgttcttgaatattgcttctcagatatggacccttaccgcttctcggatgatctacctgatgaatcaagagttaacagccaacatgttggaacaacgaattcttcaatatcacattctatgccttcttcgagcagctcactgtcttaccaatcaagtactcagatggcaggtacttctggaggcgatgcacttgaaattatgacatactttggaaaagccctatatgactttggtaggggggttgttgaggatatcagcaaaaccaatagtccagcattccacaggactcaagctgctgaaactaatgtgttgtcatccatcatttctgagcttaaaggtgttccatttccaacatcgacaatgcgtctaacaaagttgggaatggctgaactctggatagccaatgagcagcagcagctattgatgagccctttgctggatcaatttatccattataaatgtctggaaaaacccttcttggctctgctgctttccactcaggttatccataggcctctgaaactgaggagcttttctccccacttactagcaggttatttgaagcgcatacttgatgagcgttggatacggattgtactagagaacaaatcctcatggattccttgggacaataatgctgaatcatcaactactccaactcccaaatggattagaagtttctggaaaatttttagttctttgaacggtgacctctctcttttgtctgattggcccttagttcctgcttatctggataagccagttctctgtcgtgtgaaggaacgccatctaatatttgtgccaccaattagtgattcaccagaccctcctggagatgatgtagctggacagcttgatacaccggactcccccagagaagatactagagcagaacagaatgcagtgcttgatactgcatttaggtcaatgaactcggaatttccatggttaacttctctgcttaaccagttgaatgtaccaatttttgatccctccttcccagagtgtggcgcaatgtgcaatttatttcctccaaatggtcgtactcttggacagacaattgtttataagttggttgcagccaaaaatgctgcacatttaccttcgctaattagcctatcaagtgaagattgcgataaactatttgggttatttgtttcggagttcatattaactaacaaccacttgtatcagagagaagaattggatgtcttgagaacacttccaatgtataagacagttacaggaacatacaccagtctgttaggttccgatcattgcattctttctcctacagcattctttcacccgagcgatgcccggtgcctttcttgctcatcaaatgcacatttgtttcttcaagctttgggggttgaacaattaaatgatcatgaaatactagtgaagtttgcgttgcctggatttggaaataaaacagctcaagagcaggaagacattttgacctacttgtatgctagctggaaagatcttcaactgaactctgctgtagtagaaaccttgaaggagacaaactttgtggcaaatgcaaatgaattttgtaaagagtttttcaaacctgaggaattacttgacccttcagatgctctgttgacttctgtgttttctggggagagaaataagttccctgctgaaaggttcatgtcagatggttggcttgttatactcagaaaagcaggccttaggacatccacagaagctgatatgataatacagtgcgcaagaaaaatagaaaccatgggacatgatattatgtcgtctttagaagatgctgatgactttgaggcagatttcacagacagcaaaaatgaaatcccttttgagatatgctctctggcagaatctgtagtaaatgtgctttttgcaaattttgctactttgtatgatagtgctttttgtgaaaagattggaaaaattgcatttgtgcctgctgaaaaaggttttccaagtattggtggtaagaggggtggtcgaagggtacttgcctcatacaatggagctatcttattaaaagactggccattagcatggagttctgctccaattcttaccaaacaaacaattgttcctcctgagtattcttggggagcatttcggcttaggagtccacctgccttcagtacagtttttaggcacttacagattgttggtagaggcaatggtgcggacacactagcacactggccaacctcagcagagataatgacggtggaagatgcctttctacaggtcttgcaatacttggataaaatatggggaacaatatcttcttcagaaaaaaaagaactggagaaactggcatttataccagttgcaaatggtactcgattggtcccagtgaagtcactttttgctcgtctgacaattaacatgtcaccttttgcttttgagcttccaagtcggtatcttccatttgtttcccttcttagagagattgggatgcaggaaagccttacaaattcatatgcaagagaacttcttttggatatccaaaaggcatgtggttaccagcgcttgaacccaaatgaactccgtgcagttatggaaatcttggaattcatgtgcaatggaatcaaccaaagtatcacagatggatcagatgggccttttgattcagtaataccagatgacggctgtaggctggtcactgctgcatcatgtgtgtatgttgacccatatggttctcgtttactgagtaacataattacatcaagactaagattcacccatccagaccttcctcagaatatctgcaaggccttgagcataaaaaagctctctgatgtcattgtggaggaacttgatggaaaagaagaaattaaagttgtcaatagcattcactcagttactctagacagaataaaagagaagctgcgaagtaaatctttgcaagatgcattaaggattgtgatgatcagcgtaaccaatcatttcccttcatttgaagcccttgctttggttcagatagaacggacactagaggatatatcacagaaactgcaactggttcaacgtctccatactcgctttctcttacttcccaatctccaagatgttacaagaaccatccagcgtccttctattcatgaatggtcaagcaacggaatgcaccgaagcatttgtttcgtcaacaaagctacgggttatattctaatcgcagagcccccaagttttttgacgatatatgatgttatcgcaattattgttagtcacaggttaggggcaccaatgatcttgccgattgcctcagtgtttgcatgcccagatggttcagagaaagaagtccttcaaattcttcacctgggttcagactttggagtttcaaaacgtgaagggagatacgacgcttcccttggagcagaattgttatctcaggatgctcggcaggtgcaattccttccattaagaccgttctatagtggtgaaattgtggcatggaagacaggcaaagagggggaaaagctcaggtatggtagggtccctgaagatgtaagaccctcagctggccaagcactttacagatttccagtagagacagctcctggcgaaactcgcatgatgctttccagtcatgtttactcatttaaaagtgtttcaatggctgatcttctgtctgcaccttcccaagtgaatggtgatgtggcattaggtggccaagagaacctcttggccaccaacactggcactgaagtcaccaaggatgcggatgctggacttgaatatggaaaagtatcttccactgaactggtacaagcggtccatgatatgctttcagctgcaggagtaaggatggatgctgagaaggaaacactctttgaggctactctttccttgcaagatcagcttaaagaatctcaagttgctctcttggtagagcaggtaccagtatttgtatgtttcc

SEQ ID NO: 23730 - DNA, 285 bp, Zea Mays
atgttgagcacgacgggcgcgccgcagaggtggtcgaccccgcgccgcgcgatggcgtcgtacacctcggcggcgtccacgcggcgcaggcacacgttggtgccacctaccgccgccatcccccacgggaagcaccacccgttggcgtggaacatgggcagcgtccacaggtacgtcggccgcggcggcaccgcccactccacgagcgcgtcgacggtgaccaggaagatgccgcggtggcagtgcaccacgcccttgggcgccgacgtcgtgccggaggtgtaa

SEQ ID NO: 23731 - DNA, 194 bp, Zea Mays
aagtaatggatctgttggatcatttctaaggattctttcgtcttcatacagacacacagaagtaatggatctgttggatcatttctaaggattggtaagagaacccatagacatatcgtctgtatcaaactatcaatgacacccattcactttgttattcactccctacaagataaaacggagacatatctgct

SEQ ID NO: 23732 - DNA, 612 bp, Zea Mays
gtttttatatatttttagttgatttttaaaaaaagaaaataaccgcaagccgtacagttattttttttattataggacaaagcgagtgctccgctccgtacgtgagggacagacaggcagacagcgattccatccatgcattctccagcaaaccgtggtgaaaatcacgcccgtctgccccgcgctggcgctgccatctacagtaccccgcacggcggctgctcctgcgctctgcagatccagagccttcctgccccggcgcgccggatcggaggggggcgggcggctgcagatgcagagcagatgacgggggaccgaccagatctcccacggggcatgcgagatattcctatcctcgctgtgtgcccgcgaagcctagctacaatgctcctgcagccctgctcctagctactctactagtgtagagttgattgatgagttgcaatcgtgtcaggcatctacagccatgcatgcaatgcattgcaatgcaatgcaagcactgaattcatcagttctatatacttgaggtacaggctacagaagaaagaggaagggggaagggtatgtacttctcagttcagaagctcagtcagagctggctatctactagct

SEQ ID NO: 23733 - DNA, 510 bp, Zea Mays
ctgcctgctgctgccgcccgtgcccgatctcgatcgcctgctccggtgtcaggcatggcccggggttggtggcctggccgatctgttccgttgccgttcgtcgtcttctcctgcgagctcgcaagctagtggcagatccagagccttcctgccccggcgcgccggatcggaggggggcgggcggctgcagatgcagagcagatgacgggggaccgaccagatctcccacggggcatgcgagatattcctatcctcgctgtgtgcccgcgaagcctagctacaatgctcctgcagccctgctcctagctactctactagtgtagagttgattgatgagttgcaatcgtgtcaggcatctacagccatgcatgcaatgcattgcaatgcaatgcaagcactgaattcatcagttctatatacttgaggtacaggctacagaagaaagaggaagggggaagggtatgtacttctcagttcagaagctcagtcagagctggctatctactagct

SEQ ID NO: 23734 - DNA, 2161 bp, Zea Mays
taaacgtggtaataagcccacgtcgcaatcaactgccatcgaaggcttggagccttggcttaaccagcaaccagcgcggcgacgcgtccgccggctcgcggatcgcctcgtgccctcgtccccgtgccggccccggccccgccccgccccgccccatccacccttttctcttttgtctttgcagcgccttctttgctcgtcgttgaaatatccacagcgaaaactaaaaacattcctccgcgacggctccaggctgcgaagtctcccaccaacgcgcgccgatccggaccgaaggcctcctgcagtcctgctctccgtctccctcgcggcctcgccccgtggatctccgctccggccgacgggcgcgatggcggagccggagcgggagcagcgcccgctgctagaggtggtggggtctgggcggtatatcctattgttttcaaaatcagcaacttctgtggcatctttcactgcatggtaacagctgtgttagctgtatttaccatcacaagctactgcttggcctcttctaaatctgcaggcgcgccaacaaatgtacgttggggcagctatcccttggttgggaaaagggatcttgagaactatactttttgtacatactgtaataaaccaaagccccccagagcacatcactgccgatcttgtaaaatgtgtgtggtggacatggatcatcactgcccatttattggcaactgtgtgggagcttcaaatcatcaagtgtttgtcatttttcttatttctgtggtcattagttgttcttatgctgctgggatgaccatatatgcaagctaccagatatggccctctgttgattttccaaacctagcatcatctcgtgattcaatgagcttttggaaaatatggttggagattattactacggttgcaggctctgccttcttcttgtcagcaagaggtctagttctggtatatctagcattcgctagtttatcagtcaatgctggtataggtgtactactgtgccagcagcttagttatatctacgaaggaaacacatatctcaaccatctaagttcaccgaatgcgttgcatggagagaggggtttgcataatattattagattttttgggtgcccttatccaatttccagagttctgttgcgatactcgaatgctggcaagttgcaggataattcagggtcaaaacttctctagagtgatacactcttactgttccagcaactgaggcagtgtatggaattagttgttccgagtcaagatggttctgttacctggaatcatgatttgtgaacctcagttgaccatcaacagattagtttgagtaactgaagttgttcagggacgcaacactcatgacagtccatgttctggactctggagaggagttgttcatgtcactcacattgatttggtagaacagctctggcagatgctgaagtaccatgtggcctgcgcattcattgcctgcagacaatcataaggtgctgatggcattgcaataaattgcagtatctgaaatcccgcaccatgcatcatcactgcctttttcgatagggctgaagatggaagcttcacgcttttggttgctgcagaagaaacggacatcaggattaaatctgacagcggctttgagtggtgctaggatgtttggaaaaatgtgtgcctccttgatgctaatacacggacatgtatataggaaaatgatacacccagcctagtgaggttaaccgagagccaacaaattagggttatctggagcctaacagttcattaagtacaacaaaactcggggagagatccgatcgccccaaaattctagtccgatggggaagggtggttctcccttttagggctagtttgggaacctactttttcgaaaggattttcatttttctaagaaaaaatagttcatttttccatgagaaaatagaaatcccattagaaaatagagtttccaaactaggccttaagatggttttttcctcacaagttatgcaaggtgatataattctaaggcttacacggtcgccgtccgactacatttatctttgccaacaggtaatagtggatgatgtactcatcatttccaacttaagatgggtcctagctctcatactagataataaagacatgctacggtggtgcccgtaagatttcc

SEQ ID NO: 23735 - DNA, 1154 bp, Zea Mays
ctcaaatattggcgagcaaaggtgggaagttgccttttgaagatgcatcagttggtgcggttcttgcagtcattaaaaacgtggaaagcttgagggagcaattggttgctgaaatcagtcgggtgctgaaagctggtggaagagtattggtgcagagccctgcaccctcatccagtcagaagccgaacactgaaattgagcgcaagttactgatgggtggatttgctgaagtgcaatcttctgctgcaaactcgcaagatagcgtgcaatctgttacagttaaggcaaagaaggctagctggagcatgggctcttcttttccccttaagaaaacaacaaaagcccttcccaagattcaaattgacgacgactctgatctgattgatgaagacagtctcttgactgaggaggacctgaagaaaccacaacttccagttgttggggactgtgaggtgggggcagcaaagaaagcatgcaagaactgtacttgtggcagggctgaggccgaagagaaggttgggaagctggagctcactgcggagcagatcaataaccctcagtcagcttgtggcagttgtgggttgggtgatgccttccgctgtggaacctgtccctacagaggtcttccaccattcaagcctggcgagaaggtttccttgtctggcaacttccttgctgctgacatatgatggcgatgcaagtgaacatcggcaaaacaaggagacgggggttacctacgttgttagtcgagtgaactgcattccaaatagcttctgttagccaatgcgaatgtgcgtgtgagtgacttgtctttcggatgatatatatataagctggccaatcgcgcctctacacaaacacaagtgtgcatcagtgcatgtgttttcagattgattttgtgagcctggatgtgaagaatgaatatcgctcaaccacattgtaaagctttacatacagactgcagagctagtcgccgctggtagcgaggtctagtactctggagagagatcgatcgaggggatggatgttaccaatgaaaagacacgcgcctctaggaacccccgcaagaggctcacagtacttcgtcgtgaaatcgaactgtttcagcctgtttggcctctgaaaatggctccggttgactatgaagtaaaaaa

SEQ ID NO: 23736 - DNA, 1778 bp, Zea Mays
atgttcagcagtaataaggcacagatccttgaatatttatgggggcatccatttgcaactctggacggtggcggcgagctgctcctggcccatttgcgcctgaatcaaacggtggagggagttagatgtaaaactttccacgccagccaaggatggtgggaggagttctctgcaaaattgccggctgtcgttggatggaagatagatggccgagatttaatatgcgcatatgagtacggtaccggtttgagcacacgatacgttgccttctcgaaacgccccgctcgacgactagggttttctggtaaaagaagcgaacacgatcctctccgctgtcgacatcggcagccgcattccaagccccgtcgcgggcatcaacagtgcctctcttctgcgtctgcggtggcaaacgacacggggcgagcagggtgcgcgaacctgaggttcgtaggcgtcgccttccgcccctcactgaagtcgtcgtcagcagctccctccagtctctgccacgattggactccatgtcggcggcgctcgcggtgacggacgaggtggccctgccgatccgggcggtgggggatctggcggccgccgccgaggtctcgcgggaggaggtcgccgtcatcacccagtgcgcggcgctcggtgggaagttgccttttgaagatgcatcagttggtgcggttcttgcagtcattaaaaacgtggaaagcttgagggagcaattggttgctgaaatcagtcgggtgctgaaagctggtggaagagtattggtgcagagccctgcaccctcatccagtcagaagccgaacactgaaattgagcgcaagttactgatgggtggatttgctgaagtgcaatcttctgctgcaaactcgcaagatagcgtgcaatctgttacagttaaggcaaagaaggctagctggagcatgggctcttcttttccccttaagaaaacaacaaaagcccttcccaagattcaaattgacgacgactctgatctgattgatgaagacagtctcttgactgaggaggacctgaagaaaccacaacttccagttgttggggactgtgaggtgggggcagcaaagaaagcatgcaagaactgtacttgtggcagggctgaggccgaagagaaggttgggaagctggagctcactgcggagcagatcaataaccctcagtcagcttgtggcagttgtgggttgggtgatgccttccgctgtggaacctgtccctacagaggtcttccaccattcaagcctggcgagaaggtttccttgtctggcaacttccttgctgctgacatatgatggcgatgcaagtgaacatcggcaaaacaaggagacgggggttacctacgttgttagtcgagtgaactgcattccaaatagcttctgttagccaatgcgaatgtgcgtgtgagtgacttgtctttcggatgatatatatataagctggccaatcgcgcctctacacaaacacaagtgtgcatcagtgcatgtgttttcagattgattttgtgagcctggatgtgaagaatgaatatcgctcaaccacattgtaaagctttacatacagactgcagagctagtcgccgctggtagcgaggtctagtactctggagagagatcgatcgaggggatggatgttaccaatgaaaagacacgcgcctctaggaacccccgcaagaggctcacagtacttcgtcgtgaaatcgaactgtttcagcctgtttggcctctgaaaatggctccggttgactatgaagtaaaaaa

SEQ ID NO: 23737 - DNA, 1070 bp, Zea Mays
ggaacgctggtccacggggatcggagcccggtagcaacaggcataaagcaccagcaggcagcaggcctaggagggccccggcccgggggtgcgctgtgtccacgtggcgttcaccatttcggcagaatccgatggcgcgcgctcctcattggccggcgctcaatccatccaaccgccgccgagatttccttcccgcgggcggatcaaaacttgtggctgccccgtgccgcggcgccgctattaataaaaaatctgacgacgtcctccttctcctgctcccttcaacggacttgaccactaaaagctaagcacacccccggccatggcgctcgcgtccacctccgccaccgcgcccgctgccgtgctcaagaccccggcgccatcgcgcccttctccttcggctcgctgctgggcacgcagctgctgctcatggggtgggtggagtcgaagcggtgggtggacttcttcaacccggactcgcagtccgtcgagtgggccacgccctggtcccgcactgccgagaacttcgccaacttcaccggcgaccagggctacccgggcggcaagttcttcgacccgctcggcctcgccggcaccgtcaaggacggcgtctacgtccccgacgtcgagaagctcgagcggcttaagctggccgagatcaagcacgcccgcatcgccatgcttgccatgctcgttttctacttcgaggccggacagggcaagacgccgctcggcgcgcttggcctatgatctgcatgctgccgcccacgacgtgtgtcgtatcatcagtcatcctgtttctcgattgcgagcgtcgtggtacggctgcatcggatcagacgcatccaacaaaatgggggagttttttttttgttcttcttcttccgtgtatgtaccatgtagtgtatagtagtctggatcgattcatgggaccaattaaggcagaatgagtgagcgagggacatttcgttacattaatctctcattccgccttgctgaattactatcgtctttcagaaacatggcgatattcctccgaagaccaattcatgaatcactagaaattcaaa

SEQ ID NO: 23738 - DNA, 1282 bp, Zea Mays
tccactccgctccatcctcactccctcccgatgccttccacttccctcgccgtccccaccggcgccgtcggcgtcgccggctctcgccgctatccattcatcagcaaccgatcagcctcaagcgccccgcgcctccgccgcgcgccccggctcgtcatggtctccgcctcggcgtctctcgaggccctcatctttgattgcgacggcgtcatactggagtcagagcacctccaccgccaggcctacaacgacgcgttcgcgaacttcggggtgcgctgcccgccgggctccgccgacctgctgtactgggacgaggccttctacgacaacctacagaaccgcatcggcggagggaagcccaagatgcggtggtactttggggaaaatgggtggcctccttcaaagatctttgagacaccaccttcgactgactctgataaggagaagctggttgatataattcaggattggaaaacagagagatacaaagaaataataaactctggaactgtgaagcctagacctggtgtcttgcagttgatggatgaagtaaaggatgcgggtatcaagcttgctgtttgctctgcagcaactaaaagttcagtcataatgtgccttgaaaaccttattggacttgagcgatttaatggcctggattgcttccttgctggtgatgatgttaaactaaagaagcctgatccaacaatatatataacagcatcagaggtgtggaaagcaagaactgccttgtggttgaggatagtgtcattggattacaggctgcaaaaggagcaggaatgtcatgtataataacatatacaccttcaactgctagccaagatttcaaggatgcaattgctacctatcctgaccttaataatgtcaggcttgaggacctcaagctattactccagaaaactcttgttactggatagcaaagtgtcttgttttccccaaagaatacattgaaaattttcttgatgcatgataatccacgctattattccctggatgttgaacagttggtgatgagtgttgaacagtagatgaatccaaacatacatcttgttgaacagttggtgctggatggtggaaggcatgattactcagatagataattaatgcaactagaaagatagatagttacgattgttaaaacttttgttgtgaagagtgatacaattgttgtgtatcgaaaaacaattttatcttacattttggagagaaaaattattatctcggggtgcccctcacatcgtgttttacaactgaaattgagaag

SEQ ID NO: 23739 - DNA, 1294 bp, Zea Mays
tccactccgctccatcctcactccctcccgatgccttccacttccctcgccgtccccaccggcgccgtcggcgtcgccggctctcgccgctatccattcatcagcaaccgatcagcctcaagcgccccgcgcctccgccgcgcgccccggctcgtcatggtctccgcctcggcgtctctcgaggccctcatctttgattgcgacggcgtcatactggagtcagagcacctccaccgccaggcctacaacgacgcgttcgcgaacttcggggtgcgctgcccgccgggctccgccgacctgctgtactgggacgaggccttctacgacaacctacagaaccgcatcggcggagggaagcccaagatgcggtggtactttggggaaaatgggtggcctccttcaaagatctttgagacaccaccttcgactgactctgataaggagaagctggttgatataattcaggattggaaaacagagagatacaaagaaataataaactctggaactgtgaagcctagacctggtgtcttgcagttgatggatgaagtaaaggatgcgggtatcaagcttgctgtttgctctgcagcaactaaaagttcagtcataatgtgccttgaaaaccttattggacttgagcgatttaatggcctggattgcttccttgctggtaaggtgatgatgttaaactaaagaagcctgatccaacaatatatataacagcatcagagaaattaggtgtggaaagcaagaactgccttgtggttgaggatagtgtcattggattacaggctgcaaaaggagcaggaatgtcatgtataataacatatacaccttcaactgctagccaagatttcaaggatgcaattgctacctatcctgaccttaataatgtcaggcttgaggacctcaagctattactccagaaaactcttgttactggatagcaaagtgtcttgttttccccaaagaatacattgaaaattttcttgatgcatgataatccacgctattattccctggatgttgaacagttggtgatgagtgttgaacagtagatgaatccaaacatacatcttgttgaacagttggtgctggatggtggaaggcatgattactcagatagataattaatgcaactagaaagatagatagttacgattgttaaaacttttgttgtgaagagtgatacaattgttgtgtatcgaaaaacaattttatcttacattttggagagaaaaattattatctcggggtgcccctcacatcgtgttttacaactgaaattgagaag

SEQ ID NO: 23740 - DNA, 1160 bp, Zea Mays
  misc_feature (1160)..(1160): n is a, c, g, or t
gcctttgctagcttccttggttccttccctccctctcctttgatccttaagcaacccttcccttccattccattccttggccacgtaacccaattacccaacgcatcgaggagcgcacgaaggcaaccgccttcccatcccaccgggcatcggcccatctgatccgatcaggctagatcctgccggtgccggtcttcgcgccgcctatggccgaaggcgacgcgcccgcccccgccgcggctgcagcggcggcgtccccgcggtcgcccatgccgcaggagacgccggcgatgcagaagcggaggcagcgggggctcgtgtcgcgggtgtggaagggcatcttcggcggccgcgaggacgtcgagaagctgctgcaggcgctgtccaaggaggaggaggccgtgcgggcgcgccttcgccgccgggcccgcgcctcccgccagtccgcgcacaacgtcctcgccctcgccgccgcgctcgaggtgatccgactcgcgccggctggattatctatccgatcatacatagcaaacaccgcacgtttctgcgcacttcgctgctgtatttctgctcctgcaccgtagaggatgggaattcctttctcgtagggcgctgaatccggttccaacagtggaatcaggaacatgatgagcaacctgccaggccatcgtgttacggtagtcagcaatagccgttgttatgattgggcatctatcgtcgcctcgcatcacacgcgatgctttgcgtaagttcagcgagtagagttagtactgttgctgaatggaatcgcattgggatcggctcatgagtgccccttcagatctaggccctttgagcaggagaaaattgtgttttgagatggtcccttgttatttcgtttttgcgacagattgttgccgttggatacgccatcatgaccacgagatcgccggacatcagctggcagatgagggcagtcagggtgctacccatgttcttggttcctgctctagctgctctcatctactcgaccattacaagcctcacgaaaatgcttgacaacagagaccaacaaactcttgaaaagctacgaactgaaaggcaagccaagattgatgaattgaaggagagaacaaattactacactactcagcaacttatacaggttcatttcagccctn

SEQ ID NO: 23741 - DNA, 409 bp, Zea Mays
atgcggcggcggaatggtatggtatcaggcgtgggagtgcggtggggagagcctgcgcgagatgcggaagcaatgggtgctccttctacctgccgccgtcccgatgcctcggctttatcgacggactggggggaggggaggcgcgggcaggaccagacggagggagaggtgggggaggtggcgaaggcggaagcggaaggaagaagagtgcagtctggagtggtaaagcggcggcaggagcaggacagacaggaagccatgaagggagcaggaaggaggcggtttggtttggctcacgaggcgctctcgcccgcgccgcgaagaccagttccatggaccggagccctgtagcttgtggggggaggatgaaggggattggtcagacggccatgggcacggtgcagccgag

SEQ ID NO: 23742 - DNA, 1601 bp, Zea Mays
  misc_feature (1)..(1): n is a, c, g, or t
natcctccgagggttattgacgggcgtgatgagccggccaaacctcctgctgctccttccttccgcggagtcaatgaggaggacaggcgcgcagggagtgcagtgacccatggcccgctgctgctccagctgagatggcacaactgcagacaaatcacgttcagaaggccagaagcatactacgtacacaacagccggcagctagcggcagttcatggccgctactgtgtttacctttgatgataagttttctggtcagatcctcttgctgctccagctcatcaccacccttcatttccatccgattcgaacccttgcgtgacaaggccctctgcaggtgaagagagcatgggcttacaaactcagaaagtattggcacttggccgttcaaatcttcaagtaaaggggcgcgggcatacgatcatttttggacttccggagcagcatttatcaggtggttgaggcagaccctcgatatccaacaccgcattggcggttctgtccatagctcgtgacccagccggggggcccctgcggcaaatgcttgatcacaactcatgacaagtacgaacagtacagaataccctatcagtgtgtgcgcttgcatcatctaatctaaacacatgagcacactaattaatgtgtttgacccaccgctaccagtacaacaaagcgttgtttgggaaagcacagttgcacagcggcataaaatccaagcacggtactactggatatgtataatggtatttaatatattgtgatatccttcccaacatgcagcggatatgtctatgtctatgcgcttgcatcatctaatctaaacacatgagcatactaattaatgtccttgacccaccgctaccagtacaacaaagcgttgtttgggaaagcacagttgcacaggggcataaaatccaatcacggtactactggatcagtggtacatgtataatggtgtttaatatactgtgatatccttcccaacatgcagcggatatgtctatgcgctagtattataggaacaaaacctgcagctttgcaaccatccacttgcaaaatatggcaagtggatggtggcagaataaaagaaaaaaaaagggataccacacgctctcgagaagaactcaagttaaaactggacagatcagtagatcacacatgctatccagctaaaactcgtgggggctaaaacaaaaggctgcacaggtttggtgtagtcgtttgttgagccgttgcaacttgcaagcgaccagtgacaaattattattaaaaagaaaaaaataggacaagaaatggggagtcagtacctgtccactccctttttctcgcagcgggttcctcgaggcagatacggatatgaaccgtgaaatccctcccacttcttccgagcactcagctgaagggcagtcttgtttatcttcccaaaaagctgaagaagttaaccagcggacctttttaattaaccggagatactgtaaaaaagacgaaaaagggatgtgaaacaaagtgaacttgtgtggtggttttctgccgcgataaactggatggactgactgaagaatccatcaccgcccattacagaaaacaaagaattttcgttg

SEQ ID NO: 23743 - DNA, 452 bp, Zea Mays
gttccatacaaacgacccactctaataccttagagaagcagctgatgatccaagtagcagagctagttcccaagcatcacggaaggacaaagaagcaggagccagcgcccaatcccggtggcagttcaaagaacacaaaaggcgggaaaaagaaaaagtgatgcagtatcattgtgttgttttttattctgttcgtcatcatacactaagcttctgtgaaaaagaaaaagtcttggacgttgttgttatgttgccattatgccatttttcatgtataagaacttactaagaatcttccattgactcggtaaaatgcaacataaaaaaatggcttcgctagattaaagggccctttgacaaaggttcgccttctctggctattttgtaattcgtctgacaaaacaggttcttttccctatgtttcgtaagttagattttcttacgtagtgtgt

SEQ ID NO: 23744 - DNA, 824 bp, Zea Mays
agtttctatagtgtcatactgtcatttccagacctgaagaaactccgaccggccggtgggcggtggcggcagccggcaggatctgtgccgcgatggcgacgtcgaacacggcgcggatggaggacggcggcggcgacctgcggagcaccatcaagaagtggaatatcatctaccctgtctacctcaactccaagaagacggtcgccgagggccgccgcatcgccgctgccaaggcctgcccggaccccacctgcatcgagatcgctgactgctgttcgcacctcaagatcccccacgccatcgagttggataaggcgtaccctcgggatttcttccaggtggggagggtcagggtgcagcttaagaaagatgacggctcccccgtcaatcctgctattaaaacgaagaagcagctgatgatccaagtagcagagctagttcccaagcatcacggaaggacaaagaagcaggagccagcgcccaatcccggtggcagttcaaagaacacaaaaggcgggaaaaagaaaaagtgatgcagtatcattgtgttgttttttattctgttcgtcatcatacactaagcttctgtgaaaaagaaaaagtcttggacgttgttgttatgttgccattatgccatttttcatgtataagaacttactaagaatcttccattgactcggtaaaatgcaacataaaaaaatggcttcgctagattaaagggccctttgacaaaggttcgccttctctggctattttgtaattcgtctgacaaaacaggttcttttccctatgtttcgtaagttagattttcttacgtagtgtgt

SEQ ID NO: 23745 - DNA, 840 bp, Zea Mays
gaagtttctatagtgtcatactgtcattgtctcttttccagttccagacctgaagaaactccgaccggccggtgggcggtggcggcagccggcaggatctgtgccgcgatggcgacgtcgaacacggcgcggatggaggacggcggcggcgacctgcggagcaccatcaagaagtggaatatcatctaccctgtctacctcaactccaagaagacggtcgccgagggccgccgcatcgccgctgccaaggcctgcccggaccccacctgcatcgagatcgctgactgctgttcgcacctcaagatcccccacgccatcgagttggataaggcgtaccctcgggatttcttccaggtggggagggtcagggtgcagcttaagaaagatgacggctcccccgtcaatcctgctattaaaacgaagaagcagctgatgatccaagtagcagagctagttcccaagcatcacggaaggacaaagaagcaggagccagcgcccaatcccggtggcagttcaaagaacacaaaaggcgggaaaaagaaaaagtgatgcagtatcattgtgttgttttttattctgttcgtcatcatacactaagcttctgtgaaaaagaaaaagtcttggacgttgttgttatgttgccattatgccatttttcatgtataagaacttactaagaatcttccattgactcggtaaaatgcaacataaaaaaatggcttcgctagattaaagggccctttgacaaaggttcgccttctctggctattttgtaattcgtctgacaaaacaggttcttttccctatgtttcgtaagttagattttcttacgtagtgtgt

SEQ ID NO: 23746 - DNA, 2470 bp, Zea Mays
ctcctcacgggtcctcacccgccgccatgctcctcacctgaggtctcctcatccacgcccaggctcctcaccgcgcccacgccagcagggggcttgcgccagcagccagcgctctccggtccccgcaccaccgactgcagccggtggttgttcgattgccgccccgaagctctccaccatcgtcgccgtcgacgccctccacgttggctgctcctcctacaacaggtgacagtgttacttgatgaacacaattgtacctccagcgctagaagaaagaccactacacctactagtgcatgggtggcatcaaaggctattcatctgttaaagaattcagccatgggaactaaagatttaaggattaggttggaagaaaaatacaagtgtgaaataccttatgacactgtttggaagggaagacaactagcactgaaagagttgcatggcagctgggaagaaagctttcagatgctattcaattggagagcagatgttttgagtcggtctccagagagtgtcatcgaggttgacattaaagaggtggatggcaaggtatattttcataggtttttttgtgcattgggtccttgcattaaaggtttttagagggttgcaggccatatctaagtatagactctacagcacttaatggtaggtggaatgggcatatggctgcagcaactgctatagatggtcacaattggatgtacccagtagcctttggattcatagatggtgaaactgaagataattgggtctggttcatgagtcaaatgaaaagggccataggagatctccctttgcttgctgtgtgcacagatgcatgtaaaggactcgaaaaggcagttaagcttgttttcccttatgctgaacaaagagaatgctttagacatctaatgcagaattttgtaaaaagatttggtggtgacatcttctccaatatgtaccctgcagccagagcttataggccaggagtcagccagtacttttacaatcaagttgtggaagcttcagaggatgcaaagaagtggctagaaatgtaccataatttgaagtggaaaaggagtgagtttaaccctgccattaagtgtgattatatcaccaacaacctagctggagttttcaacaattgggttaaagattggaaagaccttccagttgttgagcttgcagacaagtgtagatgtggagctggaggattttgtgcatgatttttattcagttcagaggttcaaaagtgcatacaagagaattatagagccaatgccagataagtctcagtggccacatgtggacctaccatttgctgttgctgcaccactagacaagagaggtagaggaaggtacaaaaaactcagaatcaagagttgtcttgaaggtgggaatagcaagagcaagaaggctgctgcagaaaaaggaaaagaggctgacaaagaggcagctaatgaagttgacatgcaggctgaaaaccaaactgaaaaaggcaagaagaagatgataagagggaagagaaggtgcaaaaaatgtggagaactaggccacggtgaaaccagctataagtgtccattaaatggaacaaagaaaaggaagagaaagcctcggaagaacacaactaagtatagggagaatgccaaagtgccaacgcaaaagaagtcaaaagaatgtgctgctgtccaagaaatggaggaaggtgcttgtgtccaagaaatggaggaagttgctgctatccaagaaatggaggaaggtgctgctgttcagaacccaactaagcctacaatggaaacaattataaatgatagcccaattagggtcaccagaagtcgacttgcaatgctattgggagttggtccaacctcacaggaagtttgtataaggtttgctgctacagaccattgtaaggttctgctcttctccaagtcgcgtgggggctggagaccgtgggggctgcagaccgtgggcgtgggtgtgggtgcaggcgcgggtaaatcgacagggaggatgttgttgaaggagcgcctcttcgatggaaagaaagataatatgtttttgctgcttgatgagtgcttacatgagaggcgagagtcgacaaaggacgccaagtccctcaagacccagcggccttgccactgtgggccagttaaccttgcacttgccaccagtgtggttctcattcccttcctagaggaatcgcttcctaaatttgtcgatttcttagagtaccgtctttggtacattaatggtcgtacttcaagatctagtgcaaaaggatgggaagttgtcgtctctatatagaacgagataagcaattttctctttgcatggcaacatgagacctctttttgtcagttttattttaggagacagatccatgtccctacttcctagattatgtcaatttagaggagaaacctacacattcagtttgttcggggcgtgtgtgtcagttaaaagaaagaattgtgcttttgat

SEQ ID NO: 23747 - DNA, 1006 bp, Zea Mays
ggaagcttcagaggatgcaaagaagtggctagaaatgtaccataatttgaagtggaaaaggagtgagtttaaccctgccattaagtgtgattatatcaccaacaacctagctggagttttcaacaattgggttaaagattggaaagaccttccagttgttgagcttgcagacaagtgtagatgtggagctggaggattttgtgcatgatttttattcagttcagaggttcaaaagtgcatacaagagaattatagagccaatgccagataagtctcagtggccacatgtggacctaccatttgctgttgctgcaccactagacaagagaggtagaggaaggtacaaaaaactcagaatcaagagttgtcttgaaggtgggaatagcaagagcaagaaggctgctgcagaaaaaggaaaagaggctgacaaagaggcagctaatgaagttgacatgcaggctgaaaaccaaactgaaaaaggcaagaagaagatgataagagggaagagaaggaagagaaagcctcggaagaacacaactaagtatagggagaatgccaaagtgccaacgcaaaagaagtcaaaagaatgtgctgctgtccaagaaatggaggaagttgctgctatccaagaaatggaggaaggtgctgctgttcagaacccaactaagcctacaatggaaacaattataaatgatagcccaattagggtcaccagaagtcgacttgcaatgctattgggagttggtccaacctcacaggaaggtctgccatcagcatcagacaagatgacaactcctacaaagctaacacctaggaaactgagatgctgatatgtgaaatcagctagtatttattagtagcatgtatctgagatgtgaactgaaccactattagtagcatgtatctgagatgtgaactcgaccactattagtagcatgtatctgagatgtgaactcaaccactattatgtatctaagaaagtttgagatggctacttgccttttct

SEQ ID NO: 23748 - DNA, 2147 bp, Zea Mays
ggccaagctcctcacgggtcctcacccgccgccatgctcctcacctgaggtctcctcatccacgcccaggctcctcaccgcgcccacgccagcagggggcttgcgccagcagccagcgctctccggtccccgcaccaccgactgcagccggtggttgttcgattgccgccccgaagctctccaccatcgtcgccgtcgacgccctccacgttggctgctcctcctacaacaggggaggattgcccgtggcatatcgtgggccgtaggcaacccgatgggaagactgttatggtgacagtgttacttgatgaacacaattgtacctccagcgctagaagaaagaccactacacctactagtgcatgggtggcatcaaaggctattcatctgttaaagaattcagccatgggaactaaagatttaaggattaggttggaagaaaaatacaagtgtgaaataccttatgacactgtttggaagggaagacaactagcactgaaagagttgcatggcagctgggaagaaagctttcagatgctattcaattggagagcagatgttttgagtcggtctccagagagtgtcatcgaggttgacattaaagaggtggatggcaaggtatattttcataggtttttttgtgcattgggtccttgcattaaaggtttttagagggttgcaggccatatctaagtatagactctacagcacttaatggtaggtggaatgggcatatggctgcagcaactgctatagatggtcacaattggatgtacccagtagcctttggattcatagatggtgaaactgaagataattgggtctggttcatgagtcaaatgaaaagggccataggagatctccctttgcttgctgtgtgcacagatgcatgtaaaggactcgaaaaggcagttaagcttgttttcccttatgctgaacaaagagaatgctttagacatctaatgcagaattttgtaaaaagatttggtggtgacatcttctccaatatgtaccctgcagccagagcttataggccaggagtcagccagtacttttacaatcaagttgtggaagcttcagaggatgcaaagaagtggctagaaatgtaccataatttgaagtggaaaaggagtgagtttaaccctgccattaagtgtgattatatcaccaacaacctagctggagttttcaacaattgggttaaagattggaaagaccttccagttgttgagcttgcagacaagtgtagatgtggagctggaggattttgtgcatgatttttattcagttcagaggttcaaaagtgcatacaagagaattatagagccaatgccagataagtctcagtggccacatgtggacctaccatttgctgttgctgcaccactagacaagagaggtagaggaaggtacaaaaaactcagaatcaagagttgtcttgaaggtgggaatagcaagagcaagaaggctgctgcagaaaaaggaaaagaggctgacaaagaggcagctaatgaagttgacatgcaggctgaaaaccaaactgaaaaaggcaagaagaagatgataagagggaagagaaggtgcaaaaaatgtggagaactaggccacggtgaaaccagctataagtgtccattaaatggaacaaagaaaaggaagagaaagcctcggaagaacacaactaagtatagggagaatgccaaagtgccaacgcaaaagaagtcaaaagaatgtgctgctgtccaagaaatggaggaagttgctgctatccaagaaatggaggaaggtgctgctgttcagaacccaactaagcctacaatggaaacaattataaatgatagcccaattagggtcaccagaagtcgacttgcaatgctattgggagttggtccaacctcacaggaaggtctgccatcagcatcagacaagatgacaactcctacaaagctaacacctaggaaactgagatgctgatatgtgaaatcagctagtatttattagtagcatgtatctgagatgtgaactgaaccactattagtagcatgtatctgagatgtgaactcgaccactattagtagcatgtatctgagatgtgaactcaaccactattatgtatctaagaaagtttgagatggctacttgccttttct

SEQ ID NO: 23749 - DNA, 751 bp, Zea Mays
atgaaccccaattcaccccttttcttctctctcttccaggcgtcttgacagcagatttatgatgatctcatcagacaccagttttccttgattgacaatctcagcaagctggaaaggaagcatacaaccaacacaatcaattaaaaaactgacagaagatttatgttgatctcattagatgccagttttccatgattgtcaatctcagcaagctggaaaagaaacacacagctaacacaaaatcaagcaaacagaactacaaagtggtcaaagaggaggcacaacaggagattctaattttctatgtgaaattgcattggcaaggttatggtctaactacaactaaactacagcctacattcagaggccaaacgattaaattacatatttacactgtttaatttatttaaacaacaaacagctagcagcctatgtggagctacttattgattttacaagcttctgaagggtttatggattatttgcccaaagatttatttaaccatattactctacaggtcaagtaaaaatctctttattccgcacagacggaaagcaatgcatcgtggaagcagccacaatgagcagcttcgtgagattgcttggagcttacaagcgaactacaacatgacgcaccggatccatcaacctgatcaatctaagtgccaggtagtaatccagtaacgctgagatttaccttcctcgagaaggggctgttgtaaatttagaggaataagtgacatgctttcta

SEQ ID NO: 23750 - DNA, 111 bp, Zea Mays
atccacaacgtttcaaattgcttctggtatgcacctctttcaacaagttcatatatggtacaggctacgaatgaatgtctggtcatcgaacaactatttctttgcttttac

SEQ ID NO: 23751 - DNA, 946 bp, Zea Mays
ccgacccgtcgtcgtcctcaccggactccgacgaccccgtcagctcctccgctgcacgtacacatccacgatccatccatgcaacacgtcatcaaaaaaacgctgcagggagggaccaggctggctaacatatataaactgcacagcagttactaccatatgcattgcgacttatgtatatagcacactgtaatctacttaaactgcgaaaacaacaaacaggctggagtgctggacaacaaaaggtgctttgttagttcgtttcaacagttgctccaagctttcaggcttttagaattggatcttgccaatgcctttacaaagtgactgcgacctttgtttcttactttgcattgcttcgcctgtgtagtagttcttatactagccacatgaaatctattttctcattttattttgtcatctatctctgcaatgcaagtaaaaccctccataaactatagaattcgccgcctactttgccctgcatgcatgagctgcgctgcactctgatgaacgctgctttattctcatctcccagcgctatcaccactgccacccaccggggaagaaggcacagtaaaaaaaagttaaaaagcgagcccccctaccccgcctggtgaggtaaataattagaccagctcgagggagcatctgatctcccccaatcataacgcctggctctaagcatataaataacatcgtggcgatccaggggcccacgtgtcagttgagacgagacgagacgacagacgaacagtaaatggaacgggtagatagatgtaacagcagcttggtgttaagtacgggcgcggcgcgcgccgaccgaccataccggaaacggacgtcgccggcggaggcacggccgccggaagcggcagcggaggaggcggagcgcggggctggacgatggggggcttcggtggcgatggaggaggaagcggcggag

SEQ ID NO: 23752 - DNA, 719 bp, Zea Mays
gcagcaccggcctccctcatcgaccataataatacccacacaccacaccacggcagctggcatgctgcacagtaacaatgtccactgatcgcaacgcaagctccatctccagtcaacaacgagtcaatgcatgcacaaaaaaaaggggagggagggagctcaaagcagatacctagcactagcagcagcagcagcaggaggacacgttgtacttactactactacatgcacgcgagcgagacggaccaatgcaatgctacacacacgcttccattccaccacctccaaaagaattcggagtcacacagcctccaacaaacaatgaatcacgcttcaccttatttacatcctggtcggtcggtcggtttgtcggtcgatacctggatcatgttgtcgtcggagcccagatatagccgcccggccgcgacggacgacggatcgcacaacgaacgccggcgcggcggcagatgagccgagccgagctgagctgggagaggtgttgacaacgacggacggtcaaggccgagcgttagttgccggcctgcccggcccgatcaccgggaggcggagtcgccgctgcggtggtcggagacgagggcgtggatggcgctggagaggctgttgacggcggagacgaggcccgcgaagccctggcgccgcacctccgtgcgctcctcctccagccgcagccgccgctcctccagctccaggacctcccg

SEQ ID NO: 23753 - DNA, 1416 bp, Zea Mays
aagaaaatcacgcgggattaagacgatttctgcgtgggagtaacagaaatcaccttttctcttttaaggcatgcgacctaatgcatcagctgcatttcgtaactttgaacaagaagcaagacaatctgctgtttgggactctgaccagaatgctacatctagttctggtgataatcttgcttctttataccgtccacctttttctttgatgttcaacggaccctttgacaaggcaaagttagaggcttcttccctggacaaatggctattaatcaatttgcagtcgacagcggaatttagctctcacatgcttaatcgagacacttggggaaatgatgcggtggctcagttgattcggtcaaattttattttctggcaggtttattatgacaccagtgaggggaggaaggtatgcacctactaccatttggtgtccatgcctgctattctcctaattgaccccgtcactgggcaaaaaatgcatgcttggaatggaatggttcacccagatcgtttacttgaggatttactaccttacctggataaaggtccgaaggagcaccatgcagctcaacctcaaaagcgcccaaggaaagttgatccggaagcttctacgggcaagcaaggcaaaatagctgtagaggatgaagatgaagagctagcacgggcagtagcagcttctctagaggagagtaaagaagtcattgaagcatcagacgccagtgatgacatggttgaagctgaacccgaggaggaaaatgagcccaccctaaacaccaagcctgattaccctcctctccctgaagaacctacaggaagcagggaccttctctgcagggttgcgattcggctaccgaacaaccggaggatccaaagaaacttccttcacacagatcctatcaagctcttgtggtcattctgcgctcctcaggtcgaggacggggagaggagggctttccacttcgtccaggcaattcctggggcatcccagaaactggagttgggaagcgacctaacattcaaggaagccgggctggccaactcgatgatcaacctcttgttggactgagccgcccgctctctcaacctgcactttgagatgagacgccgtcggccggtcgaggggtttgtatttcaggatgggcttgaagatgatggtgcgcttgggtatcttctttccttgaggattaactcttatcttttgctccactggagctaggagtccgaggacaaaccaaaaaaaaaagtctggtgtgccctgagctgtttgtgtgtggaaatggtccttttgtcgttcgttcttgtgtccgtatacatcctgtccccggtagggcttaactctatttaatgcacatatctatgaaagattcagtctggagcttgctttgatgctcccctctgggctctggtcgtgtc

SEQ ID NO: 23754 - DNA, 2425 bp, Zea Mays
tcgtcttcatcaccccgcacgtctccacttccctttccttacttcccactccttccccacccacccaacccaaccctcccaatcccacactcgtcgtcccagtcccaccgaaccctactcaccaacaacagacccgcaggagaagggggaaagggggggaaattcctgtggagacgacttcgccgccatggcgggcgatcccccgacggccgcggagaaggagaccctggtctcctctttcctcgagatcgccgctggccagacccctgagactgccactcagttcctcctggtccggtttccgctctcccccaaaaccaaagcttctactcgatttctcgtctcaatcctgtccgatgtgatcccggggtttccattccgcagatgacgagctggcacctggaggaggcgctgcagctgttctacatcgacggcgagtccgccctcaccccggcgcatccggtggccccgccgcccacgtcggcggccgcgtcggcgttggcggcagcggccggggcggaagaggcgatgaggttcgctccacccccggcggctgcactgggcgatgcaatgttgcatggatttggggtcggggaggacgacgacgtccgcgcgcctctgcctgtgaagagggagactctgtacggcgagggcatcgtatccgtcatgcgacctaatgcatcagctgcatttcgtaactttgaacaagaagcaagacaatctgctgtttgggactctgaccagaatgctacatctagttctggtgataatcttgcttctttataccgtccacctttttctttgatgttcaacggaccctttgacaaggtaagctttatatcagttatacgactcattagtttacatgcttgtgaaaatgtatggacactattttgttgtttgcatatatggaaaactgcacaacatataactgccactatgcctatatctcagttggctgatgaatttcttgaacatcatagctatagagcaattatcagtgttagttggttaattattatttaaattctcctttaagaaaatgaaataataccgtaatactgtatattttaggatgtgttttgttgtcaatatatagtggattgatgtctataatagtgttctttcaaatttattgttccacgacttgtgcacataaactacctttgagctgaaactccacgagattcttaactattgctgatattttgtcattcttatgattttttttccaaatgtaggcaaagttagaggcttcttccctggacaaatggctattaatcaatttgcagtcgacagcggaatttagctctcacatgcttaatcgagacacttggggaaatgatgcggtggctcagttgattcggtcaaattttattttctggcaggtttattatgacaccagtgaggggaggaaggtatgcacctactaccatttggtgtccatgcctgctattctcctaattgaccccgtcactgggcaaaaaatgcatgcttggaatggaatggttcacccagatcgtttacttgaggatttactaccttacctggataaaggtccgaaggagcaccatgcagctcaacctcaaaagcgcccaaggaaagttgatccggaagcttctacgggcaagcaaggcaaaatagctgtagaggatgaagatgaagagctagcacgggcagtagcagcttctctagaggagagtaaagaagtcattgaagcatcagacgccagtgatgacatggttgaagctgaacccgaggaggaaaatgagcccaccctaaacaccaagcctgattaccctcctctccctgaagaacctacaggaagcagggaccttctctgcagggttgcgattcggctaccgaacaaccggaggatccaaagaaacttccttcacacagatcctatcaagctcttgtggtcattctgcgctcctcaggtcgaggacggggagaggagggctttccacttcgtccaggcaattcctggggcatcccagaaactggagttgggaagcgacctaacattcaaggaagccgggctggccaactcgatgatcaacctcttgttggactgagccgcccgctctctcaacctgcactttgagatgagacgccgtcggccggtcgaggggtttgtatttcaggatgggcttgaagatgatggtgcgcttgggtatcttctttccttgaggattaactcttatcttttgctccactggagctaggagtccgaggacaaaccaaaaaaaaaagtctggtgtgccctgagctgtttgtgtgtggaaatggtccttttgtcgttcgttcttgtgtccgtatacatcctgtccccggtagggcttaactctatttaatgcacatatctatgaaagattcagtctggagcttgctttgatgctcccctctgggctctggtcgtgtc

SEQ ID NO: 23755 - DNA, 1204 bp, Zea Mays
gacgactgacgacagatcgcttgtgcgtcgctaacccgccgctagtcggctagtgggtgggaaatccgcagattcccgtcgctacttcggccacatggctgcagcggcggcgtggaccggcgccgcatcccccaactcgctgctgctctcgcgctcgcctccccacgccgccgcgctcgcgccttcgccgggaagctccatgcggaggcggctcctcctcggcgtcggcaccccggccgtggcggcgctggcggccgcggcgccgccagcggtgctgcaggacggagcggtcactgtgctcatcaccgccggcgcctactctcttgtgcgcgtcttcgacgagctcaccgagcggcggctcatcgaaaagagcttgagcaggaaggttgtgcacgtgctatccggcgtcctgttcatgtcatcttggcccctgttcagcaattcgacagaagcacggtatttcgccgcggttgtcccgttcctgaactccatgaggcttctgatatatggactccgtctctacactgatgaagctctgcttgctgctctgacgataacgactttgcttctttacagggaattgctgagaggtccactctattatgtcctggtgctgctgttcagcgttttagtcttctggcgtgagtcccccatcgggatcgtctccttgtcgatgatgagcggtggcgatggttttgctgacattgttgggaggaggtatggctcagcgaagctgccattcaatcggaagaagagctgggccgggagcatctcgatgttcatttctggtttcctgctgtccgcgatgatgatgctctacttctcaagcctgggttacattgatgttatctgggaagaggcacttggtaagctggcgcttgttgcactagcagcgacagtagtggagtgcgttcctgtgaccgaagttgtagatgacaacatatctgttcctttggccaccatgctggtagcttttctcttgtttagctccaaccgcacaatagttaattaaaatactactagtgcattatttaagacatgtgatgagttcttcagtgatgagttgtgcttgcttttgcttcctatgtgatctctagtacttgatggcgacggcctaacatctcccagtttttggtgtctccctccctgccttggctgttttggtggaaaagtattgttcgcttgtctaaagtgaatctctcac

SEQ ID NO: 23756 - DNA, 2101 bp, Zea Mays
ccgctgtttggaaccgagcacccaaacccagtattcggatctgtggcggaaatttgatgagttagagcttattactggtctgatactcctatacgatgtcactgaaacttccaattccgcaagggctttccttcttaagaagtgttggatggtttgaggaccggaaggttgattcagcagccaaacagcagttatccccaacgttgaaactccagacagataaggagacgtacagacctggtgattcagtcactgtgactatcgaaatctgtagcccagctagtttgaaggatgatgttgggcaggcagtgtcaggcgaggatgccccctcgctgttgttagatgtgctatcatttgaacttaaagggattgagaagctggatactcaatggttctctgttcctaagcccttaccagggtctaaacaaaggcgaggtgaacatatgtttctggattgttcggcaccatcactggtctctaaagtaataattggtgcagggcgaacaaaaacgtacattgcacgtgtggagctcccaaagactttgccgccatcttataggggcatcagtatccgctatttttattatgttaggaccacattatttggaaggccagttatgttgggtaatggagaccaatataaaggtcttgtgaataatgcaattcatctggaagctagagtcccattgcagatacgtgtttcccagaaaagcagcagcctactaaatgaagaagatgttttagggaatctgcctttttcggtggatcaaccgagcatattttggaagggaaaagatgaagattcagaatggagcaaagcaaatgataatgttgatctagaagaaggatatgatagttctaaagatgaagtttcatctgtttcctcatacaatccttcaaaagcacatcctgaattctccctaaggagctcgttgtcaatgcattctctgtcatcacggctctccacgagtgagctattttacaatcaagtggaacgacctaatttcccatcatacaatccaattcctcgattgtcagtgtcagagatttcagatgatcatgacggaggtttagtggcatctcaaaggaaactaaacattttgctaccagaccatacatcgaatgggcaaagggtttctccagattctgatcactcaaaagatgatgctggactcccccttacgccaaaaaatgttgatccagctggatctgaaggctttacgacaggaagatcttataatataagaattgatgaccaagttttgcttcggttttcaccaaagaattctgactcaacctattactttggtgatatgattggtggagcacttaccttctttcacggaactggaaaacggaggtgcctcgaggtatctatagccctggaaacatctgaaacaattaatcctcgcgcattacatccttcaagaaggggctcaccaacaataaccaagctacacagtgaacatcatgaggttgttgcggatcttcaccagacaagctttctgttttccattcccattgatggccctatgtctttttgtacctcaaaggtcactgtacagtggtctcttcgatttgagttcttcacaactccggaaggaacagacccagctaggtacgagcacccactccttgttgataaaagagagaagggtgaatgggtgctcccggtaactgtttacacacctccattgcgcagacgagctactcatgagaggaatggtagatctgtctcacctggaaatatcttcaactcttgaagtgcactgttgccgaagtatagttactttcagctggaaaggatttacagactattctgactggtacaattgcatcaaaaggattttctcgctgtaaattgttataggatttgcaatgcgatgtctatttttttaatagagaacaaatggagtgaaatacttgacttgcaccaaatggatttattggaccatttgtttcatcgatttgtatcccatgagagatgcatcctggccaaaatttggtgttcagtgcattcattatttagcttatagttgaccttgaccaaagtatgagagcttaccacgacgcaaccatttggttctctcgaatagtacac

SEQ ID NO: 23757 - DNA, 2226 bp, Zea Mays
actcgtctccctcctcgcttgcgctctgtttcggtgtttcctgtttcggtgtttcctgtctctggtggcgacgactgggcggccgacgctgccaccgccctacgccaggtgaccaggtctttcgtattcgggatcttcgccggcgtcgagcacccggccataatgcagtggcggaaatttgatgagttagagcttattactggtctgatactcctatacgatgtcactgaaacttccaattccgcaagggctttccttcttaagaagtgttggatggtttgaggaccggaaggttgattcagcagccaaacagcagttatccccaacgttgaaactccagacagataaggagacgtacagacctggtgattcagtcactgtgactatcgaaatctgtagcccagctagtttgaaggatgatgttgggcaggcagtgtcaggcgaggatgccccctcgctgttgttagatgtgctatcatttgaacttaaagggattgagaagctggatactcaatggttctctgttcctaagcccttaccagggtctaaacaaaggcgaggtgaacatatgtttctggattgttcggcaccatcactggtctctaaagtaataattggtgcagggcgaacaaaaacgtacattgcacgtgtggagctcccaaagactttgccgccatcttataggggcatcagtatccgctatttttattatgttaggaccacattatttggaaggccagttatgttgggtaatggagaccaatataaaggtcttgtgaataatgcaattcatctggaagctagagtcccattgcagatacgtgtttcccagaaaagcagcagcctactaaatgaagaagatgttttagggaatctgcctttttcggtggatcaaccgagcatattttggaagggaaaagatgaagattcagaatggagcaaagcaaatgataatgttgatctagaagaaggatatgatagttctaaagatgaagtttcatctgtttcctcatacaatccttcaaaagcacatcctgaattctccctaaggagctcgttgtcaatgcattctctgtcatcacggctctccacgagtgagctattttacaatcaagtggaacgacctaatttcccatcatacaatccaattcctcgattgtcagtgtcagagatttcagatgatcatgacggaggtttagtggcatctcaaaggaaactaaacattttgctaccagaccatacatcgaatgggcaaagggtttctccagattctgatcactcaaaagatgatgctggactcccccttacgccaaaaaatgttgatccagctggatctgaaggctttacgacaggaagatcttataatataagaattgatgaccaagttttgcttcggttttcaccaaagaattctgactcaacctattactttggtgatatgattggtggagcacttaccttctttcacggaactggaaaacggaggtgcctcgaggtatctatagccctggaaacatctgaaacaattaatcctcgcgcattacatccttcaagaaggggctcaccaacaataaccaagctacacagtgaacatcatgaggttgttgcggatcttcaccagacaagctttctgttttccattcccattgatggccctatgtctttttgtacctcaaaggtcactgtacagtggtctcttcgatttgagttcttcacaactccggaaggaacagacccagctaggtacgagcacccactccttgttgataaaagagagaagggtgaatgggtgctcccggtaactgtttacacacctccattgcgcagacgagctactcatgagaggaatggtagatctgtctcacctggaaatatcttcaactcttgaagtgcactgttgccgaagtatagttactttcagctggaaaggatttacagactattctgactggtacaattgcatcaaaaggattttctcgctgtaaattgttataggatttgcaatgcgatgtctatttttttaatagagaacaaatggagtgaaatacttgacttgcaccaaatggatttattggaccatttgtttcatcgatttgtatcccatgagagatgcatcctggccaaaatttggtgttcagtgcattcattatttagcttatagttgaccttgaccaaagtatgagagcttaccacgacgcaaccatttggttctctcgaatagtacac

SEQ ID NO: 23758 - DNA, 2173 bp, Zea Mays
actcgtctccctcctcgcttgcgctctgtttcggtgtttcctgtttcggtgtttcctgtctctggtggcgacgactgggcggccgacgctgccaccgccctacgccagaatgcagtggcggaaatttgatgagttagagcttattactggtctgatactcctatacgatgtcactgaaacttccaattccgcaagggctttccttcttaagaagtgttggatggtttgaggaccggaaggttgattcagcagccaaacagcagttatccccaacgttgaaactccagacagataaggagacgtacagacctggtgattcagtcactgtgactatcgaaatctgtagcccagctagtttgaaggatgatgttgggcaggcagtgtcaggcgaggatgccccctcgctgttgttagatgtgctatcatttgaacttaaagggattgagaagctggatactcaatggttctctgttcctaagcccttaccagggtctaaacaaaggcgaggtgaacatatgtttctggattgttcggcaccatcactggtctctaaagtaataattggtgcagggcgaacaaaaacgtacattgcacgtgtggagctcccaaagactttgccgccatcttataggggcatcagtatccgctatttttattatgttaggaccacattatttggaaggccagttatgttgggtaatggagaccaatataaaggtcttgtgaataatgcaattcatctggaagctagagtcccattgcagatacgtgtttcccagaaaagcagcagcctactaaatgaagaagatgttttagggaatctgcctttttcggtggatcaaccgagcatattttggaagggaaaagatgaagattcagaatggagcaaagcaaatgataatgttgatctagaagaaggatatgatagttctaaagatgaagtttcatctgtttcctcatacaatccttcaaaagcacatcctgaattctccctaaggagctcgttgtcaatgcattctctgtcatcacggctctccacgagtgagctattttacaatcaagtggaacgacctaatttcccatcatacaatccaattcctcgattgtcagtgtcagagatttcagatgatcatgacggaggtttagtggcatctcaaaggaaactaaacattttgctaccagaccatacatcgaatgggcaaagggtttctccagattctgatcactcaaaagatgatgctggactcccccttacgccaaaaaatgttgatccagctggatctgaaggctttacgacaggaagatcttataatataagaattgatgaccaagttttgcttcggttttcaccaaagaattctgactcaacctattactttggtgatatgattggtggagcacttaccttctttcacggaactggaaaacggaggtgcctcgaggtatctatagccctggaaacatctgaaacaattaatcctcgcgcattacatccttcaagaaggggctcaccaacaataaccaagctacacagtgaacatcatgaggttgttgcggatcttcaccagacaagctttctgttttccattcccattgatggccctatgtctttttgtacctcaaaggtcactgtacagtggtctcttcgatttgagttcttcacaactccggaaggaacagacccagctaggtacgagcacccactccttgttgataaaagagagaagggtgaatgggtgctcccggtaactgtttacacacctccattgcgcagacgagctactcatgagaggaatggtagatctgtctcacctggaaatatcttcaactcttgaagtgcactgttgccgaagtatagttactttcagctggaaaggatttacagactattctgactggtacaattgcatcaaaaggattttctcgctgtaaattgttataggatttgcaatgcgatgtctatttttttaatagagaacaaatggagtgaaatacttgacttgcaccaaatggatttattggaccatttgtttcatcgatttgtatcccatgagagatgcatcctggccaaaatttggtgttcagtgcattcattatttagcttatagttgaccttgaccaaagtatgagagcttaccacgacgcaaccatttggttctctcgaatagtacac

SEQ ID NO: 23759 - DNA, 2166 bp, Zea Mays
actcgtctccctcctcgcttgcgctctgtttcggtgtttcctgtttcggtgtttcctgtctctggtggcgacgactgggcggccgacgctgccaccgccctacgccagtggcggaaatttgatgagttagagcttattactggtctgatactcctatacgatgtcactgaaacttccaattccgcaagggctttccttcttaagaagtgttggatggtttgaggaccggaaggttgattcagcagccaaacagcagttatccccaacgttgaaactccagacagataaggagacgtacagacctggtgattcagtcactgtgactatcgaaatctgtagcccagctagtttgaaggatgatgttgggcaggcagtgtcaggcgaggatgccccctcgctgttgttagatgtgctatcatttgaacttaaagggattgagaagctggatactcaatggttctctgttcctaagcccttaccagggtctaaacaaaggcgaggtgaacatatgtttctggattgttcggcaccatcactggtctctaaagtaataattggtgcagggcgaacaaaaacgtacattgcacgtgtggagctcccaaagactttgccgccatcttataggggcatcagtatccgctatttttattatgttaggaccacattatttggaaggccagttatgttgggtaatggagaccaatataaaggtcttgtgaataatgcaattcatctggaagctagagtcccattgcagatacgtgtttcccagaaaagcagcagcctactaaatgaagaagatgttttagggaatctgcctttttcggtggatcaaccgagcatattttggaagggaaaagatgaagattcagaatggagcaaagcaaatgataatgttgatctagaagaaggatatgatagttctaaagatgaagtttcatctgtttcctcatacaatccttcaaaagcacatcctgaattctccctaaggagctcgttgtcaatgcattctctgtcatcacggctctccacgagtgagctattttacaatcaagtggaacgacctaatttcccatcatacaatccaattcctcgattgtcagtgtcagagatttcagatgatcatgacggaggtttagtggcatctcaaaggaaactaaacattttgctaccagaccatacatcgaatgggcaaagggtttctccagattctgatcactcaaaagatgatgctggactcccccttacgccaaaaaatgttgatccagctggatctgaaggctttacgacaggaagatcttataatataagaattgatgaccaagttttgcttcggttttcaccaaagaattctgactcaacctattactttggtgatatgattggtggagcacttaccttctttcacggaactggaaaacggaggtgcctcgaggtatctatagccctggaaacatctgaaacaattaatcctcgcgcattacatccttcaagaaggggctcaccaacaataaccaagctacacagtgaacatcatgaggttgttgcggatcttcaccagacaagctttctgttttccattcccattgatggccctatgtctttttgtacctcaaaggtcactgtacagtggtctcttcgatttgagttcttcacaactccggaaggaacagacccagctaggtacgagcacccactccttgttgataaaagagagaagggtgaatgggtgctcccggtaactgtttacacacctccattgcgcagacgagctactcatgagaggaatggtagatctgtctcacctggaaatatcttcaactcttgaagtgcactgttgccgaagtatagttactttcagctggaaaggatttacagactattctgactggtacaattgcatcaaaaggattttctcgctgtaaattgttataggatttgcaatgcgatgtctatttttttaatagagaacaaatggagtgaaatacttgacttgcaccaaatggatttattggaccatttgtttcatcgatttgtatcccatgagagatgcatcctggccaaaatttggtgttcagtgcattcattatttagcttatagttgaccttgaccaaagtatgagagcttaccacgacgcaaccatttggttctctcgaatagtacac

SEQ ID NO: 23760 - DNA, 2252 bp, Zea Mays
ctggcactgagaagagaggcggatgctggtggcggctgaggcactcgtctccctcctcgcttgcgctctgtttcggtgtttcctgtttcggtgtttcctgtctctggtggcgacgactgggcggccgacgctgccaccgccctacgccaggtgaccaggtctttcgtattcgggatcttcgccggcgtcgagcacccggccattggcggaaatttgatgagttagagcttattactggtctgatactcctatacgatgtcactgaaacttccaattccgcaagggctttccttcttaagaagtgttggatggtttgaggaccggaaggttgattcagcagccaaacagcagttatccccaacgttgaaactccagacagataaggagacgtacagacctggtgattcagtcactgtgactatcgaaatctgtagcccagctagtttgaaggatgatgttgggcaggcagtgtcaggcgaggatgccccctcgctgttgttagatgtgctatcatttgaacttaaagggattgagaagctggatactcaatggttctctgttcctaagcccttaccagggtctaaacaaaggcgaggtgaacatatgtttctggattgttcggcaccatcactggtctctaaagtaataattggtgcagggcgaacaaaaacgtacattgcacgtgtggagctcccaaagactttgccgccatcttataggggcatcagtatccgctatttttattatgttaggaccacattatttggaaggccagttatgttgggtaatggagaccaatataaaggtcttgtgaataatgcaattcatctggaagctagagtcccattgcagatacgtgtttcccagaaaagcagcagcctactaaatgaagaagggaatctgcctttttcggtggatcaaccgagcatattttggaagggaaaagatgaagattcagaatggagcaaagcaaatgataatgttgatctagaagaaggatatgatagttctaaagatgaagtttcatctgtttcctcatacaatccttcaaaagcacatcctgaattctccctaaggagctcgttgtcaatgcattctctgtcatcacggctctccacgagtgagctattttacaatcaagtggaacgacctaatttcccatcatacaatccaattcctcgattgtcagtgtcagagatttcagatgatcatgacggaggtttagtggcatctcaaaggaaactaaacattttgctaccagaccatacatcgaatgggcaaagggtttctccagattctgatcactcaaaagatgatgctggactcccccttacgccaaaaaatgttgatccagctggatctgaaggctttacgacaggaagatcttataatataagaattgatgaccaagttttgcttcggttttcaccaaagaattctgactcaacctattactttggtgatatgattggtggagcacttaccttctttcacggaactggaaaacggaggtgcctcgaggtatctatagccctggaaacatctgaaacaattaatcctcgcgcattacatccttcaagaaggggctcaccaacaataaccaagctacacagtgaacatcatgaggttgttgcggatcttcaccagacaagctttctgttttccattcccattgatggccctatgtctttttgtacctcaaaggtcactgtacagtggtctcttcgatttgagttcttcacaactccggaaggaacagacccagctaggtacgagcacccactccttgttgataaaagagagaagggtgaatgggtgctcccggtaactgtttacacacctccattgcgcagacgagctactcatgagaggaatggtagatctgtctcacctggaaatatcttcaactcttgaagtgcactgttgccgaagtatagttactttcagctggaaaggatttacagactattctgactggtacaattgcatcaaaaggattttctcgctgtaaattgttataggatttgcaatgcgatgtctatttttttaatagagaacaaatggagtgaaatacttgacttgcaccaaatggatttattggaccatttgtttcatcgatttgtatcccatgagagatgcatcctggccaaaatttggtgttcagtgcattcattatttagcttatagttgaccttgaccaaagtatgagagcttaccacgacgcaaccatttggttctctcgaatagtacac

SEQ ID NO: 23761 - DNA, 2199 bp, Zea Mays
atcttaacaaggtcctcctcaactagagtctctagagatctatatgtcaacaagaagctcaagacatgtaggttcacgagattcattcgatcccaatatcagaactcagcgcagagaaatagcatctcatccaaacagacaccatactagtggcggaaatttgatgagttagagcttattactggtctgatactcctatacgatgtcactgaaacttccaattccgcaagggctttccttcttaagaagtgttggatggtttgaggaccggaaggttgattcagcagccaaacagcagttatccccaacgttgaaactccagacagataaggagacgtacagacctggtgattcagtcactgtgactatcgaaatctgtagcccagctagtttgaaggatgatgttgggcaggcagtgtcaggcgaggatgccccctcgctgttgttagatgtgctatcatttgaacttaaagggattgagaagctggatactcaatggttctctgttcctaagcccttaccagggtctaaacaaaggcgaggtgaacatatgtttctggattgttcggcaccatcactggtctctaaagtaataattggtgcagggcgaacaaaaacgtacattgcacgtgtggagctcccaaagactttgccgccatcttataggggcatcagtatccgctatttttattatgttaggaccacattatttggaaggccagttatgttgggtaatggagaccaatataaaggtcttgtgaataatgcaattcatctggaagctagagtcccattgcagatacgtgtttcccagaaaagcagcagcctactaaatgaagaagggaatctgcctttttcggtggatcaaccgagcatattttggaagggaaaagatgaagattcagaatggagcaaagcaaatgataatgttgatctagaagaaggatatgatagttctaaagatgaagtttcatctgtttcctcatacaatccttcaaaagcacatcctgaattctccctaaggagctcgttgtcaatgcattctctgtcatcacggctctccacgagtgagctattttacaatcaagtggaacgacctaatttcccatcatacaatccaattcctcgattgtcagtgtcagagatttcagatgatcatgacggaggtttagtggcatctcaaaggaaactaaacattttgctaccagaccatacatcgaatgggcaaagggtttctccagattctgatcactcaaaagatgatgctggactcccccttacgccaaaaaatgttgatccagctggatctgaaggctttacgacaggaagatcttataatataagaattgatgaccaagttttgcttcggttttcaccaaagaattctgactcaacctattactttggtgatatgattggtggagcacttaccttctttcacggaactggaaaacggaggtgcctcgaggtatctatagccctggaaacatctgaaacaattaatcctcgcgcattacatccttcaagaaggggctcaccaacaataaccaagctacacagtgaacatcatgaggttgttgcggatcttcaccagacaagctttctgttttccattcccattgatggccctatgtctttttgtacctcaaaggtcactgtacagtggtctcttcgatttgagttcttcacaactccggaaggaacagacccagctaggtacgagcacccactccttgttgataaaagagagaagggtgaatgggtgctcccggtaactgtttacacacctccattgcgcagacgagctactcatgagaggaatggtagatctgtctcacctggaaatatcttcaactcttgaagtgcactgttgccgaagtatagttactttcagctggaaaggatttacagactattctgactggtacaattgcatcaaaaggattttctcgctgtaaattgttataggatttgcaatgcgatgtctatttttttaatagagaacaaatggagtgaaatacttgacttgcaccaaatggatttattggaccatttgtttcatcgatttgtatcccatgagagatgcatcctggccaaaatttggtgttcagtgcattcattatttagcttatagttgaccttgaccaaagtatgagagcttaccacgacgcaaccatttggttctctcgaatagtacac

SEQ ID NO: 23762 - DNA, 2223 bp, Zea Mays
caagggccagaggaaatcttaacaaggtcctcctcaactagagtctctagagatctatatgtcaacaagaagctcaagacatgtaggttcacgagattcattcgatcccaatatcagaactcagcgcagagaaatagcatctcatccaaacagacaccatactagtggcggaaatttgatgagttagagcttattactggtctgatactcctatacgatgtcactgaaacttccaattccgcaagggctttccttcttaagaagtgttggatggtttgaggaccggaaggttgattcagcagccaaacagcagttatccccaacgttgaaactccagacagataaggagacgtacagacctggtgattcagtcactgtgactatcgaaatctgtagcccagctagtttgaaggatgatgttgggcaggcagtgtcaggcgaggatgccccctcgctgttgttagatgtgctatcatttgaacttaaagggattgagaagctggatactcaatggttctctgttcctaagcccttaccagggtctaaacaaaggcgaggtgaacatatgtttctggattgttcggcaccatcactggtctctaaagtaataattggtgcagggcgaacaaaaacgtacattgcacgtgtggagctcccaaagactttgccgccatcttataggggcatcagtatccgctatttttattatgttaggaccacattatttggaaggccagttatgttgggtaatggagaccaatataaaggtcttgtgaataatgcaattcatctggaagctagagtcccattgcagatacgtgtttcccagaaaagcagcagcctactaaatgaagaagatgttttagggaatctgcctttttcggtggatcaaccgagcatattttggaagggaaaagatgaagattcagaatggagcaaagcaaatgataatgttgatctagaagaaggatatgatagttctaaagatgaagtttcatctgtttcctcatacaatccttcaaaagcacatcctgaattctccctaaggagctcgttgtcaatgcattctctgtcatcacggctctccacgagtgagctattttacaatcaagtggaacgacctaatttcccatcatacaatccaattcctcgattgtcagtgtcagagatttcagatgatcatgacggaggtttagtggcatctcaaaggaaactaaacattttgctaccagaccatacatcgaatgggcaaagggtttctccagattctgatcactcaaaagatgatgctggactcccccttacgccaaaaaatgttgatccagctggatctgaaggctttacgacaggaagatcttataatataagaattgatgaccaagttttgcttcggttttcaccaaagaattctgactcaacctattactttggtgatatgattggtggagcacttaccttctttcacggaactggaaaacggaggtgcctcgaggtatctatagccctggaaacatctgaaacaattaatcctcgcgcattacatccttcaagaaggggctcaccaacaataaccaagctacacagtgaacatcatgaggttgttgcggatcttcaccagacaagctttctgttttccattcccattgatggccctatgtctttttgtacctcaaaggtcactgtacagtggtctcttcgatttgagttcttcacaactccggaaggaacagacccagctaggtacgagcacccactccttgttgataaaagagagaagggtgaatgggtgctcccggtaactgtttacacacctccattgcgcagacgagctactcatgagaggaatggtagatctgtctcacctggaaatatcttcaactcttgaagtgcactgttgccgaagtatagttactttcagctggaaaggatttacagactattctgactggtacaattgcatcaaaaggattttctcgctgtaaattgttataggatttgcaatgcgatgtctatttttttaatagagaacaaatggagtgaaatacttgacttgcaccaaatggatttattggaccatttgtttcatcgatttgtatcccatgagagatgcatcctggccaaaatttggtgttcagtgcattcattatttagcttatagttgaccttgaccaaagtatgagagcttaccacgacgcaaccatttggttctctcgaatagtacac

SEQ ID NO: 23763 - DNA, 1059 bp, Zea Mays
cacaggcacagatctcatctggtgtgtagtagactcgtcgtctcagctcgcgcgtgctcaccactgacctaccccgcttcaaaacagccaaactggaaaaaaagattctccgtccacgcctcgtcccaaccctagccccgtcgatctcgcatggccaccggcccgcgatctctccacgccctcctcggcggcggcgcaggcctcttccacctcttcctaaccttgaggtttcagatgcagttgttgaaaaggctgcagattatgctcttgtatggatcaataggctgctggctgtcggtcatgacatcgccatcaagagaaataggaaagtttttataaaggtgatattgattttgtggctggtttcatttgttggaatgctcttcaactttcttacactcatttacattggtgtaatgctttctctgttggttccaccactctatgagaagtatcaggatcaggttgatgaaaaggttggcgtagcgcacagtataatatcgaggcacataaataccattgttatcagggctgggcaatcagccaaggagaagaagactgaataaaagaattgttttgatgtattgtggaacatctctggttgtcaagtggagttatgatagtgggcttttcatctttggactctccatatggccctccacttacattagttctcgatatgctgatctgaggttttgatgtgcgctgttgatttcaggaaatgagacggcttgtgtatttttttctttttgaacatgaggtttactatgggcgcatatcttactcgaaatgatattttgagaaattgcaactcgtgcatacaagtgtgtgggctgcttgcgctgttagccatatgatctctctgtcactgattttaattttaggctgctctgacgaactctgtggagctcattcgatgcccatctgctggtagctcgttttctgaaatactaataagatgtattttgcaaagacagctgtaccgtgtgaatgaatgggttattttgtcgacgattctgtaaggtgtagagaagtctttatcagtggacttttaccgtc

SEQ ID NO: 23764 - DNA, 1123 bp, Zea Mays
cacaggcacagatctcatctggtgtgtagtagactcgtcgtctcagctcgcgcgtgctcaccactgacctaccccgcttcaaaacagccaaactggaaaaaaagattctccgtccacgcctcgtcccaaccctagccccgtcgatctcgcatggccaccggcccgcgatctctccacgccctcctcggcggcggcgcagtcgccgacttgctgctgtgtaggcggaggaacgcctcggcggcggccgtggtgggcgccaccgcggtctggttcgtcttcgagcgcgcgggctacagcttcccttccgtcctgtccaacgccctgctcctcctcgtcgccatcctcttcttctgggccaagtccgctttgctgcttaacaggcctcttccacctcttcctaaccttgaggtttcagatgcagttgttgaaaaggctgcagattatgctcttgtatggatcaataggctgctggctgtcggtcatgacatcgccatcaagagaaataggaaagtttttataaaggatcaggttgatgaaaaggttggcgtagcgcacagtataatatcgaggcacataaataccattgttatcagggctgggcaatcagccaaggagaagaagactgaataaaagaattgttttgatgtattgtggaacatctctggttgtcaagtggagttatgatagtgggcttttcatctttggactctccatatggccctccacttacattagttctcgatatgctgatctgaggttttgatgtgcgctgttgatttcaggaaatgagacggcttgtgtatttttttctttttgaacatgaggtttactatgggcgcatatcttactcgaaatgatattttgagaaattgcaactcgtgcatacaagtgtgtgggctgcttgcgctgttagccatatgatctctctgtcactgattttaattttaggctgctctgacgaactctgtggagctcattcgatgcccatctgctggtagctcgttttctgaaatactaataagatgtattttgcaaagacagctgtaccgtgtgaatgaatgggttattttgtcgacgattctgtaaggtgtagagaagtctttatcagtggacttttaccgtc

SEQ ID NO: 23765 - DNA, 752 bp, Zea Mays
cgcgaaaggaagcgccgcgccggagcttccctctcgcgcttgcccatgggccattgcccttcgctactcctgttgggagcagagcaaaggcgagagaaaagaaaaggaggagctcgcgctaccatgcctgcaaagccaaagcgtgtagtgcttggcttggctttcagtctccagtgtacactcgcttgccgtttccgacgcccaaggacgtgtactccacgaagttgcttcctttccgcggatagccaaaacacattgcaaagctggtcactcacttcactgcggtcgcttggacagtgggcactggcgctggcgtcgcagcaggtcgaggtgcagggcaggagcagcacggaattgatgggcacacatccaatgctcggtacgaccacgccacggctgctgccccccccctcctgctcgtgagtaccaaggcaatagaaggcgacgcacgaacaggagggattggctgccttctgcggctctgcagcctgcgggagggagtgggggtggaatagatcagagcaacgcgcacgtcgctctcgctgcggcatggcatggcatgggcgtcaagcacctcaacaccccggttcatgtcctgcgctgcgctctatgccatgcacagtctgcatcgacagcgacaatacggacggacgtagaagtggtcgcatacatgcggctgcgcgagacagagacagcgaaaagtaagactcgtgagtggtaaaaaaataaaaggaactataactgtagacgtg

SEQ ID NO: 23766 - DNA, 4122 bp, Zea Mays
cggtggtggcattcctcgaggcccgagttggccagctctccccgtcgtcgtccgtccctctcctcgtctccgcctccccggactccggcagggagggaggtgaacgggccggggagagagatggggccggactcgtcgcccaagaagttgagcctcaaggagcagcgcgctgcctacctccagtggttcgccctcgccgacgaagacggagatggccgtctgacggggaacgatgcgctcaggttcttcgccatgtccaacctctccaagcccgagctgaagcaggtttgggcgatcgctgattccaaacgccaaggatatcttggattctacgagttcatgactgccatgcagctggtttctctcgcacaagcagggaacgaaatcaatcaagacacccttccaaatgcagatctcgagaagttgcagctccccacaatggatggtctggctaaaaaactaaactctgggagcaaggtcgagtctgctattgttgcatgtcatccatcagaagcacctactatgactgccagctggtttaactccaagtcaggaaagaagattcctttgaaatcagtcacttcaatcgtcgatgggctaaagaaatcgtacattgagaagttgaggcccttggaaaaaacctatcagttccatgacttcgtgtctcccttgctgactagcagcgatttcgatgcgaagccaatggtcatgctgttgggtcaatactccacggggaaaacaacattcataaagcatttactaaaaacaagttatccaggcgctcatattgggccagagcctacaacggacaggtttgttgtcatcacttctggaccagacgaaagatgcattcctggaaacaccatcgccgtccaagctgacatgccatacagtggcctgtcatcgttcggaacagcatttttgtccaagttcgaatgttctcagatgccacatccactgttagagcacgtgaccttcgtggacactccaggagttttatcaggggagaagcagcggacgcagcgcagctacgatttcaccggagtcacgtcgtggtttgcggccaagtgcgacctcatccttctcctgtttgatccgcataagcttgacatcagcgatgagttcaagcgtgtgatcgggtctctccgcgggcatgatgacaagatacgcatagttctcaacaaggccgaccaagttgatgcacagcagctgatgagagtgtacggagcactgctgtggtcgctcgggaaagtcctgaacacaccagaagtcatgcgtgtctacataggttcattcaacgacaagccgatcagggagacagcggctgggccgctgggcatggagctgttccagaaggaacaagatgacttgctctcggacctgaacgacatccccaagaaggcctgcgaccgtcggatcaacgagttcgtgaagcgggcaagggcggctaaagtccacgcgcacataatcagccatctgaagaaagagatgcctgcactgatgggcaaggccaaggctcagcagaagctgctcgacgggctggatcaacagttcgccaaggtccagaaggagctgcacctgccgccaggggacttcccgagcgtggaggagtacagggagctcctgagcgcctacaacttcgacaggttcgagaagctgaggcccaagatggtccagggcgtggacgacatgctggcctacgacatcccggacctcctgaagaagttcaggaacccctacgactgaagccggaaacccactctcttgcctcctcggggaggggtggcagagcttcagcgacggacgaggaggacgtgccggtgcagcagcggttcatctggtcagggaagagaaagatgcggcgccttttcacgactccatctctcttctggattactcagtgctgcagcgtaaactcgcgcgcagttccctgtaaaagctggagcttttctgagcgtgtaggtgcgttggtggaacttgggcccccacccaagatctcacctatctgcactgggctggccggctgtgcccgtcgccaaccaccgtgcttccgccattgcgtcgccgcataaccttggccaagcgtgaacttcatataataccaacttcatataatccgccattactggcaaggcgcatgtcccatgtcgtccgtagaactcgggctgatgacgggtgccactcaacagtcaacacacgggctagggctaattgtatatagaatttcatatactgccagcttcagctttcacagcaaacggaggttttattataaaaaaaaacatcgtgttccaaaccgccggtggtcttccttcctattcaacggctaaaaagtctattggtgtactttgaaaagctgcaggaggaggagagtaaaaaaaaaaaaaaggtggtgcggtgaccgtaggtctggacatgcgtagcgtagccaccggtgccgtgcacgcggtacagcagcagcagcacggacgtgcaccgctgtgtgtcgcttccggacccgtctacgttttacgtggtcataccaaagactccagtcgccaccacagaaatccaaggcgccagccagcacaaggccaaaggccaaaaccaagccggcgggcccgctttccgtcccgtcagattccctcccccgtccgtccgtccgtctctgccccatccctcacccctcctccctactccctaggcagcaaagcagcgagaaagcagctcgcagttcccacccaccaaaccaaactctcctccacaacctcccccgccgcccctcctcttctcggcttctcccctgccttgttcggccccaaaacggcaagagccgacgccagcaaaccctcgggttcgggagggaaggaaggaaggcacgagcagcgcgcctgcctacccgcagctaaccccaaacagcaacgtcgtagccgacgagagcctccgccacctacccaccaactcccgcccgtcgcctccgcttgggttctcgtcgagcagttggtgggcacctaccgcatccagagagagagtgagccactgagccagggcggcaagggggagatgaagaagctgtaccagggcggcaaggggcggcgggtgcacccggcgccggctgacgcatcggcagccgtggcgctgccggccgccgtgctggccctggcgtccgcgctgacggccgaggagcaggaggtgctggcctacctcctgtcctgcggcggcggcggcggccggcaccaccacggccgccgccgcggggcccacccgccggagatgggctgcgcctgcttcggctgctacaagagcttctgggcgcgctgggacgcgtcgcccaaccgccacctcatccaccgcatcatcgacgccgtcgaggaggagggcggggcggggggcccgcgccgccctccccggcgccggcgccgcggtggtggcggtggtggtggccgccgcggcggcggcgacgctgccgacgaggacgccgcggagacgggccccggcgtggaccacgacaacctcccggcgtgcgacggcggctccgggatggacatggaccaccgctgccacggagagtacgacggcgacggcgacggcgacgaggaggaggaggagaccagcagcgtggacggcgacgacgcgtcggtggacagcgagggcggtggcagcgccgagaagagcacggtggggaggctggtgcgcttcatcggggagaaggtttggggcgcctggaactgatcgggctgtggcccaccgccgccgctcgccggttcttgtagattaggggaaggggaccaccagcaaggactgcgtggtctcgtcaaggtcagtactcatcagtgccagtagtggctgttttgatcagggagcgcctcctgctccacgccctttttcctcttattgcttttgtttaatcatggcggatttgttgcactctgatgatgagtgatgacgagcatgccaggattggaggagggtggattatcccatccaatttctcacctctcttctccccctcccctcagcccccctgtaccatatttttgctcctttcgttcggtagtccagttcaacaatgaacttgcaagagaactctcgtcaacattcaatgtgccctgattcatatgcgttgaatgtcgtcagcatttg

SEQ ID NO: 23767 - DNA, 4128 bp, Zea Mays
cggtggtggcattcctcgaggcccgagttggccagctctccccgtcgtcgtccgtccctctcctcgtctccgcctccccggactccggcagggagggaggtgaacgggccggggagagagatggggccggactcgtcgcccaagaagttgagcctcaaggagcagcgcgctgcctacctccagtggttcgccctcgccgacgaagacggagatggccgtctgacggggaacgatgcgctcaggttcttcgccatgtccaacctctccaagcccgagctgaagcaggtttgggcgatcgctgattccaaacgccaaggatatcttggattctacgagttcatgactgccatgcagctggtttctctcgcacaagcagggaacgaaatcaatcaagacacccttccaaatgcagatctcgagaagttgcagctccccacaatggatggtctggctaaaaaactaaaaaagaactctgggagcaaggtcgagtctgctattgttgcatgtcatccatcagaagcacctactatgactgccagctggtttaactccaagtcaggaaagaagattcctttgaaatcagtcacttcaatcgtcgatgggctaaagaaatcgtacattgagaagttgaggcccttggaaaaaacctatcagttccatgacttcgtgtctcccttgctgactagcagcgatttcgatgcgaagccaatggtcatgctgttgggtcaatactccacggggaaaacaacattcataaagcatttactaaaaacaagttatccaggcgctcatattgggccagagcctacaacggacaggtttgttgtcatcacttctggaccagacgaaagatgcattcctggaaacaccatcgccgtccaagctgacatgccatacagtggcctgtcatcgttcggaacagcatttttgtccaagttcgaatgttctcagatgccacatccactgttagagcacgtgaccttcgtggacactccaggagttttatcaggggagaagcagcggacgcagcgcagctacgatttcaccggagtcacgtcgtggtttgcggccaagtgcgacctcatccttctcctgtttgatccgcataagcttgacatcagcgatgagttcaagcgtgtgatcgggtctctccgcgggcatgatgacaagatacgcatagttctcaacaaggccgaccaagttgatgcacagcagctgatgagagtgtacggagcactgctgtggtcgctcgggaaagtcctgaacacaccagaagtcatgcgtgtctacataggttcattcaacgacaagccgatcagggagacagcggctgggccgctgggcatggagctgttccagaaggaacaagatgacttgctctcggacctgaacgacatccccaagaaggcctgcgaccgtcggatcaacgagttcgtgaagcgggcaagggcggctaaagtccacgcgcacataatcagccatctgaagaaagagatgcctgcactgatgggcaaggccaaggctcagcagaagctgctcgacgggctggatcaacagttcgccaaggtccagaaggagctgcacctgccgccaggggacttcccgagcgtggaggagtacagggagctcctgagcgcctacaacttcgacaggttcgagaagctgaggcccaagatggtccagggcgtggacgacatgctggcctacgacatcccggacctcctgaagaagttcaggaacccctacgactgaagccggaaacccactctcttgcctcctcggggaggggtggcagagcttcagcgacggacgaggaggacgtgccggtgcagcagcggttcatctggtcagggaagagaaagatgcggcgccttttcacgactccatctctcttctggattactcagtgctgcagcgtaaactcgcgcgcagttccctgtaaaagctggagcttttctgagcgtgtaggtgcgttggtggaacttgggcccccacccaagatctcacctatctgcactgggctggccggctgtgcccgtcgccaaccaccgtgcttccgccattgcgtcgccgcataaccttggccaagcgtgaacttcatataataccaacttcatataatccgccattactggcaaggcgcatgtcccatgtcgtccgtagaactcgggctgatgacgggtgccactcaacagtcaacacacgggctagggctaattgtatatagaatttcatatactgccagcttcagctttcacagcaaacggaggttttattataaaaaaaaacatcgtgttccaaaccgccggtggtcttccttcctattcaacggctaaaaagtctattggtgtactttgaaaagctgcaggaggaggagagtaaaaaaaaaaaaaaggtggtgcggtgaccgtaggtctggacatgcgtagcgtagccaccggtgccgtgcacgcggtacagcagcagcagcacggacgtgcaccgctgtgtgtcgcttccggacccgtctacgttttacgtggtcataccaaagactccagtcgccaccacagaaatccaaggcgccagccagcacaaggccaaaggccaaaaccaagccggcgggcccgctttccgtcccgtcagattccctcccccgtccgtccgtccgtctctgccccatccctcacccctcctccctactccctaggcagcaaagcagcgagaaagcagctcgcagttcccacccaccaaaccaaactctcctccacaacctcccccgccgcccctcctcttctcggcttctcccctgccttgttcggccccaaaacggcaagagccgacgccagcaaaccctcgggttcgggagggaaggaaggaaggcacgagcagcgcgcctgcctacccgcagctaaccccaaacagcaacgtcgtagccgacgagagcctccgccacctacccaccaactcccgcccgtcgcctccgcttgggttctcgtcgagcagttggtgggcacctaccgcatccagagagagagtgagccactgagccagggcggcaagggggagatgaagaagctgtaccagggcggcaaggggcggcgggtgcacccggcgccggctgacgcatcggcagccgtggcgctgccggccgccgtgctggccctggcgtccgcgctgacggccgaggagcaggaggtgctggcctacctcctgtcctgcggcggcggcggcggccggcaccaccacggccgccgccgcggggcccacccgccggagatgggctgcgcctgcttcggctgctacaagagcttctgggcgcgctgggacgcgtcgcccaaccgccacctcatccaccgcatcatcgacgccgtcgaggaggagggcggggcggggggcccgcgccgccctccccggcgccggcgccgcggtggtggcggtggtggtggccgccgcggcggcggcgacgctgccgacgaggacgccgcggagacgggccccggcgtggaccacgacaacctcccggcgtgcgacggcggctccgggatggacatggaccaccgctgccacggagagtacgacggcgacggcgacggcgacgaggaggaggaggagaccagcagcgtggacggcgacgacgcgtcggtggacagcgagggcggtggcagcgccgagaagagcacggtggggaggctggtgcgcttcatcggggagaaggtttggggcgcctggaactgatcgggctgtggcccaccgccgccgctcgccggttcttgtagattaggggaaggggaccaccagcaaggactgcgtggtctcgtcaaggtcagtactcatcagtgccagtagtggctgttttgatcagggagcgcctcctgctccacgccctttttcctcttattgcttttgtttaatcatggcggatttgttgcactctgatgatgagtgatgacgagcatgccaggattggaggagggtggattatcccatccaatttctcacctctcttctccccctcccctcagcccccctgtaccatatttttgctcctttcgttcggtagtccagttcaacaatgaacttgcaagagaactctcgtcaacattcaatgtgccctgattcatatgcgttgaatgtcgtcagcatttg

SEQ ID NO: 23768 - DNA, 901 bp, Zea Mays
atggcgagctcgctggcccgcctgggagcggcgctgccacgcgccgcggcccgcgccctgccaccggggcggtgggccgccgcggtgctcggcatcggcgcctcccgccgcgccgaacggtgccaagttcattccgacattaaagtagcccctacatcagacgtgaaggacgatagcaaatctgaaactaggaggatcaagatgctctatgacggtgattgccctctctgtatgcgtgaggtaaacatgctgagggaaagaaacaaatcatatggggcaataaagtttgttgacataagctctaaagattactctccagatgacaatcaaggccttgattatgaaactgtcatggggaagatacatgccattctttcagatggaactgttatcacagatgttgagagtatgagtgtgatgccaaggcaaataaaagaccaagtcagaattttgattctttttagtctaagcatcaggcatttagaaaattgtagctacgatggcaaatgcaatatatggcgtgtgggcgaaataccgaatgcaaattacagggcgaatgtaaagatgacaaagtatgcaagatgtgagcataaaaaatgttctactgtgctacatacctcactcacctatattcatgcttagtgcttagataggctcatatacatagttttaacacaaaaaataatcacaatggtattgaaaagggcgaatagcttatgtaatggtttgtcgaagtaaatatatacattttctgaaaaaatgtaaatatatacatttgtatgtacactgtgctggtttgacggcaagatattttacggtgaaaacttccacggaatgtgctgttgtgactggtgggattgcacggtgcctcaagtcctgatcatgggatttgtctatactg

SEQ ID NO: 23769 - DNA, 1466 bp, Zea Mays
atggcgagctcgctggcccgcctgggagcggcgctgccacgcgccgcggcccgcgccctgccaccggggcggtgggccgccgcggtgctcggcatcggcgcctcccgccgcgccgaacggtgccaagttcattccgacattaaagtagcccctacatcagacgtgaaggacgatagcaaatctgaaactaggaggatcaagatgctctatgacggtgattgccctctctgtatgcgtgaggtaaacatgctgagggaaagaaacaaatcatatggggcaataaagtttgttgacataagctctaaagattactctccagatgacaatcaaggccttgattatgaaactgtcatggggaagatacatgccattctttcagatggaactgttatcacagatgttgaggcatttagaaaattgtacgaggaagtaggactcgactgggtttatgctgttagactgtctccagcaacgtcctctatatacatcctctatatccgtcctttacagtcttctttaaaagattccatctcctatatctactttctcttcaacaacgtcctttaaatcacgtcctctatatgtaaatacctatattaaaaacatttttaattttttaatttttgtacgtacgtatttgtcatactttcaaatgtattgtacatattttagttttattaaaccggttgtttaaagtattcaaatagatagagaaccgtttagagaaactctacatatagaggatccagcggcgttctctaaatttagaggaccgtttagaggacgttgctggagtgagtagaggatgtcatcgtcctctaaatttagggtacaggaccttttagagggtcttgttggagccagccttactaggttcaacctgtaagtcactacttacagagagaacatatgatcgtcttgttccattcacttcatgctttttatataagcagaacattttccaaatgagataagttttaccttcttgctgacacctgtacttctttgttcatcttctaattctatgcaggtagctacgatggcaaatgcaatatatggcgtgtgggcgaaataccgaatgcaaattacaggtcgacctccgctagaaaagctgcaggcgaatgtaaagatgacaaagtatgcaagatgtgagcataaaaaatgttctactgtgctacatacctcactcacctatattcatgcttagtgcttagataggctcatatacatagttttaacacaaaaaataatcacaatggtattgaaaagggcgaatagcttatgtaatggtttgtcgaagtaaatatatacattttctgaaaaaatgtaaatatatacatttgtatgtacactgtgctggtttgacggcaagatattttacggtgaaaacttccacggaatgtgctgttgtgactggtgggattgcacggtgcctcaagtcctgatcatgggatttgtctatactg

SEQ ID NO: 23770 - DNA, 2074 bp, Zea Mays
gcagaggccagtgccactgctggcaggcgctgaggcgcccgagggccctcaagtggcgcgcgagccgcacgccaacgcccgcgacgcgacgaattatctttatcccctttccctctgccgtcctcgttcccggccgtccgtgccgaaggaagtatctgctgagtgctgacccagcccatgcccatccacctcgctccctcgaccgacccacccagcccagcgcgcgctcgcatggcgatgctgctccgcaaggtgtggggctccgtgctggcgcgcgccgcagcgccgggggccgacccgcgagcccgccgcgcgcaggcgcatcgcgcggagcagtaccagtaccacggctcgctatcgctgggcgcgctcgacgccgtccccaccgacgtgctcgcccagatcctgcgcctgctgggcccgctcgacgccgcgcgctccagcgccgtctgccgcgcctggcgcgtcctcgcctccgacaacggcctctgggctttcttcctccgcctcggccccgagccctaggacctcgtcgtcttcgccgagacgcacctcgccgccggccccgcctcgcacccgtggctgtactacgatagctcgccgcagctctcgttcaaacagatttacggcctccgagcgctggtcccgggtactctcatcgtggatggtggatctggttattgcaagtatggctggagcaagtatgctgctccttccgggcgttgtgctacattcttggaattcggtaacattgaagcacctatgtatgcaaggcttcgtcacttcttctctacaatatatacgaggatgcaaataaagccttcgactcagccagttattgttgtccttccactgtgtcactctgatgataccgagtctgctagggcctcaagaaaacaatacaaggagacgctgtactctgtcttgtttgacatgaatgttcctgctgtttgtgctgtcgatcaggcagttctatctttgtatgcttctaaacggacctctggtattgttgtgcacattggattcaatacgacttctgttgttcccatctttcaaggtagggtaatgtatgagataggtgttgaaactgtggggcaaggtgcccttaaactcactggatttctcaaggagttgatgcagcggagaaatatatcctaaactttgctacgtagctgctgattatgaagctgaattgcgtaaagatacacaagcgtcctgcgagatcgatggtgaagggtgtttcactctgtcggaagagagattcaagactccagaaatcctatttcagccccatatgggaggaatgcgtgctatgggcttgcataaagcagtatctctatgtatggatcactgctatgtttcaggaacggttggtgatgacagctggtacaagacggtcattttagctggtggttcgtcgtgcttgcctggtttaccagagaggctggagaaagagcttcaccaacttcttccaccttatatgtcagaaggaataagagtactccccccttcatttggcactgattctgcctggtttggtgcaaagatgatcagcaacgtgagtactttcactgaggcatggtgtgcaaagaagaaacaattccgtcagaagacaggccggagtggtacattgtttgccaattcctggtaatgaaaatctcagacacaagtcacgagcaagaaacttaaagagttccccgcatcaaaaatacggacataacatccggtccatgctccactgagcctccaccagtatatagaagcatgagcattcatgcccagtatatattcacgtccatatcatgcatatatggattatgagccagtgcatcatttggtggtgttgttataggatgttttggtaagttcgttgtggttataggttgttggcaaaagcgcagttgtctcgttttaattttaagtggaacgattaattagttattgagcatgagtctttgtttatagctatatatgtctcatgaaatttggtacagttctaaatgttgtaaaacgcaataaatcattttataaatgagatatgtctttattgctgttgttcttggattggtaatgg

SEQ ID NO: 23771 - DNA, 2093 bp, Zea Mays
gcagaggccagtgccactgctggcaggcgctgaggcgcccgagggccctcaagtggcgcgcgagccgcacgccaacgcccgcgacgcgacgaattatctttatcccctttccctctgccgtcctcgttcccggccgtccgtgccgaaggaagtatctgctgagtgctgacccagcccatgcccatccacctcgctccctcgaccgacccacccagcccagcgcgcgctcgcatggcgatgctgctccgcaaggtgtggggctccgtgctggcgcgcgccgcagcgccgggggccgacccgcgagcccgccgcgcgcaggcgcatcgcgcggagcagtaccagtaccacggctcgctatcgctgggcgcgctcgacgccgtccccaccgacgtgctcgcccagatcctgcgcctgctgggcccgctcgacgccgcgcgctccagcgccgtctgccgcgcctggcgcgtcctcgcctccgacaacggcctctgggctttcttcctccgcctcggccccgagccctaggacctcgtcgtcttcgccgagacgcacctcgccgccggccccgcctcgcacccgtggctgtactacgatagctcgccgcagctctcgttcaaacagatttacggcctccgagcgctggtcccgggtactctcatcgtggatggtggatctggttattgcaagtatggctggagcaagtatgctgctccttccgggcgttgtgctacattcttggaattcggtaacattgaagcacctatgtatgcaaggcttcgtcacttcttctctacaatatatacgaggatgcaaataaagccttcgactcagccagttattgttgtccttccactgtgtcactctgatgataccgagtctgctagggcctcaagaaaacaatacaaggagacgctgtactctgtcttgtttgacatgaatgttcctgctgtttgtgctgtcgatcaggcagttctatctttgtatgcttctaaacggacctctggtattgttgtgcacattggattcaatacgacttctgttgttcccatctttcaaggtagggtaatgtatgagataggtgttgaaactgtggggcaaggtgcccttaaactcactggatttctcaaggagttgatgcagcggagaaatatatcctgtgagtcactgtacactgttcgaaccatcaaggagctgctgattatgaagctgaattgcgtaaagatacacaagcgtcctgcgagatcgatggtgaagggtgtttcactctgtcggaagagagattcaagactccagaaatcctatttcagccccatatgggaggaatgcgtgctatgggcttgcataaagcagtatctctatgtatggatcactgctatgtttcaggaacggttggtgatgacagctggtacaagacggtcattttagctggtggttcgtcgtgcttgcctggtttaccagagaggctggagaaagagcttcaccaacttcttccaccttatatgtcagaaggaataagagtactccccccttcatttggcactgattctgcctggtttggtgcaaagatgatcagcaacgtgagtactttcactgaggcatggtgtgcaaagaagaaacaattccgtcagaagacaggccggagtggtacattgtttgccaattcctggtaatgaaaatctcagacacaagtcacgagcaagaaacttaaagagttccccgcatcaaaaatacggacataacatccggtccatgctccactgagcctccaccagtatatagaagcatgagcattcatgcccagtatatattcacgtccatatcatgcatatatggattatgagccagtgcatcatttggtggtgttgttataggatgttttggtaagttcgttgtggttataggttgttggcaaaagcgcagttgtctcgttttaattttaagtggaacgattaattagttattgagcatgagtctttgtttatagctatatatgtctcatgaaatttggtacagttctaaatgttgtaaaacgcaataaatcattttataaatgagatatgtctttattgctgttgttcttggattggtaatgg

SEQ ID NO: 23772 - DNA, 2130 bp, Zea Mays
gcagaggccagtgccactgctggcaggcgctgaggcgcccgagggccctcaagtggcgcgcgagccgcacgccaacgcccgcgacgcgacgaattatctttatcccctttccctctgccgtcctcgttcccggccgtccgtgccgaaggaagtatctgctgagtgctgacccagcccatgcccatccacctcgctccctcgaccgacccacccagcccagcgcgcgctcgcatggcgatgctgctccgcaaggtgtggggctccgtgctggcgcgcgccgcagcgccgggggccgacccgcgagcccgccgcgcgcaggcgcatcgcgcggagcagtaccagtaccacggctcgctatcgctgggcgcgctcgacgccgtccccaccgacgtgctcgcccagatcctgcgcctgctgggcccgctcgacgccgcgcgctccagcgccgtctgccgcgcctggcgcgtcctcgcctccgacaacggcctctgggctttcttcctccgcctcggccccgagccctaggacctcgtcgtcttcgccgagacgcacctcgccgccggccccgcctcgcacccgtggctgtactacgatagctcgccgcagctctcgttcaaacagatttacggcctccgagcgctggtcccgggtactctcatcgtggatggtggatctggttattgcaagtatggctggagcaagtatgctgctccttccgggcgttgtgctacattcttggaattcggtaacattgaagcacctatgtatgcaaggcttcgtcacttcttctctacaatatatacgagataccgagtctgctagggcctcaagaaaacaatacaaggagacgctgtactctgtcttgtttgacatgaatgttcctgctgtttgtgctgtcgatcaggcagttctatctttgtatgcttctaaacggacctctggtattgttgtgcacattggattcaatacgacttctgttgttcccatctttcaaggtagggtaatgtatgagataggtgttgaaactgtggggcaaggtgcccttaaactcactggatttctcaaggagttgatgcagcggagaaatatatcctgtgagtcactgtacactgttcgaaccatcaaggagaaactttgctacgtagctgctgattatgaagctgaattgcgtaaagatacacaagcgtcctgcgagatcgatggtgaagggtgtttcactctgtcggaagagagattcaagactccagaaatcctatttcagccccatatgggaggaatgtgcgaaatattcagatattgtttgatttgtgcatcgattacagtttagttatggttggtcaatgttgatcttgcccttgcaggcgtgctatgggcttgcataaagcagtatctctatgtatggatcactgctatgtttcaggaacggttggtgatgacagctggtacaagacggtcattttagctggtggttcgtcgtgcttgcctggtttaccagagaggctggagaaagagcttcaccaacttcttccaccttatatgtcagaaggaataagagtactccccccttcatttggcactgattctgcctggtttggtgcaaagatgatcagcaacgtgagtactttcactgaggcatggtgtgcaaagaagaaacaattccgtcagaagacaggccggagtggtacattgtttgccaattcctggtaatgaaaatctcagacacaagtcacgagcaagaaacttaaagagttccccgcatcaaaaatacggacataacatccggtccatgctccactgagcctccaccagtatatagaagcatgagcattcatgcccagtatatattcacgtccatatcatgcatatatggattatgagccagtgcatcatttggtggtgttgttataggatgttttggtaagttcgttgtggttataggttgttggcaaaagcgcagttgtctcgttttaattttaagtggaacgattaattagttattgagcatgagtctttgtttatagctatatatgtctcatgaaatttggtacagttctaaatgttgtaaaacgcaataaatcattttataaatgagatatgtctttattgctgttgttcttggattggtaatgg

SEQ ID NO: 23773 - DNA, 2110 bp, Zea Mays
gcagaggccagtgccactgctggcaggcgctgaggcgcccgagggccctcaagtggcgcgcgagccgcacgccaacgcccgcgacgcgacgaattatctttatcccctttccctctgccgtcctcgttcccggccgtccgtgccgaaggaagtatctgctgagtgctgacccagcccatgcccatccacctcgctccctcgaccgacccacccagcccagcgcgcgctcgcatggcgatgctgctccgcaaggtgtggggctccgtgctggcgcgcgccgcagcgccgggggccgacccgcgagcccgccgcgcgcaggcgcatcgcgcggagcagtaccagtaccacggctcgctatcgctgggcgcgctcgacgccgtccccaccgacgtgctcgcccagatcctgcgcctgctgggcccgctcgacgccgcgcgctccagcgccgtctgccgcgcctggcgcgtcctcgcctccgacaacggcctctgggctttcttcctccgcctcggccccgagccctaggacctcgtcgtcttcgccgagacgcacctcgccgccggccccgcctcgcacccgtggctgtactacgatagctcgccgcagctctcgttcaaacagatttacggcctccgagcgctggtcccgggtactctcatcgtggatggtggatctggttattgcaagtatggctggagcaagtatgctgctccttccgggcgttgtgctacattcttggaattcggtaacattgaagcacctatgtatgcaaggcttcgtcacttcttctctacaatatatacgaggatgcaaataaagccttcgactcagccagttattgttgtccttccactgtgtcactctgatgataccgagtctgctagggcctcaagaaaacaatacaaggagacgctgtactctgtcttgtttgacatgaatgttcctgctgtttgtgctgtcgatcagtctttcaaggtagggtaatgtatgagataggtgttgaaactgtggggcaaggtgcccttaaactcactggatttctcaaggagttgatgcagcggagaaatatatcctgtgagtcactgtacactgttcgaaccatcaaggagaaactttgctacgtagctgctgattatgaagctgaattgcgtaaagatacacaagcgtcctgcgagatcgatggtgaagggtgtttcactctgtcggaagagagattcaagactccagaaatcctatttcagccccatatgggaggaatgtgcgaaatattcagatattgtttgatttgtgcatcgattacagtttagttatggttggtcaatgttgatcttgcccttgcaggcgtgctatgggcttgcataaagcagtatctctatgtatggatcactgctatgtttcaggaacggttggtgatgacagctggtacaagacggtcattttagctggtggttcgtcgtgcttgcctggtttaccagagaggctggagaaagagcttcaccaacttcttccaccttatatgtcagaaggaataagagtactccccccttcatttggcactgattctgcctggtttggtgcaaagatgatcagcaacgtgagtactttcactgaggcatggtgtgcaaagaagaaacaattccgtcagaagacaggccggagtggtacattgtttgccaattcctggtaatgaaaatctcagacacaagtcacgagcaagaaacttaaagagttccccgcatcaaaaatacggacataacatccggtccatgctccactgagcctccaccagtatatagaagcatgagcattcatgcccagtatatattcacgtccatatcatgcatatatggattatgagccagtgcatcatttggtggtgttgttataggatgttttggtaagttcgttgtggttataggttgttggcaaaagcgcagttgtctcgttttaattttaagtggaacgattaattagttattgagcatgagtctttgtttatagctatatatgtctcatgaaatttggtacagttctaaatgttgtaaaacgcaataaatcattttataaatgagatatgtctttattgctgttgttcttggattggtaatgg

SEQ ID NO: 23774 - DNA, 2065 bp, Zea Mays
tgcgtcgctgctgcagctcacctgccaggccgcagaggccagtgccactgctggcaggcgctgaggcgcccgagggccctcaagtggcgcgcgagccgcacgccaacgcccgcgacgcgacgaattatctttatcccctttccctctgccgtcctcgttcccggccgtccgtgccgaaggaagtatctgctgagtgctgacccagcccatgcccatccacctcgctccctcgaccgacccacccagcccagcgcgcgctcgcatggcgatgctgctccgcaaggtgtggggctccgtgctggcgcgcgccgcagcgccgggggccgacccgcgagcccgccgcgcgcaggcgcatcgcgcggagcagtaccagtaccacggctcgctatcgctgggcgcgctcgacgccgtccccaccgacgtgctcgcccagatcctgcgcctgctgggcccgctcgacgccgcgcgctccagcgccgtctgccgcgcctggcgcgtcctcgcctccgacaacggcctctgggctttcttcctccgcctcggccccgagccctaggacctcgtcgtcttcgccgagacgcacctcgccgccggccccgcctcgcacccgtggctgtactacgatagctcgccgcagctctcgttcaaacagatttacggcctccgagcgctggtcccgggtactctcatcgtggatggtggatctggttattgcaagtatggctggagcaagtatgctgctccttccgggcgttgtgctacattcttggaattcggtaacattgaagcacctatgtatgcaaggcttcgtcacttcttctctacaatatatacgaggatgcaaataaagccttcgactcagccagttattgttgtccttccactgtgtcactctgatgataccgagtctgctagggcctcaagaaaacaatacaaggagacgctgtactctgtcttgtttgacatgaatgttcctgctgtttgtgctgtcgatcaggcagttctatctttgtatgcttctaaacggacctctggtattgttgtgcacattggattcaatacgacttctgttgttcccatctttcaaggtagggtaatgtatgagataggtgttgaaactgtggggcaaggtgcccttaaactcactggatttctcaaggagttgatgcagcggagaaatatatcctgtgagtcactgtacactgttcgaaccatcaaggagctgctgattatgaagctgaattgcgtaaagatacacaagcgtcctgcgagatcgatggtgaagggtgtttcactctgtcggaagagagattcaagactccagaaatcctatttcagccccatatgggaggaatgaacggttggtgatgacagctggtacaagacggtcattttagctggtggttcgtcgtgcttgcctggtttaccagagaggctggagaaagagcttcaccaacttcttccaccttatatgtcagaaggaataagagtactccccccttcatttggcactgattctgcctggtttggtgcaaagatgatcagcaacgtgagtactttcactgaggcatggtgtgcaaagaagaaacaattccgtcagaagacaggccggagtggtacattgtttgccaattcctggtaatgaaaatctcagacacaagtcacgagcaagaaacttaaagagttccccgcatcaaaaatacggacataacatccggtccatgctccactgagcctccaccagtatatagaagcatgagcattcatgcccagtatatattcacgtccatatcatgcatatatggattatgagccagtgcatcatttggtggtgttgttataggatgttttggtaagttcgttgtggttataggttgttggcaaaagcgcagttgtctcgttttaattttaagtggaacgattaattagttattgagcatgagtctttgtttatagctatatatgtctcatgaaatttggtacagttctaaatgttgtaaaacgcaataaatcattttataaatgagatatgtctttattgctgttgttcttggattggtaatgg

SEQ ID NO: 23775 - DNA, 1397 bp, Zea Mays
ataaattttaattcaaaaacaaatagaaatagattaaaatttagagtctcgcaagtcagtcaaccggacctggaagcggaccaggaccggcaaattcactcaagcgggctgatgctgatctcctttagcggctgcgtttgcacttccacttccacacggcacaaccttgtcttcgtcgcggcttccttggctcggcacccagacctcagtgcggtgcggggccctgccgagtgccgcacgcgcacgcgcacgcacgccccgccgggcctataaatccttgtcgccttcgcccttactcgccgccccatccccatccccatccccatccaagaaatactacgcccatcggatccaccgccgaggcaggcagaggagcacacaccccaggagctgaggaccggtttcgccatggccgccaagttcatcgccgctcgtcatgcatggctggcgcagaagctggtgctcaagctggacctgcacgacgacaaggacaagcagaaggtgctcaaggcggtctccaccctccacggtatcgactccatctccgtggacatgaagggctcgaatctgacggtggtcggcctggcggaccccgtcgacgtcgtggccaggctgcgcaaggtcgccgccgccgaaatcgtctccgtcgggccagccaaggaggacaagaaggagggcgacaagaaggagggggacaagaagaagaaggacgacgagaagaagcagcaggtcctgtggtacccgcacccgtggcacgccgccgccgcagcgcagcagtaccacccccacccgtacccgccccagtacgccgtccacagcgccgaggaggaccccaactcctgcgccatctgctgatccgaatacccggtcccgtcttctttttgtacatctagctcgcctgcctacctacctacctacctacctacctacctcaggctcgatccaccacgtcgtcggtgatcgccgggataggggccagaccgccagagcggctgtgttggttgcctgctgctctgctcatctctatcctgcgggcgtgggcggtgggccgtggggttggtcgttggcccgtccacaggtcgttatacgatggctcgtgcaaaatcatacacgcgaccccccaaccataaccatccaagagtagctagctgttggggtttttcacttttcaggctgttgctcatcagtgtcgttgtatagtgtgcagtgcatataatatatgtggtttgtgtccttgctatttaggtgtttgtggcacgaaactatatatatagagaaattttctctcgtttataaatgttaccttgttatgtaaatcatacgctttcacttctatttatttcaagtgcatgattttttgaaagtatatattggcgattgatagttgcttgctaaat

SEQ ID NO: 23776 - DNA, 2331 bp, Zea Mays
atttttcatatgaatgtgggaggaaataaacaaggagaaattaagcaaacacaaattacacatttagaatcacatcatacatatgaaaacaataagaacaggcctgtgaaaccaataaacgtggaatcaaacatacttgcaaggtttaatgaaacacgtactatcctagtcctagtgtcctctagcaatgtaaccctaataacatcacaattaggactgttatatttgacatccgtatgaaagtactacttacagtttacatttcacatactttcatcaatgccaatacaaaaaaatccaattggcttcagaaatggataaaactgtattgtatcacccaaataatcttcactacttaaaaagcgacagtggtggtggtatgttctaccacagctatgttgacaggtgggactgccacactactgcctcacaggggttggactattatattttcttatgagtttatgacttttttcctttcaagtttgaactatattttcttgctatttgttttccaatttgaactatatggctgttatgacttatgagtttatgacttatcacttatgtgtctgatttggttcagtttgaggattcaaatgaggtaagacttgctgtttatttcagtttcgttcaatttcaggcttcaaatgaggtaaaacatcctatttcttcatatataaatgctatattgtctatatgaagcaattatataggcaaaactttccactatattggcaagtcgacgactagtcaactgacttatcgtctagtcaccaagtcggtaccttgtcgactcgacttatcgacttgaaaaccttgcttggtaaagttatcatttggtgaaaatgactcacacaacacaaatgagaccaataaaatatatcagacatatggtgggtttaataaagcctaagagagcagacccagtgtcagaggctctcaccaacatgatgactcaagtgagacagctctcaccgccacatctagcttgccctttttgggtttaaagcctaagtgtggcgatattgagctaaatgtttggtttggtcccaaacgtagaaaccaggacgttccgggaatgcgggaacaacctcgttaaaaagaagccagagaggggggaagaaagcaggggagtatgaggactgtggctatggtggggtgggggggggggggggagggcacaaccaagatagatctgcgcagaactgaagaggagcgcttctgcttgtagaatggctggagaagacgatgggaacggtaaaataaaaggctaaaagtttgatttctttgaagggaaaaggttcattttactaccctcacctattcacatttggccacatgacaacaaatgactgttggccatatgcttaaccagccagcccaatgccacaggcatatacatcattggctgttgttccttgtgttttttttgtctattctctgtccatcactagtgaatgttacgaaaattgttttatgtgagagctcaaaccaatatgtgtttattatgacatcaaccacagcattgttttcttggcatgcacaatgttggttgggtggccaaagcagccggtcgcgggaggagcgccgtcatggaggcggcgaggagcagcgccacccttgccgtttcgcgggaggagaactgcacttcgccgttgtgggaggaggcgaggagcagagtcgctggaggagcagcgttgcaggagatgtgtgggctcgggtgggttgtccgtcgagggaggcgtagaagtgttgtttcgcctagtgggtcaccgttgtgggaggcatagaggaagtgggggaaggagtcgtgcgaccgtgagctcatgacagtgtgagggaattaatggctgtggctgcgtgaggaagtggagaagatgaaatgtacatagttagtctatttgttttggctgaaaccacttcgacttgctcctttacattcgtacacggtacccacaggcctacttataagaccactttctaagctgtggaacatcacccagttccagcaatacaattttaaactatcatgtattcgagaccttgaagcaaactaccaacgcatgggcacctcggcttgtatggtaatgaagtacaatagtgttcaatgttcaattgattgcaacattgctacttttttgtctttttaaatcttttttaactacaacatcaacactcaacaacttttatgttactgcaattttgaactgtagagttttggattaatgagggataataaatattcagacaattcaaaattagcaaagatgataaacaatatgcctggtacactagtgctgcaattgctctacaaaaacttctacagat

SEQ ID NO: 23777 - DNA, 1902 bp, Zea Mays
acgaaggctgggcaggctcatcctggatctggaaaataaaatagacactcttcttcttcttcttttagtttttgggccttgcccaagggcccaagtcttagcaatcagcaaaggttaattacctgtatgatggagggtgcagtggccagtactggacccagtcttccagagggttcgcgtagtgcttcaggaacgacctggccctgctgatcccgtcccttgagctcgtgtcatacctgacaggccttccgatgtcggtcgatgcaaacagctccttgtgctctggcgagagctggaagaactccgaggcggcctcgaatgcgcctgccatgacggagttgctgacgccgtggttcaccacctgtcaatcggcaccacaaggatatggtagcgtattgatcagcattggcactgaagcatcacaccagaatccgaggtttgcacaacatggagtttgttgacttgatcactggtgagttgccgcttaaagttccatgcgaacaagtgttgggaggacacggacagagcaacagacaagcagcacgcactgacctggaagcagccctgctcgcggcacgctctggtaatgtcctggatggcgagcgcccgcgtggccgggtccttcccgagcctgccaaggttgatgaccggcagctgccgcggcgagggcgaggacgaggacggcgccgtccgctgcacctggcccgccatggatgctggtaagaagcagaccggcatgcctcgtcgtgaacctccaagccagcaaagcagttccctagtcagtgtagctctggagatggagaagctcggtgcagtggtgtgcatgccaccaggcgacggacgtacctatttataggctctgctttgctgaatgtgcagcgaaaaggcagcagccgatggggactgccagtgcccactggccacagtggagtggacaccccctcccccccttttttttcttcttgtctctgcaagctgaccctgggcaaataccttgtacgtagacttttaggtgccaccaccacgacgacgacgacgaggatgatgcaaaagcgctgggaagggaagatttcggtccaggagcaggccgcggggcccccgtccgtgcgggcgcgggcgcgcgcgtgcgtccaggtgaacaagatctttcccccaggaggcagatcgccccggttcctttcgcttggcagtggtcaccagctgtggagtgggcatatttttctgttattctcgcgccaagttgcgcttgcgccgtgcgtgtctctgcgtgtgtggctgacggctgaacgcgcccgcatctgggctgggctcccagataatgcttgtttttgcgccgggggttccgctgaatccacggcgacagccgactggggatggggaacgggaggtttccggtttcggctgcccggagctgacgacaacgatgggcgggggggggacacccgtctacgtgctgcgaactgcgaaactgacttctttttcgcgtggcggactggcagcaccttttgttttgtttttctgtggcttccaactgaggcgaagtgcatttagagcttatctgagagtaagaattgcaggagatcggaagactaaaatctactttctatttaatttgaatacgaagaggattttaatcccctcagtccttgtttggtaggaattgaaaggcaatccctcaatatcatttaatccctttgctcgtctcgtcaaacaagtctttatgtggattggattataatacaagggtcagtccttttcttcttcttgtcgataggaacgggatgtttttcggtcctgtaggcacatgcccgttcgcgtaaagttgtcgaccgatatacttgctcccttccaaaataaaccaattcctataatcattctaaggccccgagtgagtgaatgcac

SEQ ID NO: 23778 - DNA, 1971 bp, Zea Mays
cgggactaccagagcggagacgccggaagggccaagacgacgcctataaaaagggcggggcggaggcgcggagcgggagcctgacccatatccaatccatccctccgggcgcggagaggaggaggaagcagagcagcgggcgcggcggacatgacgccgatgcggctggtcgtccgagcctgcaccgcaccccccatccgcgtactggttaattacctgtatgatggagggtgcagtggccagtactggacccagtcttccagagggttcgcgtagtgcttcaggaacgacctggccctgctgatcccgtcccttgagctcgtgtcatacctgacaggccttccgatgtcggtcgatgcaaacagctccttgtgctctggcgagagctggaagaactccgaggcggcctcgaatgcgcctgccatgacggagttgctgacgccgtggttcaccacctgtcaatcggcaccacaaggatatggtagcgtattgatcagcattggcactgaagcatcacaccagaatccgaggtttgcacaacatggagtttgttgacttgatcactgcgaacaagtgttgggaggacacggacagagcaacagacaagcagcacgcactgacctggaagcagccctgctcgcggcacgctctggtaatgtcctggatggcgagcgcccgcgtggccgggtccttcccgagcctgccaaggttgatgaccggcagctgccgcggcgagggcgaggacgaggacggcgccgtccgctgcacctggcccgccatggatgctggtaagaagcagaccggcatgcctcgtcgtgaacctccaagccagcaaagcagttccctagtcagtgtagctctggagatggagaagctcggtgcagtggtgtgcatgccaccaggcgacggacgtacctatttataggctctgctttgctgaatgtgcagcgaaaaggcagcagccgatggggactgccagtgcccactggccacagtggagtggacaccccctcccccccttttttttcttcttgtctctgcaagctgaccctgggcaaataccttgtacgtagacttttaggtgccaccaccacgacgacgacgacgaggatgatgcaaaagcgctgggaagggaagatttcggtccaggagcaggccgcggggcccccgtccgtgcgggcgcgggcgcgcgcgtgcgtccaggtgaacaagatctttcccccaggaggcagatcgccccggttcctttcgcttggcagtggtcaccagctgtggagtgggcatatttttctgttattctcgcgccaagttgcgcttgcgccgtgcgtgtctctgcgtgtgtggctgacggctgaacgcgcccgcatctgggctgggctcccagataatgcttgtttttgcgccgggggttccgctgaatccacggcgacagccgactggggatggggaacgggaggtttccggtttcggctgcccggagctgacgacaacgatgggcgggggggggacacccgtctacgtgctgcgaactgcgaaactgacttctttttcgcgtggcggactggcagcaccttttgttttgtttttctgtggcttccaactgaggcgaagtgcatttagagcttatctgagagtaagaattgcaggagatcggaagactaaaatctactttctatttaatttgaatacgaagaggattttaatcccctcagtccttgtttggtaggaattgaaaggcaatccctcaatatcatttaatccctttgctcgtctcgtcaaacaagtctttatgtggattggattataatacaagggtcagtccttttcttcttcttgtcgataggaacgggatgtttttcggtcctgtaggcacatgcccgttcgcgtaaagttgtcgaccgatatacttgctcccttccaaaataaaccaattcctataatcattctaaggccccgagtgagtgaatgcac

SEQ ID NO: 23779 - DNA, 1874 bp, Zea Mays
cgggactaccagagcggagacgccggaagggccaagacgacgcctataaaaagggcggggcggaggcgcggagcgggagcctgacccatatccaatccatccctccgggcgcggagaggaggaggaagcagagcagcgggcgcggcggacatgacgccgatgcggctggtcgtccgagcctgcaccgcaccccccatccgcgtactggttaattacctgtatgatggagggtgcagtggccagtactggacccagtcttccagagggttcgcgtagtgcttcaggaacgacctggccctgctgatcccgtcccttgagctcgtgtcatacctgacaggccttccgatgtcggtcgatgcaaacagctccttgtgctctggcgagagctggaagaactccgaggcggcctcgaatgcgcctgccatgacggagttgctgacgccgtggttcaccacctgtcaatcggcaccacaaggatatggtagcgtattgatcagcattggcactgaagcatcacaccagaatccgaggtttgcacaacatggagtttgttgacttgatcactggtgagttgccgcttaaagttccatggtaagtaagctggtcagcttgggtcacagcgtgagctgcatgggtgactgacacttgttttaaagggcacacaggacacgtgtgtctttgtttttttttcccctagagaatactcatggctggctgaggctggctggctgactgagttcactgtgactgtcagcgaacaagtgttgggaggacacggacagagcaacagacaagcagcacgcactgacctggaagcagccctgctcgcggcacgctctggtaatgtcctggatggcgagcgcccgcgtggccgggtccttcccgagcctgccaaggttgatgaccggcagctgccgcggcgagggcgaggacgaggacggcgccgtccgctgcacctggcccgccatggatgctgacttttaggtgccaccaccacgacgacgacgacgaggatgatgcaaaagcgctgggaagggaagatttcggtccaggagcaggccgcggggcccccgtccgtgcgggcgcgggcgcgcgcgtgcgtccaggtgaacaagatctttcccccaggaggcagatcgccccggttcctttcgcttggcagtggtcaccagctgtggagtgggcatatttttctgttattctcgcgccaagttgcgcttgcgccgtgcgtgtctctgcgtgtgtggctgacggctgaacgcgcccgcatctgggctgggctcccagataatgcttgtttttgcgccgggggttccgctgaatccacggcgacagccgactggggatggggaacgggaggtttccggtttcggctgcccggagctgacgacaacgatgggcgggggggggacacccgtctacgtgctgcgaactgcgaaactgacttctttttcgcgtggcggactggcagcaccttttgttttgtttttctgtggcttccaactgaggcgaagtgcatttagagcttatctgagagtaagaattgcaggagatcggaagactaaaatctactttctatttaatttgaatacgaagaggattttaatcccctcagtccttgtttggtaggaattgaaaggcaatccctcaatatcatttaatccctttgctcgtctcgtcaaacaagtctttatgtggattggattataatacaagggtcagtccttttcttcttcttgtcgataggaacgggatgtttttcggtcctgtaggcacatgcccgttcgcgtaaagttgtcgaccgatatacttgctcccttccaaaataaaccaattcctataatcattctaaggccccgagtgagtgaatgcac

SEQ ID NO: 23780 - DNA, 1391 bp, Zea Mays
cgcctgagagaatttctgaatttccccttccttttcctaccatccatcctgctctatcatttccggccccatctccaaatcaaatttccttattattaaagcatattaatccagtcatgttatatctgtgcctatttctaccgcaacaaattatggttcacataaaaaacaagaataggaagaaggaaaaaaagggggaaaatgacggcgtcacgctcagctgagcgtctgagcggcaacacgttcaggaaccttcttgtggccgtttgtaagtcacggccgcccacttcacgtcgctgcggtgccgcctctaagcccatatcttttcggaaaaaaaaccccacaaggaaccatttcttcaaaattaagcaacacaagcagaagaaggttgttagtcactgccagtacaactctaaacagcctccaagctcccaatcagcaaaccattcataagacaaatcatttctacttctagtatataatagcatttaaccatctcctaataaatttgctaattaccgtaccaaaagagcgaaggccaaaaaaaaacgcatcaagaaagtcgtcaaaatctccaccaccacaagaaatcatataaagtgcggttctggtgcccccaccttctgatcttctcgcgtcgattgcttgcccagctcgcttcctcttcgtcttccttctcccccttctcctcgcctccggttaaccgccacagcctggattcgccttctcccgcggcggcacggccggccgctgctgctgcgtcggcgcgtgagatggatgattgcggcggcggcggcaagaggccgttccagctggcgcggtcgctgacgtaccaccaccacccggggcaccggccggcggccgcgtccaggtggcgacggcagcaccagcagcatcagctcgcggacgagccgcgtgcgccccggccgcaggcggtggtgctgtacacgacgtcgctgcgcggggtgcggcgcacgttcgcggactgcgccgcggtgcgcgccatcctgcgcggcttccgcgtggccgcgcggaggagcaggcggcagatggaggacgatggggagtgctggtgggggaggggaagaagcgacgacgacggggccgaggaactctagaatgctcgcggtgccgacacatccagcattggccaacgatcgaacggccaaggatatttttgccgacgtggacgcatgtggaagcaggaatcctttctgctttaataataaagaaattatgtgacagtagatctaagtttttcattttatgctgcattattaaattaattttagatagtgataattttctaacatccacatcacttgattgtgagagatgacaaagcaagaaaccttcctctctttgatatactcatattaggtagagaagag

SEQ ID NO: 23781 - DNA, 1475 bp, Zea Mays
cagagccgatgtagtgcttcccttttatagttgtagttggatttatgtcatctgcataaatctccacaagaaatggcctttcttcttttatgcctgctaaaaatatatgatgacagcaaaaaaagaattcaaggtcgtagtcgctttactttccaatggaacaggaggcaaaattgtaatctccaataaaggaaatacctctcttaccttagggtgacctgtatatctcaaatgataggaaagggtcattaaatcaggaggcaaagttataatcatgaatcaagggaataattaggcatatgagaactattgtgctctttgccgttttcttgccttattgggtcctgcacacatatttgttgacttagtcgttcccatatgcatcactaaaaggattagaaaggatcaaggataaacacacagaagaagcttgaatgttagctcgagcaaaaaataaaataccaggtgaactttcccacaacatcgacaattgttttgcctttcattaggcctaaagcaaatgcaaaacaacaaaacaaattttagttaaatttgtacttagtccattgtttttttagaattaattactaacccacaatgcaagtctgttaatgtgtgcaacatgatagcaaggtgctgcttacctttatctttcccaagatcatgaagtgctcttgctttaagatatatggcctccatgagaaggctgacagcatgcaagggcattggtggggaatcccactgtgaatgagtcttcccacggcctgtttttctagcaattgagattttcatcttaggaactaatgcagatgtctatcccatcaaagacacggagtgctgcctctacatgaccccgttgatattctagccttcctagcaatgcccttgcttcctgtttagcatgtgctgtcagtcgagctagaaacagctaggtccaaatgtaatgctgaaatatagaacttaaacagatgacattctggcatctaacgaaatcgaagaaagagaatggcagtaataaaaatggtaagtcttctcttgaaataagaaagaatttcccttgaaatacttatactggtacagaaaaggctagcttggataaactcctaggtaggaggtagtgaactaattttagtgaagaaaaagataataaccatatatttattcaactaactgcagaaaaaaaaatacattcagcatgcaggttgattttagttacgtacaaaaatcttcacaaggaagtaaaattgacaaaagaaacccaagattgacttaactaggaatcatactagctgaattggtggcatttcctagtcacattcagcatatatttcagctgttcttggtgccataacaaaatctgtttcacaaaagaaaacaacttacctcataatttaggcaaatgccctcccggagcgacaactcggcttcctctatgttgccattatcaaggtactgctcaatctctccattccaag

SEQ ID NO: 23782 - DNA, 2107 bp, Zea Mays
ctattctgggcgatttccacgtcgccaaaggcagcagccgtggctgtagactgtagcacgaaagagaaatctgtaacccagcagccagcgagtcaggcaatggcggccgtcgtggcgctggcaccggcctctccagctctcctccctgtccccttccgcggccgccgcgacggccgggtggccctctcgcctcgccgaacccgctgctccgcggggcgctgcagagccacggcccagaccttccaggggggcgccgccgccagctacgcccgcgagatggagcgcctctccgccaaggagtcattgctcctcgcctttaaagatgctgggggtttcgaggccttagtcagcgggaagaccactgagatgcagaggatcgatgtcaatgagcgaatcgttggacttgaacgcctgaatcccacaccgcgccccacaacatcgccgtttctggagggtcgatggaactttgaatggtttggtgatagtagtcctggagcatttgcagcccgtcttttgtttgagaggtcacctacggctgttgcacactttatgggacttgatgtgctgatcaaggatggatactccaagctctcatcaaacctcaagtttgtaaacacgatacaaagcaagtttttactgactactcaattgtctgttgagggccccatcaggatgaaagaggaatatgttgagggccttatagagattcccagaatcaatgaagaatcattgcctgaacagttaaagggcttgcttggccaaactgcaggagctctacaacaacttcctagccctataagggatgctgtttcagaggggcttaaattgccacttagtggatcatttcaacgcttattcatgatctcttacttggatgaagaaatattggtatgtttctttacttcttcaatacttgctggggcacattatcagagatgctgctggagcacctgacgtcttaaccagacttgaggggccgcaaccgaatccaggtgacggcacagcagatgcagtgatatcggaatatgaaagctaatgcctcagtgctgactgtagctccgcacctagctcctgtttatggctcctttctcctctttggtcattttctcagtctcgcgcgtatataaagctttctagttctagtgttgtcaacgatgatgaccactcgagtgtttttacttaatacataccatttgtctattctgaatatgagcaacaatatctaaatattcaaatgtccatcaccagtttatatgaaacacggtaaaacaaaaaaaaaaggtactggttgtttaaagttaaaaactgaccagtaagttccaagatacgtacgggctggtaaccgctcgatgcgtgcagagaaccagtgacagacagcaacctctatcaaaaacaaaagagactagaagagttctattcaaacactgatgaagttcattgttctattgggctcatggaactatcaaaaagaggacagacatggaaccatgaaacatgtccggtgatttatgtttatggttgcaaaacgattaaagttgagatcgttcatctcataatgtaaatgcttgcagagaaactgaccaggagacttggggggtaaacattcccatgcaccatctgatcataacttaaagccggccaccccgtctgtgtcgcaggagctgaggagaaaatcatagaagccatcgttgtagccatccggatcgagatcgtacagtaaccctcccccttctccagacgatgtttcggcctccactttcatcggcgacgacatcgcagtcggctgccacgacgatagcgatgatggcgaagcatcctcgtccgtgagtgccgacgccgcgcaggagcccttttgggacgatggcattccggtgagccgctggacgaccttacgaaagtcccgagcctctgttttgataacctccggcgccaagacgtgaacgatcctgatcttacgcggcggcgtcttcgggatagcgtgggagagccggtgctgtgacgacgatgcaccgcgggacgggagcttcgcggcgtgtttcatggcgtcgccgttcgtgtgtgtgagtgtgagggggagagagaccgaacgagatggagccaccgccgc

SEQ ID NO: 23783 - DNA, 2028 bp, Zea Mays
ctattctgggcgatttccacgtcgccaaaggcagcagccgtggctgtagactgtagcacgaaagagaaatctgtaacccagcagccagcgagtcaggcaatggcggccgtcgtggcgctggcaccggcctctccagctctcctccctgtccccttccgcggccgccgcgacggccgggtggccctctcgcctcgccgaacccgctgctccgcggggcgctgcagagccacggcccagaccttccaggggggcgccgccgccagctacgcccgcgagatggagcgcctctccgccaaggagtcattgctcctcgcctttaaagatgctgggggtttcgaggccttagtcagcgggaagaccactgagatgcagaggatcgatgtcaatgagcgaatcgttggacttgaacgcctgaatcccacaccgcgccccacaacatcgccgtttctggagggtcgatggaactttgaatggtttggtgatagtagtcctggagcatttgcagcccgtcttttgtttgagaggtcacctacggctgttgcacactttatgggacttgatgtgctgatcaaggatggatactccaagctctcatcaaacctcaagtttgtaaacacgggccccatcaggatgaaagaggaatatgttgagggccttatagagattcccagaatcaatgaagaatcattgcctgaacagttaaagggcttgcttggccaaactgcaggagctctacaacaacttcctagccctataagggatgctgtttcagaggggcttaaattgccacttagtggatcatttcaacgcttattcatgatctcttacttggatgaagaaatattgattatcagagatgctgctggagcacctgacgtcttaaccagacttgaggggccgcaaccgaatccaggtgacggcacagcagatgcagtgatatcggaatatgaaagctaatgcctcagtgctgactgtagctccgcacctagctcctgtttatggctcctttctcctctttggtcattttctcagtctcgcgcgtatataaagctttctagttctagtgttgtcaacgatgatgaccactcgagtgtttttacttaatacataccatttgtctattctgaatatgagcaacaatatctaaatattcaaatgtccatcaccagtttatatgaaacacggtaaaacaaaaaaaaaaggtactggttgtttaaagttaaaaactgaccagtaagttccaagatacgtacgggctggtaaccgctcgatgcgtgcagagaaccagtgacagacagcaacctctatcaaaaacaaaagagactagaagagttctattcaaacactgatgaagttcattgttctattgggctcatggaactatcaaaaagaggacagacatggaaccatgaaacatgtccggtgatttatgtttatggttgcaaaacgattaaagttgagatcgttcatctcataatgtaaatgcttgcagagaaactgaccaggagacttggggggtaaacattcccatgcaccatctgatcataacttaaagccggccaccccgtctgtgtcgcaggagctgaggagaaaatcatagaagccatcgttgtagccatccggatcgagatcgtacagtaaccctcccccttctccagacgatgtttcggcctccactttcatcggcgacgacatcgcagtcggctgccacgacgatagcgatgatggcgaagcatcctcgtccgtgagtgccgacgccgcgcaggagcccttttgggacgatggcattccggtgagccgctggacgaccttacgaaagtcccgagcctctgttttgataacctccggcgccaagacgtgaacgatcctgatcttacgcggcggcgtcttcgggatagcgtgggagagccggtgctgtgacgacgatgcaccgcgggacgggagcttcgcggcgtgtttcatggcgtcgccgttcgtgtgtgtgagtgtgagggggagagagaccgaacgagatggagccaccgccgc

SEQ ID NO: 23784 - DNA, 2051 bp, Zea Mays
gtggaaaaaaatcgaaaatatcaagttttcccggctattctgggcgatttccacgtcgccaaaggcagcagccgtggctgtagactgtagcacgaaagagaaatctgtaacccagcagccagcgagtcaggcaatggcggccgtcgtggcgctggcaccggcctctccagctctcctccctgtccccttccgcggccgccgcgacggccgggtggccctctcgcctcgccgaacccgctgctccgcggggcgctgcagagccacggcccagaccttccaggggggcgccgccgccagctacgcccgcgagatggagcgcctctccgccaaggagtcattgctcctcgcctttaaagatgctgggggtttcgaggccttagtcagcgggaagaccactgagatgcagaggatcgatgtcaatgagcgaatcgttggacttgaacgcctgaatcccacaccgcgccccacaacatcgccgtttctggagggtcgatggaactttgaatggtttggtgatagtagtcctggagcatttgcagcccgtcttttgtttgagaggtcacctacggctgttgcacactttatgggacttgatgtgctgatcaaggatggatactccaagctctcatcaaacctcaagtttgtaaacacggatgaaagaggaatatgttgagggccttatagagattcccagaatcaatgaagaatcattgcctgaacagttaaagggcttgcttggccaaactgcaggagctctacaacaacttcctagccctataagggatgctgtttcagaggggcttaaattgccacttagtggatcatttcaacgcttattcatgatctcttacttggatgaagaaatattgattatcagagatgctgctggagcacctgacgtcttaaccagacttgaggggccgcaaccgaatccaggtgacggcacagcagatgcagtgatatcggaatatgaaagctaatgcctcagtgctgactgtagctccgcacctagctcctgtttatggctcctttctcctctttggtcattttctcagtctcgcgcgtatataaagctttctagttctagtgttgtcaacgatgatgaccactcgagtgtttttacttaatacataccatttgtctattctgaatatgagcaacaatatctaaatattcaaatgtccatcaccagtttatatgaaacacggtaaaacaaaaaaaaaaggtactggttgtttaaagttaaaaactgaccagtaagttccaagatacgtacgggctggtaaccgctcgatgcgtgcagagaaccagtgacagacagcaacctctatcaaaaacaaaagagactagaagagttctattcaaacactgatgaagttcattgttctattgggctcatggaactatcaaaaagaggacagacatggaaccatgaaacatgtccggtgatttatgtttatggttgcaaaacgattaaagttgagatcgttcatctcataatgtaaatgcttgcagagaaactgaccaggagacttggggggtaaacattcccatgcaccatctgatcataacttaaagccggccaccccgtctgtgtcgcaggagctgaggagaaaatcatagaagccatcgttgtagccatccggatcgagatcgtacagtaaccctcccccttctccagacgatgtttcggcctccactttcatcggcgacgacatcgcagtcggctgccacgacgatagcgatgatggcgaagcatcctcgtccgtgagtgccgacgccgcgcaggagcccttttgggacgatggcattccggtgagccgctggacgaccttacgaaagtcccgagcctctgttttgataacctccggcgccaagacgtgaacgatcctgatcttacgcggcggcgtcttcgggatagcgtgggagagccggtgctgtgacgacgatgcaccgcgggacgggagcttcgcggcgtgtttcatggcgtcgccgttcgtgtgtgtgagtgtgagggggagagagaccgaacgagatggagccaccgccgc

SEQ ID NO: 23785 - DNA, 2569 bp, Zea Mays
ggaagtttcattttatatgccaaagtacgattgggtgcccgtttggcgagggatgtcattttctgcactttgtccctggtggttacccggcagttgcaaaaatgctgaatctaagtagctctgctgtatctgcgccatcaagaactcatgtggatcatgccgctcttaccggtgcctctcatccagcttctacggtcaagacacgcatgtgcaccaagtacaacactacagaaggctgcaagttcggtgataagtgccatttcgctcatagcgaaagagagcttgcgaagccagcctacatgtctcaagaaggacctcctatgggtggtcgatatggacgagctgaacctatgcaaccagctgccatgggccctccagcaggaaactttggtgcctcggcgactgccaagatcagtgtggacgcctctctggccggtggcataatcggcaagggtggggtcaacactaagcagataagtagaattacaggcgtcaagctctccatccgcgaccacgagtctaaccccaacctaaagaacatcgagctggaaggcaattttgaccagatcaagcaagccagcgacttggtgcgtgatctcatcgcaaccatcagcgcaagcatgccagcgaaaaatccatctgctgccgcggcaccagcaggaggaggccgaggcggtggtccagggggcaagagcagcaactacaagacgaagctgtgcgagaacttcttgaagggtgcctgtacttttggtgaccggtgccacttcgcccatggcgagacggagcagcggagaggtgctgcatgagagtcgagtttaaagatgctgggggtttcgaggccttagtcagcgggaagaccactgagatgcagaggatcgatgtcaatgagcgaatcgttggacttgaacgcctgaatcccacaccgcgccccacaacatcgccgtttctggagggtcgatggaactttgaatggtttggtgatagtagtcctggagcatttgcagcccgtcttttgtttgagaggtcacctacggctgttgcacactttatgggacttgatgtgctgatcaaggatggatactccaagctctcatcaaacctcaagtttgtaaacacgatacaaagcaagtttttactgactactcaattgtctgttgagggccccatcaggatgaaagaggaatatgttgagggccttatagagattcccagaatcaatgaagaatcattgcctgaacagttaaagggcttgcttggccaaactgcaggagctctacaacaacttcctagccctataagggatgctgtttcagaggggcttaaattgccacttagtggatcatttcaacgcttattcatgatctcttacttggatgaagaaatattgattatcagagatgctgctggagcacctgacgtcttaaccagacttgaggggccgcaaccgaatccaggtgacggcacagcagatgcagtgatatcggaatatgaaagctaatgcctcagtgctgactgtagctccgcacctagctcctgtttatggctcctttctcctctttggtcattttctcagtctcgcgcgtatataaagctttctagttctagtgttgtcaacgatgatgaccactcgagtgtttttacttaatacataccatttgtctattctgaatatgagcaacaatatctaaatattcaaatgtccatcaccagtttatatgaaacacggtaaaacaaaaaaaaaaggtactggttgtttaaagttaaaaactgaccagtaagttccaagatacgtacgggctggtaaccgctcgatgcgtgcagagaaccagtgacagacagcaacctctatcaaaaacaaaagagactagaagagttctattcaaacactgatgaagttcattgttctattgggctcatggaactatcaaaaagaggacagacatggaaccatgaaacatgtccggtgatttatgtttatggttgcaaaacgattaaagttgagatcgttcatctcataatgtaaatgcttgcagagaaactgaccaggagacttggggggtaaacattcccatgcaccatctgatcataacttaaagccggccaccccgtctgtgtcgcaggagctgaggagaaaatcatagaagccatcgttgtagccatccggatcgagatcgtacagtaaccctcccccttctccagacgatgtttcggcctccactttcatcggcgacgacatcgcagtcggctgccacgacgatagcgatgatggcgaagcatcctcgtccgtgagtgccgacgccgcgcaggagcccttttgggacgatggcattccggtgagccgctggacgaccttacgaaagtcccgagcctctgttttgataacctccggcgccaagacgtgaacgatcctgatcttacgcggcggcgtcttcgggatagcgtgggagagccggtgctgtgacgacgatgcaccgcgggacgggagcttcgcggcgtgtttcatggcgtcgccgttcgtgtgtgtgagtgtgagggggagagagaccgaacgagatggagccaccgccgc

SEQ ID NO: 23786 - DNA, 1419 bp, Zea Mays
acacgaatccttcggaccaaatccgtcctgcttcatcgaggcccaaggcccaatctccgtttctgataaagaaaccaaagagcaacctagcagtcttccttcacttctctgcttccgacctcgtagcgaatcggaccggggggctagggttccggtgcgcctctgcaatcggacgcgaggctaggctgggcatggagggaaccgctgcggcccggaagaggtcccggccggagacggcgaacggggctgccgccgccgggaagcgctccaaaacacggagtcatttcaaactggtctatcaagcaaatcgaagccttgcaccaagtttttcagtacgattgggtgcccgtttggcgagggatgtcattttctgcactttgtccctggtggttacccggcagttgcaaaaatgctgaatctaagtagctctgctgtatctgcgccatcaagaactcatgtggatcatgccgctcttaccggtgcctctcatccagcttctacggtcaagacacgcatgtgcaccaagtacaacactacagaaggctgcaagttcggtgataagtgccatttcgctcatagcgaaagagagcttgcgaagccagcctacatgtctcaagaaggacctcctatgggtggtcgatatggacgagctgaacctatgcaaccagctgccatgggccctccagcaggaaactttggtgcctcggcgactgccaagatcagtgtggacgcctctctggccggtggcataatcggcaagggtggggtcaacactaagcagataagtagaattacaggcgtcaagctctccatccgcgaccacgagtctaaccccaacctaaagaacatcgagctggaaggcaattttgaccagatcaagcaagccagcgacttggtgcgtgatctcatcgcaaccatcagcgcaagcatgccagcgaaaaatccatctgctgccgcggcaccagcaggaggaggccgaggcggtggtccagggggcaagagcagcaactacaagacgaagctgtgcgagaacttcttgaagggtgcctgtacttttggtgaccggtgccacttcgcccatggcgagacggagcagcggagaggtgctgcatgagagtcgaggtgctctaggcaatgagatgccatgtgctccctccttttgctactgtgaattttcgccttgcagcgctaggcggttggactgttgtgttgtgttgcgacgtcaatggattaaactctagatttcagctttctttttttaacatataagttcgagaaaacgttaaactgtcgtgcagcttgcattttgttggtcggtaagctagcaggctgctagcccatgacaaacctgtgtgacaaacctgtttgactgtcctagtgttgctgtgtgactcgtcaaaactagggctaaaaaaaaaa

SEQ ID NO: 23787 - DNA, 1030 bp, Zea Mays
acacgaatccttcggaccaaatccgtcctgcttcatcgaggcccaaggcccaatctccgtttctgataaagaaaccaaagagcaacctagcagtcttccttcacttctctgcttccgacctcgtagcgaatcggaccggggggctagggttccggtgcgcctctgcaatcggacgcgaggctaggctgggcatggagggaaccgctgcggcccggaagaggtcccggccggagacggcgaacggggctgccgccgccgggaagcgctccaaagacacggagtcatttcaaactggtctatcaagcaaatcgaagccttgcaccaagtttttcagtgtggacgcctctctggccggtggcataatcggcaagggtggggtcaacactaagcagataagtagaattacaggcgtcaagctctccatccgcgaccacgagtctaaccccaacctaaagaacatcgagctggaaggcaattttgaccagatcaagcaagccagcgacttggtgcgtgatctcatcgcaaccatcagcgcaagcatgccagcgaaaaatccatctgctgccgcggcaccagcaggaggaggccgaggcggtggtccagggggcaagagcagcaactacaagacgaagctgtgcgagaacttcttgaagggtgcctgtacttttggtgaccggtgccacttcgcccatggcgagacggagcagcggagaggtgctgcatgagagtcgaggtgctctaggcaatgagatgccatgtgctccctccttttgctactgtgaattttcgccttgcagcgctaggcggttggactgttgtgttgtgttgcgacgtcaatggattaaactctagatttcagctttctttttttaacatataagttcgagaaaacgttaaactgtcgtgcagcttgcattttgttggtcggtaagctagcaggctgctagcccatgacaaacctgtgtgacaaacctgtttgactgtcctagtgttgctgtgtgactcgtcaaaactagggctaaaaaaaaaa

SEQ ID NO: 23788 - DNA, 506 bp, Zea Mays
gtttgcccttgtgtcatcccggttcctctgtaattttgtgtgacgagggaggctcggctggaacggaataaaaccagatcactctttgggtgaacaatggcgtcccacctgagcaatatgctggcggtgcaataagtctcctgctgatgtgagcgaaatcacggcttttttctttggtttcatgatgatcctctgcaacttgtgcaaggtagggaatagaaataccgatctcgagattgagggagatgtaagggcgtctgggaacagctcattaacacaatggctacggtgaatgaatcgaatgagcgaggatgtattttgagaacaaccaggcgtcatgaaacgacagtttgttcaataaatttgtattccacccctgtaacgattgtacttcaaaatatttccatgtgttcttagctgccttgcatccagctttttcgacctgccgtcctatgtggaagtggaagctcccctttcgaacttgtttggttaggcttggatctaga

SEQ ID NO: 23789 - DNA, 795 bp, Zea Mays
gaactagcgaagaaaaggacgcggggcaccatggcgacggcacaggcagcgtcggcgtccccaacccaccaccgcgcgtctccagggatgtcgccgccgcagccgccgtaccccagcgccgccaggatcgccgactccgcctgcttcccccagtacaccgcctcgctcaagtgtacgagccctgctgcgcacccgccctgattcccaatctgccccctcctctcttcgacccatccacacacccccacgttcgcaggaaggtttggaggccaaccaggacaagaccaagtgccagcagcagttcgacgattacaaggaatgcaagaagaaagagagggaggctcggctggaacggaataaaaccagatcactctttgggtgaacaatggcgtcccacctgagcaatatgctggcggtgcaataagtctcctgctgatgtgagcgaaatcacggcttttttctttggtttcatgatgatcctctgcaacttgtgcaaggtagggaatagaaataccgatctcgagattgagggagatgtaagggcgtctgggaacagctcattaacacaatggctacggtgaatgaatcgaatgagcgaggatgtattttgagaacaaccaggcgtcatgaaacgacagtttgttcaataaatttgtattccacccctgtaacgattgtacttcaaaatatttccatgtgttcttagctgccttgcatccagctttttcgacctgccgtcctatgtggaagtggaagctcccctttcgaacttgtttggttaggcttggatctaga

SEQ ID NO: 23790 - DNA, 622 bp, Zea Mays
actgaactctttgagcaatctgagactactgcacatgtatgtcctgtaaggaagcatgtctgggataactactgcttgacacatcacaatgagaagttgatagaggacaattcaacgctttcttcttatggcgttcggaataactctaaggtctgtttctcgccgcacgtcatgtccagagtacatcggaaacactcgagaagaagaaaacaccgcttcttccatggtcttagcaggaaagctaaccccgccctgtgatttgttagctatataggagcaaagctggtgccaagccgcaacaaatgcatcgtgactatcatccttgtcagtagtatggtcatttcagaaacgtgatcgagccttggactgtgtgagtttaactggaagtatgcatggattattcattattcatggaagctatgtcagggtctcacattagctagtactctttttatgttgcatttatatggatgaaactatggctgttttttttttacaattgaactgtagttagtggctaggttatgagaactcttgctctatacttattcagtggctaggtaatgacaattcttgttctatataatggttgttcgagtgtgagaaattcacaatctcataa

SEQ ID NO: 23791 - DNA, 2949 bp, Zea Mays
agatagggaggtgttacctgactctggagcaagtcttcttgcaaataaaacaaaagtattgagtaaattaacatttagaacaacgccatatcagataaaagcagatggagcttccgtaggaggtctacaaggcaccgagttttgaagaactctgatatctcagaacctgagactcttagttccagcaaagcaaaggctgacattacaccgagcaacaatgtttatacttcaacatattcttatgcctcggagaagcctctgcaacaagacaagccagatgagaagactctgcatcaagagaagccagaggagaaacctctgtatcaaggaaactctgatgaaaagctgatggagaagccaagtgaaaagcctactgacaaacttatggaagaaccagctgaccagataattgaaaaatcaattgaactacccactcaaaggataaccgaaacaccaactgatgagccagctgaaaaaataaatgttgcaccaactgaagaaccagctggaaaaataacagagacggcatctgaaaatacagccgaagggtcaataaaaaatgcaacagaagagacacccgaaagggcagttgaggaactaattgaagaggcagatgaaagtatttccgtctcatcaactgtgctgaaggaggaggaaaacacctcacttgttgaaggaagcagtggagacccggaggaagatcatctggagtctgcagctactaatcttcagcctaggagtgacacttgcattgcaagggaagagctgctgaatcagaaggatctggtgaaactgcaagctgttatccgtggacatctagttagaaagcaggcttcagaatctttacaatgcttgcttgcgattattaaaattcaagggttgatcagggctcatcaagcacaacattcaccaggaaagattcaggagactattgttcattcttcaggtgagaaattgcttcgcaatggatttgctctcaagctcatggacaacacaccaacttcaaaatccattcgcataaaatgtgatccttcagaatctgatgttacatggggatggatggagaggtggacagccttaattccaccgatcactgtggtgcacctgccagagcataaagaaaatagtgagttgatgggtgaaactgtgaccgaacaagtgactgaacatgctcagtgtgatgaagacattgttcctttggattcagacctatctttcccaaagttggtggctgatgatgtgaaagaaacagtagagacatctgattttagtgccttggaggctcctgcaagtgtcccagatgaaagccctaagatggaaatgaaacatgatcctgaatcggagttgatcgaaactactaatgcagatgctgatcatgtaactgaccaaaaggctgaaaatgatgtggacgagccttttatgtccttggatcaacaatatgcccaagctgatgatgcatcaaggaatccctgtccactccctggaaaatttgaaccgtccaatgaggacagtggtgacgcatacaattctgagcagacactggagatggaaggtaaaaggtttgtggcaagaaagccatgcaatccagcctttgctgctgcccaattgaaatttgaagagctgagtacaaattcgacagtcagcaggtccagcagcccaccgcatctggatggggtgagcaagccaaggatgcacactcctagttcgcaagaagattacacgccaaagcaagatggcacaggcatacaagaaagctcagctggtcatgatactaaaatgagaattgctgcatcagaatgtgggactgaaatatcaatttcatccacactggactcaccagacagatcagaaggtgatggtggggagatagtgttggagattggagctctggaaaacagaaactatgtcactggcaaagctgataaagactccagtattgtccatcccggggtaaaagatgctcctgaagcagaagcccagccgcagaaggaagtagaagagaatgggcatgttcctgcccttgaaacggaagcccagccacaaaaggagccacatactgaaccggaagtggcagatttgcatggacaattggaaaaatcggtcacatcttatgccacacctgaagggactccaatgagccgaacgaccaccattccggagtctcatgggacaccgtcaagtgaggtctctgttaacaccaaaaggagcaggagcaacaagcccaagtcccacgcgagcaagaggtcgctggctagtccaggcagcgactcagttggacggagcagcaccgacaagttttcgaaggaatcaaggcatgccaagagagagagctcctcaagcaaagctgctaaatccgaccagggcgatcaagaacctcgtgtaagcaacagcaacagcaacccgttgcctagctacatgcagttcacagagtccgcaagagccaaggcgtcgtccccgaagatgagcccagacgtgcaggacagcaacgccgcgaggaagaggcactcgttgcccatgaccaacggcaagcacgactcgtcgcctcgcatgcagcggtcgtcgtcatcgcaagctccgcaaggcgtgaaaagcagtggcccttctcctcacagcgcgtctggtggcgcagacaagaggtggcatatctgactgatgatgagtaggccgagcacagcagcatatttcgccgtctaatccgttgattcgtcgttgggaaactgagtatggtttggaagacgggcagcttttgccgcttgatacgtgtacatttgtcgcttctcattggttgtgttatgtgactgatagtggtttgtgtgtgccccctttgacttgtaatgcaacagtggcatcaggagtgtgtggattggtctgttgtatttggcgacattgaagtttctgttggtgtggatgctactacgcctctcatttctttttgaaaggggtttgctt

SEQ ID NO: 23792 - DNA, 3066 bp, Zea Mays
gtgcttgtctcgttagatccttgccgaatgcgtggggctcaggggcagggtgtgtttgatccttgatagatctgggtttaattcgaagcggggagctggaatcaaccggcgaatcgagagattctctcactggttcagctcgctcacctcgtcggctttgaattttacctttggatttgtttgcggcgttgacagaacaacgccatatcagataaaagcagatggagcttccgtaggaggtctacaaggcaccgagttttgaagaactctgatatctcagaacctgagactcttagttccagcaaagcaaaggctgacattacaccgagcaacaatgtttatacttcaacatattcttatgcctcggagaagcctctgcaacaagacaagccagatgagaagactctgcatcaagagaagccagaggagaaacctctgtatcaaggaaactctgatgaaaagctgatggagaagccaagtgaaaagcctactgacaaacttatggaagaaccagctgaccagataattgaaaaatcaattgaactacccactcaaaggataaccgaaacaccaactgatgagccagctgaaaaaataaatgttgcaccaactgaagaaccagctggaaaaataacagagacggcatctgaaaatacagccgaagggtcaataaaaaatgcaacagaagagacacccgaaagggcagttgaggaactaattgaagaggcagatgaaagtatttccgtctcatcaactgtgctgaaggaggaggaaaacacctcacttgttgaaggaagcagtggagacccggaggaagatcatctggagtctgcagctactaatcttcagcctaggagtgacacttgcattgcaagggaagagctgctgaatcagaaggatctggtgaaactgcaagctgttatccgtggacatctagttagaaagcaggcttcagaatctttacaatgcttgcttgcgattattaaaattcaagggttgatcagggctcatcaagcacaacattcaccaggaaagattcaggagactattgttcattcttcaggtgagaaattgcttcgcaatggatttgctctcaagctcatggacaacacaccaacttcaaaatccattcgcataaaatgtgatccttcagaatctgatgttacatggggatggatggagaggtggacagccttaattccaccgatcactgtggtgcacctgccagagcataaagaaaatagtgagttgatgggtgaaactgtgaccgaacaagtgactgaacatgctcagtgtgatgaagacattgttcctttggattcagacctatctttcccaaagttggtggctgatgatgtgaaagaaacagtagagacatctgattttagtgccttggaggctcctgcaagtgtcccagatgaaagccctaagatggaaatgaaacatgatcctgaatcggagttgatcgaaactactaatgcagatgctgatcatgtaactgaccaaaaggctgaaaatgatgtggacgagccttttatgtccttggatcaacaatatgcccaagctgatgatgcatcaaggaatccctgtccactccctggaaaatttgaaccgtccaatgaggacagtggtgacgcatacaattctgagcagacactggagatggaaggtaaaaggtttgtggcaagaaagccatgcaatccagcctttgctgctgcccaattgaaatttgaagagctgagtacaaattcgacagtcagcaggtccagcagcccaccgcatctggatggggtgagcaagccaaggatgcacactcctagttcgcaagaagattacacgccaaagcaagatggcacaggcatacaagaaagctcagctggtcatgatactaaaatgagaattgctgcatcagaatgtgggactgaaatatcaatttcatccacactggactcaccagacagatcagaaggtgatggtggggagatagtgttggagattggagctctggaaaacagaaactatgtcactggcaaagctgataaagactccagtattgtccatcccggggtaaaagatgctcctgaagcagaagcccagccgcagaaggaagtagaagagaatgggcatgttcctgcccttgaaacggaagcccagccacaaaaggagccacatactgaaccggaagtggcagatttgcatggacaattggaaaaatcggtcacatcttatgccacacctgaagggactccaatgagccgaacgaccaccattccggagtctcatgggacaccgtcaagtgaggtctctgttaacaccaaaaggagcaggagcaacaagcccaagtcccacgcgagcaagaggtcgctggctagtccaggcagcgactcagttggacggagcagcaccgacaagttttcgaaggaatcaaggcatgccaagagagagagctcctcaagcaaagctgctaaatccgaccagggcgatcaagaacctcgtgtaagcaacagcaacagcaacccgttgcctagctacatgcagttcacagagtccgcaagagccaaggcgtcgtccccgaagatgagcccagacgtgcaggacagcaacgccgcgaggaagaggcactcgttgcccatgaccaacggcaagcacgactcgtcgcctcgcatgcagcggtcgtcgtcatcgcaagctccgcaaggcgtgaaaagcagtggcccttctcctcacagcgcgtctggtggcgcagacaagaggtggcatatctgactgatgatgagtaggccgagcacagcagcatatttcgccgtctaatccgttgattcgtcgttgggaaactgagtatggtttggaagacgggcagcttttgccgcttgatacgtgtacatttgtcgcttctcattggttgtgttatgtgactgatagtggtttgtgtgtgccccctttgacttgtaatgcaacagtggcatcaggagtgtgtggattggtctgttgtatttggcgacattgaagtttctgttggtgtggatgctactacgcctctcatttctttttgaaaggggtttgctt

SEQ ID NO: 23793 - DNA, 1036 bp, Zea Mays
atcagcattatgatgagcttgatggttcagtcatggtgtggagacctgccttctattactaacataatgatcccggacttgccttgccaaaatcttagggacggaccgggagctgctggagcacttggagggggaggcgaggccggacacgcggaagctccaccccctcgtcgacgagttcatccccaccatcgacgacgagaacgacatctgctacacgcacccggagaggctccccgggcgtacacgatggggacgaggaaacggcggaaggtgcacaacgttgacgacggcggcgagacgcggtggcacaagacgggcaagaccaggccggtgctgtccaacggcaggccccatgggtacaagaagttcctggtgctctacacaaactacggtaagcagcgcaagcccaagaagaccaactgggtgatgcaccagtaccacctcggctccgacgaggaggagcgcgacggcgagctcgtcgtctccaaggtcttcttccagacgcatcctaggcagtgcggttacaccatggccagggagtccgccgttgttgtccctgccgccgccgcagtcaccggcagcagcaacgcgtttattgccggccatcaccagagtggcggtggtggtagtagcgtcctcagagaagcaaacggcggagctgatcagctctacagcccaggagcaatgatggggtatgaccagggggcctggtaacagggcacctcctgcccctgctgtgcctccccacttcatgcctaactttgctgtccatgcagcaagggctagctttgccccttgaaccgagaattcaggacaagatacaaacctatcaaatttgccacatataaataggcatttaggagcatgtgcaaactcccaggacctgaacacaattcactacttgtgctgggattgtataaaaaatgtcatgttcttgccctctaacttcacgttcatttacaagctcctcccttttttccatgcaacaatgcgataagaccgaattttttgtattttagccatttttcggaaa

SEQ ID NO: 23794 - DNA, 1074 bp, Zea Mays
atcagcattatgatgagcttgatggttcagtcatggtgtggagacctgccttctattactaacataatgatcccggacttgccttgccaaaatcttagggacggaccgggagctgctggagcacttggagggggaggcgaggccggacacgcggaagctccaccccctcgtcgacgagttcatccccaccatcgacgacgagaacgacatctgctacacgcacccggagaggctccccggacgggcttgtccgacacttcttccaccgtccatccagggcgtacacgatggggacgaggaaacggcggaaggtgcacaacgttgacgacggcggcgagacgcggtggcacaagacgggcaagaccaggccggtgctgtccaacggcaggccccatgggtacaagaagttcctggtgctctacacaaactacggtaagcagcgcaagcccaagaagaccaactgggtgatgcaccagtaccacctcggctccgacgaggaggagcgcgacggcgagctcgtcgtctccaaggtcttcttccagacgcatcctaggcagtgcggttacaccatggccagggagtccgccgttgttgtccctgccgccgccgcagtcaccggcagcagcaacgcgtttattgccggccatcaccagagtggcggtggtggtagtagcgtcctcagagaagcaaacggcggagctgatcagctctacagcccaggagcaatgatggggtatgaccagggggcctggtaacagggcacctcctgcccctgctgtgcctccccacttcatgcctaactttgctgtccatgcagcaagggctagctttgccccttgaaccgagaattcaggacaagatacaaacctatcaaatttgccacatataaataggcatttaggagcatgtgcaaactcccaggacctgaacacaattcactacttgtgctgggattgtataaaaaatgtcatgttcttgccctctaacttcacgttcatttacaagctcctcccttttttccatgcaacaatgcgataagaccgaattttttgtattttagccatttttcggaaa

SEQ ID NO: 23795 - DNA, 2560 bp, Zea Mays
aaggcctcgggcgagccggagatgtgtccgccgttaaaggggggcctcgggcgagacggaaatcccccggggtcggctgcccttgcccgaggctaggctcgggcgaggcgtgatcgagtcactcgtgtggactgatccctgacttaatcgcacccatcagccctttgcagctttatgctgatgggggttaccagctgagaattaggcgtcttgagggtacccctaattatggtccccgacaatgttcattgattagagttgagcaatagcataaagctaaacaataataatccaacccaaataggtaaacaaggacatggataacaaaaaactagtcaatccttaggcataaatgtgaaatgcgggaggtgaattaaataatgtataggaccgtgataggtcaagggacacttgcccccaccaaccagctgctgctcagggacttctcctgcgagttcctcaggctcctgaacctgatcgttctctatgcgagcgcaaacatacatacatccacacatttaatacaaaacaacagtacaccatacaatagaatgcagtaaataaacagacgtttcacgcggggctcgcaactatggttaagagagagaggaaaagacagtcgagaaacgatcacgttacattattataaattaaaccactcgcttaatagaaggacattgatttggacactacgtttagcataaagtaaagtcaagtttcatgtttaatcattataagcagaaaagaggactatctgcttgtggaaattggagatgctcagattgactacagcttatttttgacatcaatgcaccatgctggtgatatgagtaacacattgatgagtgtcatcgtcgaatacttcaacagtatttctggggccctctttgacactgtttctagaccctctaccatttctaaatatgatatctgtcctttcttgttggagaaagttaaaaagggttgcaactttaaagttaaagatagtttactgaagactcttgaggaaacccagaaaagagatatgattatgctcccgattctggatggcagtcattggcaacttgtatgtataaactttctccatagggaaattaactattttgactctttgggatcagatttctgcgctgcagaatcattggtgaggcctgactctttgggatcagatttttgcgctgcagaatcattgatgaggccttttacatcctgttataagtatagttgctttgcttaggacatgctaacacttgccaagtttcatcctgttgatattgcagcttgctaatttcatcgaattactgaagatacataaatgcatgaaatttgatgttaattcttttgaaaaggtcagagtaaaatgtcctaaacagtccaacaagaatggatgcttcactagtcacacttttcactagtaacactttatttcaagttccaaaatgtcatctgattacattttttattgacaagcattgattgtggttttttcacaatactgtacatgattgcatggaatggaaaacatttgcggttagatgataagaatgaaactcacacatatgctgatcaaatctaagcaaaatagtgctgatccatgtaatgtggttaaaaaactagatgtgaatataaagaaatatagcgttagttcccgaaaggtgatcacaagtaagaatttgacgatgctgatgggactaatagatcaagagattgaagagattaatgcaaaaaagagaaagcgaagtggacatccagcaggacaaccagaactgaaggacgatgacggtcaactaagggcaaacgcagtcaaggctcgcgacgctgaattgggttgtgaaatgtaaagctacggcgactatagcactttgaaaccgctgttgctccccctgacagagaaagcagtttgaatttgacgatgctgtggctacctatagcttcaaagctagacaagactaattcgtccttcagtagagctgattgacataaacgtagttgcagctcttgcgcgttctgctttttcatgttgctctttcgcgttcgagttccatgcctgccacctccatcaatggcatgattcgtttagcttctgttacagagcctgaaacgattacaccatttgctatgctatcccgggccacggctggaatcagaggatcgactcttatcatcaacatgcctggcaacccaaatgctgtggcggagtgcctggaagcactccttccggcgctcaaacacgccctgaagcagatcaagggtgacaagagggagaagcaccctcgccacactccacatgccgcagtggcgcctgtggaccagtgggagcggagcttccgagccgcatcaattggtagttgtcgtgggcgctggtgtgatctagtactaacttcaacagcttattcatccttatatctatattcagacttcactctataaacagtataaaacagtgcaaaaataatgttttaggtaaactatagataaattgctgaacacggtttaaaagtcactaatcaactgagatacccaacaagatggaaccaaatacgagactgtagcagctgtg

SEQ ID NO: 23796 - DNA, 2323 bp, Zea Mays
aaggcctcgggcgagccggagatgtgtccgccgttaaaggggggcctcgggcgagacggaaatcccccggggtcggctgcccttgcccgaggctaggctcgggcgaggcgtgatcgagtcactcgtgtggactgatccctgacttaatcgcacccatcagccctttgcagctttatgctgatgggggttaccagctgagaattaggcgtcttgagggtacccctaattatggtccccgacaatgttcattgattagagttgagcaatagcataaagctaaacaataataatccaacccaaataggtaaacaaggacatggataacaaaaaactagtcaatccttaggcataaatgtgaaatgcgggaggtgaattaaataatgtataggaccgtgataggtcaagggacacttgcccccaccaaccagctgctgctcagggacttctcctgcgagttcctcaggctcctgaacctgatcgttctctatgcgagcgcaaacatacatacatccacacatttaatacaaaacaacagtacaccatacaatagaatgcagtaaataaacagacgtttcacgcggggctcgcaactatggttaagagagagaggaaaagacagtcgagaaacgatcacgttacattattataaattaaaccactcgcttaatagaaggacattgatttggacactacgtttagcataaagtaaagtcaagtttcatgtttaatcattataagcagaaaagaggactatctgcttgtggaaattggagatgctcagattgactacagcttatttttgacatcaatgcaccatgctggtgatatgagtaacacattgatgagtgtcatcgtcgaatacttcaacagtatttctggggccctctttgacactgtttctagaccctctaccatttctaaatatgatatctgtcctttcttgttggagaaagttaaaaagggttgcaactttaaagttaaagatagtttactgaagactcttgaggaaacccagaaaagagatatgattatgctcccgattctggatggcagtcattggcaacttgtatgtataaactttctccatagggaaattaactattttgactctttgggatcagatttctgcgctgcagaatcattggtgaggcctgactctttgggatcagatttttgcgctgcagaatcattgatgaggccttttacatcctgttataagtatagttgctttgcttaggacatgctaacacttgccaagtttcatcctgttgatattgcagcttgctaatttcatcgaattactgaagatacataaatgcatgaaatttgatgttaattcttttgaaaaggtcagagtaaaatgtcctaaacagtccaacaagaatggatgcttcactagtcacacttttcactagtaacactttatttcaagttccaaaatgtcatctgattacattttttattgacaagcattgattgtggttttttcacaatactgtacatgattgcatggaatggaaaacatttgcggttagatgataagatcaaagctagcgaaattgttgcatgcagaatgaaactcacacatatgctgatcaaatctaagcaaaatagtgctgatccatgtaatgtggttaaaaaactagatgtgaatataaagaaatatagcgttagttcccgaaaggtgatcacaagtaagaatttgacgatgctgatgggactaatagatcaagagattgaagagattaatgcaaaaaagagaaagcgaagtggacatccagcaggacaaccagaactgaaggacgatgacggtcaactaagggcaaacgcagtcaaggctcgcgacgctgaattgggttgtgaaatattacaccatttgctatgctatcccgggccacggctggaatcagaggatcgactcttatcatcaacatgcctggcaacccaaatgctgtggcggagtgcctggaagcactccttccggcgctcaaacacgccctgaagcagatcaagggtgacaagagggagaagcaccctcgccacactccacatgccgcagtggcgcctgtggaccagtgggagcggagcttccgagccgcatcaattggtagttgtcgtgggcgctggtgtgatctagtactaacttcaacagcttattcatccttatatctatattcagacttcactctataaacagtataaaacagtgcaaaaataatgttttaggtaaactatagataaattgctgaacacggtttaaaagtcactaatcaactgagatacccaacaagatggaaccaaatacgagactgtagcagctgtg

SEQ ID NO: 23797 - DNA, 2263 bp, Zea Mays
aaggcctcgggcgagccggagatgtgtccgccgttaaaggggggcctcgggcgagacggaaatcccccggggtcggctgcccttgcccgaggctaggctcgggcgaggcgtgatcgagtcactcgtgtggactgatccctgacttaatcgcacccatcagccctttgcagctttatgctgatgggggttaccagctgagaattaggcgtcttgagggtacccctaattatggtccccgacaatgttcattgattagagttgagcaatagcataaagctaaacaataataatccaacccaaataggtaaacaaggacatggataacaaaaaactagtcaatccttaggcataaatgtgaaatgcgggaggtgaattaaataatgtataggaccgtgataggtcaagggacacttgcccccaccaaccagctgctgctcagggacttctcctgcgagttcctcaggctcctgaacctgatcgttctctatgcgagcgcaaacatacatacatccacacatttaatacaaaacaacagtacaccatacaatagaatgcagtaaataaacagacgtttcacgcggggctcgcaactatggttaagagagagaggaaaagacagtcgagaaacgatcacgttacattattataaattaaaccactcgcttaatagaaggacattgatttggacactacgtttagcataaagtaaagtcaagtttcatgtttaatcattataagcagaaaagaggactatctgcttgtggaaattggagatgctcagattgactacagcttatttttgacatcaatgcaccatgctggtgatatgagtaacacattgatgagtgtcatcgtcgaatacttcaacagtatttctggggccctctttgacactgtttctagaccctctaccatttctaaatatgatatctgtcctttcttgttggagaaagttaaaaagggttgcaactttaaagttaaagatagtttactgaagactcttgaggaaacccagaaaagagatatgattatgctcccgattctggatggcagtcattggcaacttgtatgtataaactttctccatagggaaattaactattttgactctttgggatcagatttctgcgctgcagaatcattgcattgattgtggttttttcacaatactgtacatgattgcatggaatggaaaacatttgcggttagatgataagatcaaagctagcgaaattgttgcatgcagaatgaaactcacacatatgctgatcaaatctaagcaaaatagtgctgatccatgtaatgtggttaaaaaactagatgtgaatataaagaaatatagcgttagttcccgaaaggtgatcacaagtaagaatttgacgatgctgatgggactaatagatcaagagattgaagagattaatgcaaaaaagagaaagcgaagtggacatccagcaggacaaccagaactgaaggacgatgacggtcaactaagggcaaacgcagtcaaggctcgcgacgctgaattgggttgtgaaatgtaaagctacggcgactatagcactttgaaaccgctgttgctccccctgacagagaaagcagtttgaatttgacgatgctgtggctacctatagcttcaaagctagacaagactaattcgtccttcagtagagctgattgacataaacgtagttgcagctcttgcgcgttctgctttttcatgttgctctttcgcgttcgagttccatgcctgccacctccatcaatggcatgattcgtttagcttctgttacagagcctgaaacgattacaccatttgctatgctatcccgggccacggctggaatcagaggatcgactcttatcatcaacatgcctggcaacccaaatgctgtggcggagtgcctggaagcactccttccggcgctcaaacacgccctgaagcagatcaagggtgacaagagggagaagcaccctcgccacactccacatgccgcagtggcgcctgtggaccagtgggagcggagcttccgagccgcatcaattggtagttgtcgtgggcgctggtgtgatctagtactaacttcaacagcttattcatccttatatctatattcagacttcactctataaacagtataaaacagtgcaaaaataatgttttaggtaaactatagataaattgctgaacacggtttaaaagtcactaatcaactgagatacccaacaagatggaaccaaatacgagactgtagcagctgtg

SEQ ID NO: 23798 - DNA, 2346 bp, Zea Mays
aaggcctcgggcgagccggagatgtgtccgccgttaaaggggggcctcgggcgagacggaaatcccccggggtcggctgcccttgcccgaggctaggctcgggcgaggcgtgatcgagtcactcgtgtggactgatccctgacttaatcgcacccatcagccctttgcagctttatgctgatgggggttaccagctgagaattaggcgtcttgagggtacccctaattatggtccccgacaatgttcattgattagagttgagcaatagcataaagctaaacaataataatccaacccaaataggtaaacaaggacatggataacaaaaaactagtcaatccttaggcataaatgtgaaatgcgggaggtgaattaaataatgtataggaccgtgataggtcaagggacacttgcccccaccaaccagctgctgctcagggacttctcctgcgagttcctcaggctcctgaacctgatcgttctctatgcgagcgcaaacatacatacatccacacatttaatacaaaacaacagtacaccatacaatagaatgcagtaaataaacagacgtttcacgcggggctcgcaactatggttaagagagagaggaaaagacagtcgagaaacgatcacgttacattattataaattaaaccactcgcttaatagaaggacattgatttggacactacgtttagcataaagtaaagtcaagtttcatgtttaatcattataagcagaaaagaggactatctgcttgtggaaattggagatgctcagattgactacagcttatttttgacatcaatgcaccatgctggtgatatgagtaacacattgatgagtgtcatcgtcgaatacttcaacagtatttctggggccctctttgacactgtttctagaccctctaccatttctaaatatgatatctgtcctttcttgttggagaaagttaaaaagggttgcaactttaaagttaaagatagtttactgaagactcttgaggaaacccagaaaagagatatgattatgctcccgattctggatggcagtcattggcaacttcttgctaatttcatcgaattactgaagatacataaatgcatgaaatttgatgttaattcttttgaaaaggtcagagtaaaatgtcctaaacagtccaacaagaatggatgcttcactagtcacacttttcactagtaacactttatttcaagttccaaaatgtcatctgattacattttttattgacaagcattgattgtggttttttcacaatactgtacatgattgcatggaatggaaaacatttgcggttagatgataagaatgaaactcacacatatgctgatcaaatctaagcaaaatagtgctgatccatgtaatgtggttaaaaaactagatgtgaatataaagaaatatagcgttagttcccgaaaggtgatcacaagtaagaatttgacgatgctgatgggactaatagatcaagagattgaagagattaatgcaaaaaagagaaagcgaagtggacatccagcaggacaaccagaactgaaggacgatgacggtcaactaagggcaaacgcagtcaaggctcgcgacgctgaattgggttgtgaaatgtaaagctacggcgactatagcactttgaaaccgctgttgctccccctgacagagaaagcagtttgaatttgacgatgctgtggctacctatagcttcaaagctagacaagactaattcgtccttcagtagagctgattgacataaacgtagttgcagctcttgcgcgttctgctttttcatgttgctctttcgcgttcgagttccatgcctgccacctccatcaatggcatgattcgtttagcttctgttacagagcctgaaacgattacaccatttgctatgctatcccgggccacggctggaatcagaggatcgactcttatcatcaacatgcctggcaacccaaatgctgtggcggagtgcctggaagcactccttccggcgctcaaacacgccctgaagcagatcaagggtgacaagagggagaagcaccctcgccacactccacatgccgcagtggcgcctgtggaccagtgggagcggagcttccgagccgcatcaattggtagttgtcgtgggcgctggtgtgatctagtactaacttcaacagcttattcatccttatatctatattcagacttcactctataaacagtataaaacagtgcaaaaataatgttttaggtaaactatagataaattgctgaacacggtttaaaagtcactaatcaactgagatacccaacaagatggaaccaaatacgagactgtagcagctgtg

SEQ ID NO: 23799 - DNA, 2279 bp, Zea Mays
aaggcctcgggcgagccggagatgtgtccgccgttaaaggggggcctcgggcgagacggaaatcccccggggtcggctgcccttgcccgaggctaggctcgggcgaggcgtgatcgagtcactcgtgtggactgatccctgacttaatcgcacccatcagccctttgcagctttatgctgatgggggttaccagctgagaattaggcgtcttgagggtacccctaattatggtccccgacaatgttcattgattagagttgagcaatagcataaagctaaacaataataatccaacccaaataggtaaacaaggacatggataacaaaaaactagtcaatccttaggcataaatgtgaaatgcgggaggtgaattaaataatgtataggaccgtgataggtcaagggacacttgcccccaccaaccagctgctgctcagggacttctcctgcgagttcctcaggctcctgaacctgatcgttctctatgcgagcgcaaacatacatacatccacacatttaatacaaaacaacagtacaccatacaatagaatgcagtaaataaacagacgtttcacgcggggctcgcaactatggttaagagagagaggaaaagacagtcgagaaacgatcacgttacattattataaattaaaccactcgcttaatagaaggacattgatttggacactacgtttagcataaagtaaagtcaagtttcatgtttaatcattataagcagaaaagaggactatctgcttgtggaaattggagatgctcagattgactacagcttatttttgacatcaatgcaccatgctggtgatatgagtaacacattgatgagtgtcatcgtcgaatacttcaacagtatttctggggccctctttgacactgtttctagaccctctaccatttctaaatatgatatctgtcctttcttgttggagaaagttaaaaagggttgcaactttaaagttaaagatagtttactgaagactcttgaggaaacccagaaaagagatatgattatgctcccgattctggatggcagtcattggcaacttgtatgtataaactttctccatagggaaattaactattttgactctttgggatcagatttctgcgctgcagaatcattgatcaaagctagcgaaattgttgcatgcagaatgaaactcacacatatgctgatcaaatctaagcaaaatagtgctgatccatgtaatgtggttaaaaaactagatgtgaatataaaggtaaaatcctgtcagtttcacagatagtgtttttgtggaaatataggagttcttgatgatttcatgtcttgttggttttgattacacagaaatatagcgttagttcccgaaaggtgatcacaagtaagaatttgacgatgctgatgggactaatagatcaagagattgaagagattaatgcaaaaaagagaaagcgaagtggacatccagcaggacaaccagaactgaaggacgatgacggtcaactaagggcaaacgcagtcaaggctcgcgacgctgaattgggttgtgaaatgtaaagctacggcgactatagcactttgaaaccgctgttgctccccctgacagagaaagcagtttgaatttgacgatgctgtggctacctatagcttcaaagctagacaagactaattcgtccttcagtagagctgattgacataaacgtagttgcagctcttgcgcgttctgctttttcatgttgctctttcgcgttcgagttccatgcctgccacctccatcaatggcatgattcgtttagcttctgttacagagcctgaaacgattacaccatttgctatgctatcccgggccacggctggaatcagaggatcgactcttatcatcaacatgcctggcaacccaaatgctgtggcggagtgcctggaagcactccttccggcgctcaaacacgccctgaagcagatcaagggtgacaagagggagaagcaccctcgccacactccacatgccgcagtggcgcctgtggaccagtgggagcggagcttccgagccgcatcaattggtagttgtcgtgggcgctggtgtgatctagtactaacttcaacagcttattcatccttatatctatattcagacttcactctataaacagtataaaacagtgcaaaaataatgttttaggtaaactatagataaattgctgaacacggtttaaaagtcactaatcaactgagatacccaacaagatggaaccaaatacgagactgtagcagctgtg

SEQ ID NO: 23800 - DNA, 2194 bp, Zea Mays
aaggcctcgggcgagccggagatgtgtccgccgttaaaggggggcctcgggcgagacggaaatcccccggggtcggctgcccttgcccgaggctaggctcgggcgaggcgtgatcgagtcactcgtgtggactgatccctgacttaatcgcacccatcagccctttgcagctttatgctgatgggggttaccagctgagaattaggcgtcttgagggtacccctaattatggtccccgacaatgttcattgattagagttgagcaatagcataaagctaaacaataataatccaacccaaataggtaaacaaggacatggataacaaaaaactagtcaatccttaggcataaatgtgaaatgcgggaggtgaattaaataatgtataggaccgtgataggtcaagggacacttgcccccaccaaccagctgctgctcagggacttctcctgcgagttcctcaggctcctgaacctgatcgttctctatgcgagcgcaaacatacatacatccacacatttaatacaaaacaacagtacaccatacaatagaatgcagtaaataaacagacgtttcacgcggggctcgcaactatggttaagagagagaggaaaagacagtcgagaaacgatcacgttacattattataaattaaaccactcgcttaatagaaggacattgatttggacactacgtttagcataaagtaaagtcaagtttcatgtttaatcattataagcagaaaagaggactatctgcttgtggaaattggagatgctcagattgactacagcttatttttgacatcaatgcaccatgctggtgatatgagtaacacattgatgagtgtcatcgtcgaatacttcaacagtatttctggggccctctttgacactgtttctagaccctctaccatttctaaatatgatatctgtcctttcttgttggagaaagttaaaaagggttgcaactttaaagttaaagatagtttactgaagactcttgaggaaacccagaaaagagatatgattatgctcccgattctggatggcagtcattggcaacttgtatgtataaactttctccatagggaaattaactattttgactctttgggatcagatttctgcgctgcagaatcattgaaatatagcgttagttcccgaaaggtgatcacaagtaagaatttgacgatgctgatgggactaatagatcaagagattgaagagattaatgcaaaaaagagaaagcgaagtggacatccagcaggacaaccagaactgaaggacgatgacggtcaactaagggcaaacgcagtcaaggctcgcgacgctgaattgggttgtgaaatgtaaagctacggcgactatagcactttgaaaccgctgttgctccccctgacagagaaagcagtttgaatttgacgatgctgtggctacctatagcttcaaagctagacaagactaattcgtccttcagtagagctgattgacataaacgtagttgcagctcttgcgcgttctgctttttcatgttgctctttcgcgttcgagttccatgcctgccacctccatcaatggcatgattcgtttagcttctgttacagagcctgaaacggtccgaaatccgcgccacagcttgcatagtgcgacgcgccgttcttctcggcgtcgcccaccacgtgcagtaatgagatcttatcatctgtacttgacctgaactgttttttctggcacagattacaccatttgctatgctatcccgggccacggctggaatcagaggatcgactcttatcatcaacatgcctggcaacccaaatgctgtggcggagtgcctggaagcactccttccggcgctcaaacacgccctgaagcagatcaagggtgacaagagggagaagcaccctcgccacactccacatgccgcagtggcgcctgtggaccagtgggagcggagcttccgagccgcatcaattggtagttgtcgtgggcgctggtgtgatctagtactaacttcaacagcttattcatccttatatctatattcagacttcactctataaacagtataaaacagtgcaaaaataatgttttaggtaaactatagataaattgctgaacacggtttaaaagtcactaatcaactgagatacccaacaagatggaaccaaatacgagactgtagcagctgtg

SEQ ID NO: 23801 - DNA, 2193 bp, Zea Mays
cttagcgaaggcaaggcctcgggcgagccggagatgtgtccgccgttaaaggggggcctcgggcgagacggaaatcccccggggtcggctgcccttgcccgaggctaggctcgggcgaggcgtgatcgagtcactcgtgtggactgatccctgacttaatcgcacccatcagccctttgcagctttatgctgatgggggttaccagctgagaattaggcgtcttgagggtacccctaattatggtccccgacaatgttcattgattagagttgagcaatagcataaagctaaacaataataatccaacccaaataggtaaacaaggacatggataacaaaaaactagtcaatccttaggcataaatgtgaaatgcgggaggtgaattaaataatgtataggaccgtgataggtcaagggacacttgcccccaccaaccagctgctgctcagggacttctcctgcgagttcctcaggctcctgaacctgatcgttctctatgcgagcgcaaacatacatacatccacacatttaatacaaaacaacagtacaccatacaatagaatgcagtaaataaacagacgtttcacgcggggctcgcaactatggttaagagagagaggaaaagacagtcgagaaacgatcacgttacattattataaattaaaccactcgcttaatagaaggacattgatttggacactacgtttagcataaagtaaagtcaagtttcatgtttaatcattataagcagaaaagaggactatctgcttgtggaaattggagatgctcagattgactacagcttatttttgacatcaatgcaccatgctggtgatatgagtaacacattgatgagtgtcatcgtcgaatacttcaacagtatttctggggccctctttgacactgtttctagaccctctaccatttctaaatatgatatctgtcctttcttgttggagaaagttaaaaagggttgcaactttaaagttaaagatagtttactgaagactcttgaggaaacccagaaaagagatatgattatgctcccgattctggatggcagtcattggcaacttcttgctaatttcatcgaattactgaagatacataaatgcatgaaatttgatgttaattcttttgaaaagatcaaagctagcgaaattgttgcatgcagaatgaaactcacacatatgctgatcaaatctaagcaaaatagtgctgatccatgtaatgtggttaaaaaactagatgtgaatataaagaaatatagcgttagttcccgaaaggtgatcacaagtaagaatttgacgatgctgatgggactaatagatcaagagattgaagagattaatgcaaaaaagagaaagcgaagtggacatccagcaggacaaccagaactgaaggacgatgacggtcaactaagggcaaacgcagtcaaggctcgcgacgctgaattgggttgtgaaatgtaaagctacggcgactatagcactttgaaaccgctgttgctccccctgacagagaaagcagtttgaatttgacgatgctgtggctacctatagcttcaaagctagacaagactaattcgtccttcagtagagctgattgacataaacgtagttgcagctcttgcgcgttctgctttttcatgttgctctttcgcgttcgagttccatgcctgccacctccatcaatggcatgattcgtttagcttctgttacagagcctgaaacgattacaccatttgctatgctatcccgggccacggctggaatcagaggatcgactcttatcatcaacatgcctggcaacccaaatgctgtggcggagtgcctggaagcactccttccggcgctcaaacacgccctgaagcagatcaagggtgacaagagggagaagcaccctcgccacactccacatgccgcagtggcgcctgtggaccagtgggagcggagcttccgagccgcatcaattggtagttgtcgtgggcgctggtgtgatctagtactaacttcaacagcttattcatccttatatctatattcagacttcactctataaacagtataaaacagtgcaaaaataatgttttaggtaaactatagataaattgctgaacacggtttaaaagtcactaatcaactgagatacccaacaagatggaaccaaatacgagactgtagcagctgtg

SEQ ID NO: 23802 - DNA, 2726 bp, Zea Mays
gaagtgacggcggtcacttcggctctgccgggaggcgcgcgtcaggataaaggtgtcaggccacctttgcgttaaatgcccctgcgactcggtcggtcggtgcggcgatttagtcagggttgcttcttagcgaaggcaaggcctcgggcgagccggagatgtgtccgccgttaaaggggggcctcgggcgagacggaaatcccccggggtcggctgcccttgcccgaggctaggctcgggcgaggcgtgatcgagtcactcgtgtggactgatccctgacttaatcgcacccatcagccctttgcagctttatgctgatgggggttaccagctgagaattaggcgtcttgagggtacccctaattatggtccccgacaatgttcattgattagagttgagcaatagcataaagctaaacaataataatccaacccaaataggtaaacaaggacatggataacaaaaaactagtcaatccttaggcataaatgtgaaatgcgggaggtgaattaaataatgtataggaccgtgataggtcaagggacacttgcccccaccaaccagctgctgctcagggacttctcctgcgagttcctcaggctcctgaacctgatcgttctctatgcgagcgcaaacatacatacatccacacatttaatacaaaacaacagtacaccatacaatagaatgcagtaaataaacagacgtttcacgcggggctcgcaactatggttaagagagagaggaaaagacagtcgagaaacgatcacgttacattattataaattaaaccactcgcttaatagaaggacattgatttggacactacgtttagcataaagtaaagtcaagtttcatgtttaatcattataagcagaaaagaggactatctgcttgtggaaattggagatgctcagattgactacagcttatttttgacatcaatgcaccatgctggtgatatgagtaacacattgatgagtgtcatcgtcgaatacttcaacagtatttctggggccctctttgacactgtttctagaccctctaccatttctaaatatgatatctgtcctttcttgttggagaaagttaaaaagggttgcaactttaaagttaaagatagtttactgaagactcttgaggaaacccagaaaagagatatgattatgctcccgattctggatggcagtcattggcaacttgtatgtataaactttctccatagggaaattaactattttgactctttgggatcagatttctgcgctgcagaatcattggtgaggcctgactctttgggatcagatttttgcgctgcagaatcattgatgaggccttttacatcctgttataagtatagttgctttgcttaggacatgctaacacttgccaagtttcatcctgttgatattgcagcttgctaatttcatcgaattactgaagatacataaatgcatgaaatttgatgttaattcttttgaaaaggtcagagtaaaatgtcctaaacagtccaacaagaatggatgcttcactagtcacacttttcactagtaacactttatttcaagttccaaaatgtcatctgattacattttttattgacaagcattgattgtggttttttcacaatactgtacatgattgcatggaatggaaaacatttgcggttagatgataagatcaaagctagcgaaattgttgcatgcagaatgaaactcacacatatgctgatcaaatctaagcaaaatagtgctgatccatgtaatgtggttaaaaaactagatgtgaatataaagaaatatagcgttagttcccgaaaggtgatcacaagtaagaatttgacgatgctgatgggactaatagatcaagagattgaagagattaatgcaaaaaagagaaagcgaagtggacatccagcaggacaaccagaactgaaggacgatgacggtcaactaagggcaaacgcagtcaaggctcgcgacgctgaattgggttgtgaaatgtaaagctacggcgactatagcactttgaaaccgctgttgctccccctgacagagaaagcagtttgaatttgacgatgctgtggctacctatagcttcaaagctagacaagactaattcgtccttcagtagagctgattgacataaacgtagttgcagctcttgcgcgttctgctttttcatgttgctctttcgcgttcgagttccatgcctgccacctccatcaatggcatgattcgtttagcttctgttacagagcctgaaacgattacaccatttgctatgctatcccgggccacggctggaatcagaggatcgactcttatcatcaacatgcctggcaacccaaatgctgtggcggagtgcctggaagcactccttccggcgctcaaacacgccctgaagcagatcaagggtgacaagagggagaagcaccctcgccacactccacatgccgcagtggcgcctgtggaccagtgggagcggagcttccgagccgcatcaattggtagttgtcgtgggcgctggtgtgatctagtactaacttcaacagcttattcatccttatatctatattcagacttcactctataaacagtataaaacagtgcaaaaataatgttttaggtaaactatagataaattgctgaacacggtttaaaagtcactaatcaactgagatacccaacaagatggaaccaaatacgagactgtagcagctgtg

SEQ ID NO: 23803 - DNA, 406 bp, Zea Mays
cggcgcccctgctccgacggccgcgcccctgcgccgcccctcccccggcggcaatttttgttgctgagagcactggccatcaggctagtagccgcctccttagtatgaaatctgttaatgctatgctggaagtaccctccactggacaaatattggcagctgggacatctattgaagccatacttatttcagacataatatcttctttagataagctgcctgctccctcaaatccgcacccatctcgttttggatcttctgcagaaagtatcttcacagatgtatctcagattgcatctccacaggatgctgaagttaaagttgcaattctgactttaagtgacactgtttcatcaggcgctggccctgataggagtggtccaagagctgtatctgtagtgaattc

SEQ ID NO: 23804 - DNA, 2777 bp, Zea Mays
gccagacaatgcccaaatggtgtaattgtaaatttctgaatgccatgtattgcttaagaaactgaaacaaatgctatataaacatccttcaaaattagctgtatgtttgtgttctgtttgcatgtgctgttggtaagctgtactatgtgcaaacataacctgtttgggatccagacgtattcctgctggtaagctggttcctgctgtgtcccttttgctgtagaaggcaaggtacgtggtgccttaccttggctaagtcactgaatctggatccgtgatttggtaccgtaggctgagctgcctgacaagtggggtccacgtgacagtacccgtgcccccgattctgctcctggctgtgctcgcccaggcccagcaccgctcagtcagcgccgccgcaaccccgccccgaccctagtccaacgttcgtgccgcttgctgggccgccgacgcgccaggccgctggagcagctcgcttgccccccagcccccacgccgtgcccctcgctcagcctgcgctgcctcgcactcctcgcgccgctagcccggccggagccgctcttcttccaccgcgcttgccagctgccgccgctcctctaatggtgacgaggtggagccagaagagcccgggcctcaagatcctgtggatctggaccctgggcaccgccgcaattgtggtcggcggtatcgtccggatgcgggtaaacgatgtgcagaagatccttcgggaagaagaggaagccgccgctaccgccacggccacgtcgccccccagcgagcgagtcctgaaagacgaagagtagaacaggaagtggagagttttgcgccatttgagctggggggtgcatctgtatcgggcccataatgtagtatctccattttaaaaagcggctgttcgtattctcgctcgtatttgcaacttgtgggcggcgggatttgctgcctcccgccaagacaagaaagccgacgacctccgggcggcgcagcagcttctgggcggcgagatttgctgcaagcttgcttcccgccacggcgtccagccatctcaagattcgcggctccgctgacttcgcagcgctctttcaaacgaggtcccctgcaggagtatgtggttcaaaacacgacgtcgtcgttgtgatgtgcatgctcgcatgtttgctgagcacgaactcctccagttaacaacaattgctcggatggctgaggaagaagaaaatatgcctcatcgtggctctgttgtgggacgccgaactataccaagggatcgttacagtggttactttcgtttgatgcaagactacttcattcaacagccagtttatggtgacaatttatttcgtcgacggttccgaatgtcaaaaaatatgttcaatgatatttgtgaagctgtggcggcagcaaataggtacttcaggttgacacacaatgccgctgggcaggccgggttctcaactattcaaaaggttactgctgctttgcgaatgcttgcatacggaggacctgccgatagtttggatgagtactttcgcatgggtgagagcacgatcatcgaaacagtaaataaattcactcgcaccattgttgtaatctatggtgaggagtaccttaggcagcccaatacagaggatattgccaggcttcttcgaaaggctgaagaaagaggttttccaggaatgctcggaagcatcgattgtatgcattgggagtgggagaagtgccccactgcgtggcacggtcagtatcgaggtcaccacaagaaacccacaattatactagaagcggtggccagtcatgatctttgggtttggcatgcattttttgggatgccaggttcttgcaacgatataaacgtcttgcatcgttccccggttttcgataacctgtctagcggccatgctcctgaggttaatttcacagttaatggacgggaatacaatatgggttactacctagctgacggtatatatcctccatgggctacattgatcactcccattccagccgctgttagtaataagcagaatcggttcaatgagaaacagcaggagtaccgcaaagacgtcgagcgtacttttggtgtcctacaagcaaagtatgccatcatcaaaggaccttcaagaatgtgggatcccggggatatgaagtacatagttcaatgtgtcatcatactgcacaatatgggtatcaagtatgagagaggaatggagcagttggagatcgaggattatgagggagcatccagaccatcattggatcctaataggaatgtgtcggaggttcagcaactcatcaatgcccaccgacagatccaaagccgaacaaccaatgagcaattgaagaatgaccttgttgatcatatatggaacttgcatggctcatcaactgaaatcttgtataaaagtttggctcatcaaatacctagctgattgacgattccctgatttatcaacttagggcaatcttgtataaaagtttggctcatcaactacctagctgatcgacgattctctaattttattttatagttgatcctatttgtatacacgacatcttaatttcatacttaacagctcatccactgaactaaaatagatacacaacatcttaatttcatacttaacagctcatccactaaactgaaacaaatacaagacatcttgatttcataccgaacatctgatccactgaactgaaatagatacaactcacacagttaacactgttagaacatatcttaatttgtccatctaaactgatacatagataaatactaatatttc

SEQ ID NO: 23805 - DNA, 4520 bp, Zea Mays
gccagacaatgcccaaatggtgtaattgtaaatttctgaatgccatgtattgcttaagaaactgaaacaaatgctatataaacatccttcaaaattagctgtatgtttgtgttctgtttgcatgtgctgttggtaagctgtactatgtgcaaacataacctgtttgggatccagacgtattcctgctggtaagctggttcctgctgtgtcccttttgctgtagaaggcaaggtacgtggtgccttaccttggctaagtcactgaatctggatccgtgatttggtaccgtaggctgagctgcctgacaagtggggtccacgtgacagtacccgtgcccccgattctgctcctggctgtgctcgcccaggcccagcaccgctcagtcagcgccgccgcaaccccgccccgaccctagtccaacgttcgtgccgcttgctgggccgccgacgcgccaggccgctggagcagctcgcttgccccccagcccccacgccgtgcccctcgctcagcctgcgctgcctcgcactcctcgcgccgctagcccggccggagccgctcttcttccaccgcgcttgccagctgccgccgctcctctaatggtgacgaggtggagccagaagagcccgggcctcaagatcctgtggatctggaccctgggcaccgccgcaattgtggtcggcggtatcgtccggatgcgggtaaacgatgtgcagaagatccttcgggaagaagaggaagccgccgctaccgccacggccacgtcgccccccagcgagcgagtcctgaaagacgaagagtagaacaggtaaaaaaggttgcccacttcctctcggcggaccgaactgtgtcatgcgcctccgttgtaatgttcagattttgcagtctgcaatacaatagagaaatgctcaattagttgatacaaacaggccccagttgggaactgaagataatctacgatcgcgctacctagcgatttcacgcgttagagagtgtttaattagctgaggatatagtgccatctggtactgatatgcaatatctgagggaagctctatgtttaggtctacatgttttggttagttttgtcagacactggatagttgtgtttcaacagttcactattgtctgaacacaacatgaacatgtgatcttactgaaaatttgggtatgctgctattattgtataaacatgtttaatttcttggtcatacttatgaactctctctctctctctctctctccacacattaggtcaatacagtgacagggctgtactttaggtagtgtagtttcttagtaccactttggtcagatttgttgaggcctgatgttacaggttggacaaatctttgggtggtattaatgtgaccaatgttgttaggatttggatccaatctttttttgcttgataaaattggatagtaggattggattgtagtatcgatatcttagtggatttttcaaactaaatcacggtgttcatgtcacctttggcgtgattatcatgctctgctgagaatctgcttttattaacctttggtgagcagttccaaacaggcccatggcaggattgatgtcgtcttgccttggtaggatcatggtaacagaagcaacgccgatattatgactttagagatctcatgagtttatggactgaaactaggttgggcagtggcatggttaactttattttgctctatatgggctcttcactctaaagcaacatggcaacaatgcatgcacacaatgcaggagcaaataacagctaattatttctggcaaagcctgaggtattgtgacgaggatgcagccccgtagatgtcagtgataagctacacagtttttcctcctctttcagtggatagcagaaatactcctttgtttcttcttatatatgctagagcttgactgaaattcttttcttacaggaagtggagagttttgcgccatttgagctggggggtgcatctgtatcgggcccataatgtagtatctccattttaaaaaggtttgagtttaggaaaagaattgtttactgtagtgattcaataacccttcaccctgtctgcattacaactttcatatatgatgtgaacgtttggtgacaagaaagagatggcgggcaatatctgtagactggatggtcaggaacctgtgaggtgatctgtatccaggagttcaaaagggcctgtgaggtgatctgtagtccaggagttccattgttcgcttgaccaggcctggtactggcagttcacatcggtagatagccaaagcacggcacatgtgtacattgtcgcacgacgagttggcggaagtgcaggtcatggtgaggccaagatctcaactcgcactaccgtctgatccgatggcgttggcgtctcggcgattatttcgtcagcggacgtggcgtgtccctggttgcatttcaaaggcaatgccattgccacccaccagctgccaacgtctgcgccgtgtgtgccatctgaatcgccgatgcagaccgcgagcgacggcggccatgtcaaacgggacagcgccagccatccagaaagtaactcgcgcgggagacggcgcaggccgccatcccatcccctttcgttgctgtcgcggcgcccctgccgactgctgcggctgttcgtattctcgctcgtatttgcaacttgtgggcggcgggatttgctgcctcccgccaagacaagaaagccgacgacctccgggcggcgcagcagcttctgggcggcgagatttgctgcaagcttgcttcccgccacggcgtccagccatctcaagattcgcggctccgctgacttcgcagcgctctttcaaacgaggtcccctgcaggagtatgtggttcaaaacacgacgtcgtcgttgtgatgtgcatgctcgcatgtttgctgagcacgaactcctccagttaacaacaattgctcggatggctgaggaagaagaaaatatgcctcatcgtggctctgttgtgggacgccgaactataccaagggatcgttacagtggttactttcgtttgatgcaagactacttcattcaacagccagtttatggtgacaatttatttcgtcgacggttccgaatgtcaaaaaatatgttcaatgatatttgtgaagctgtggcggcagcaaataggtacttcaggttgacacacaatgccgctgggcaggccgggttctcaactattcaaaaggttactgctgctttgcgaatgcttgcatacggaggacctgccgatagtttggatgagtactttcgcatgggtgagagcacgatcatcgaaacagtaaataaattcactcgcaccattgttgtaatctatggtgaggagtaccttaggcagcccaatacagaggatattgccaggcttcttcgaaaggctgaagaaagaggttttccaggaatgctcggaagcatcgattgtatgcattgggagtgggagaagtgccccactgcgtggcacggtcagtatcgaggtcaccacaagaaacccacaattatactagaagcggtggccagtcatgatctttgggtttggcatgcattttttgggatgccaggttcttgcaacgatataaacgtcttgcatcgttccccggttttcgataacctgtctagcggccatgctcctgaggttaatttcacagttaatggacgggaatacaatatgggttactacctagctgacggtatatatcctccatgggctacattgatcactcccattccagccgctgttagtaataagcagaatcggttcaatgagaaacagcaggagtaccgcaaagacgtcgagcgtacttttggtgtcctacaagcaaagtatgccatcatcaaaggaccttcaagaatgtgggatcccggggatatgaagtacatagttcaatgtgtcatcatactgcacaatatgggtatcaagtatgagagaggaatggagcagttggagatcgaggattatgagggagcatccagaccatcattggatcctaataggaatgtgtcggaggttcagcaactcatcaatgcccaccgacagatccaaagccgaacaaccaatgagcaattgaagaatgaccttgttgatcatatatggaacttgcatggctcatcaactgaaatcttgtataaaagtttggctcatcaaatacctagctgattgacgattccctgatttatcaacttagggcaatcttgtataaaagtttggctcatcaactacctagctgatcgacgattctctaattttattttatagttgatcctatttgtatacacgacatcttaatttcatacttaacagctcatccactgaactaaaatagatacacaacatcttaatttcatacttaacagctcatccactaaactgaaacaaatacaagacatcttgatttcataccgaacatctgatccactgaactgaaatagatacaactcacacagttaacactgttagaacatatcttaatttgtccatctaaactgatacatagataaatactaatatttc

SEQ ID NO: 23806 - DNA, 3397 bp, Zea Mays
gccagacaatgcccaaatggtgtaattgtaaatttctgaatgccatgtattgcttaagaaactgaaacaaatgctatataaacatccttcaaaattagctgtatgtttgtgttctgtttgcatgtgctgttggtaagctgtactatgtgcaaacataacctgtttgggatccagacgtattcctgctggtaagctggttcctgctgtgtcccttttgctgtagaaggcaaggtacgtggtgccttaccttggctaagtcactgaatctggatccgtgatttggtaccgtaggctgagctgcctgacaagtggggtccacgtgacagtacccgtgcccccgattctgctcctggctgtgctcgcccaggcccagcaccgctcagtcagcgccgccgcaaccccgccccgaccctagtccaacgttcgtgccgcttgctgggccgccgacgcgccaggccgctggagcagctcgcttgccccccagcccccacgccgtgcccctcgctcagcctgcgctgcctcgcactcctcgcgccgctagcccggccggagccgctcttcttccaccgcgcttgccagctgccgccgctcctctaatggtgacgaggtggagccagaagagcccgggcctcaagatcctgtggatctggaccctgggcaccgccgcaattgtggtcggcggtatcgtccggatgcgggtaaacgatgtgcagaagatccttcgggaagaagaggaagccgccgctaccgccacggccacgtcgccccccagcgagcgagtcctgaaagacgaagagtagaacaggaagtggagagttttgcgccatttgagctggggggtgcatctgtatcgggcccataatgtagtatctccattttaaaaaggtttgagtttaggaaaagaattgtttactgtagtgattcaataacccttcaccctgtctgcattacaactttcatatatgatgtgaacgtttggtgacaagaaagagatggcgggcaatatctgtagactggatggtcaggaacctgtgaggtgatctgtatccaggagttcaaaagggcctgtgaggtgatctgtagtccaggagttccattgttcgcttgaccaggcctggtactggcagttcacatcggtagatagccaaagcacggcacatgtgtacattgtcgcacgacgagttggcggaagtgcaggtcatggtgaggccaagatctcaactcgcactaccgtctgatccgatggcgttggcgtctcggcgattatttcgtcagcggacgtggcgtgtccctggttgcatttcaaaggcaatgccattgccacccaccagctgccaacgtctgcgccgtgtgtgccatctgaatcgccgatgcagaccgcgagcgacggcggccatgtcaaacgggacagcgccagccatccagaaagtaactcgcgcgggagacggcgcaggccgccatcccatcccctttcgttgctgtcgcggcgcccctgccgactgctgcggctgttcgtattctcgctcgtatttgcaacttgtgggcggcgggatttgctgcctcccgccaagacaagaaagccgacgacctccgggcggcgcagcagcttctgggcggcgagatttgctgcaagcttgcttcccgccacggcgtccagccatctcaagattcgcggctccgctgacttcgcagcgctctttcaaacgaggtcccctgcaggagtatgtggttcaaaacacgacgtcgtcgttgtgatgtgcatgctcgcatgtttgctgagcacgaactcctccagttaacaacaattgctcggatggctgaggaagaagaaaatatgcctcatcgtggctctgttgtgggacgccgaactataccaagggatcgttacagtggttactttcgtttgatgcaagactacttcattcaacagccagtttatggtgacaatttatttcgtcgacggttccgaatgtcaaaaaatatgttcaatgatatttgtgaagctgtggcggcagcaaataggtacttcaggttgacacacaatgccgctgggcaggccgggttctcaactattcaaaaggttactgctgctttgcgaatgcttgcatacggaggacctgccgatagtttggatgagtactttcgcatgggtgagagcacgatcatcgaaacagtaaataaattcactcgcaccattgttgtaatctatggtgaggagtaccttaggcagcccaatacagaggatattgccaggcttcttcgaaaggctgaagaaagaggttttccaggaatgctcggaagcatcgattgtatgcattgggagtgggagaagtgccccactgcgtggcacggtcagtatcgaggtcaccacaagaaacccacaattatactagaagcggtggccagtcatgatctttgggtttggcatgcattttttgggatgccaggttcttgcaacgatataaacgtcttgcatcgttccccggttttcgataacctgtctagcggccatgctcctgaggttaatttcacagttaatggacgggaatacaatatgggttactacctagctgacggtatatatcctccatgggctacattgatcactcccattccagccgctgttagtaataagcagaatcggttcaatgagaaacagcaggagtaccgcaaagacgtcgagcgtacttttggtgtcctacaagcaaagtatgccatcatcaaaggaccttcaagaatgtgggatcccggggatatgaagtacatagttcaatgtgtcatcatactgcacaatatgggtatcaagtatgagagaggaatggagcagttggagatcgaggattatgagggagcatccagaccatcattggatcctaataggaatgtgtcggaggttcagcaactcatcaatgcccaccgacagatccaaagccgaacaaccaatgagcaattgaagaatgaccttgttgatcatatatggaacttgcatggctcatcaactgaaatcttgtataaaagtttggctcatcaaatacctagctgattgacgattccctgatttatcaacttagggcaatcttgtataaaagtttggctcatcaactacctagctgatcgacgattctctaattttattttatagttgatcctatttgtatacacgacatcttaatttcatacttaacagctcatccactgaactaaaatagatacacaacatcttaatttcatacttaacagctcatccactaaactgaaacaaatacaagacatcttgatttcataccgaacatctgatccactgaactgaaatagatacaactcacacagttaacactgttagaacatatcttaatttgtccatctaaactgatacatagataaatactaatatttc

SEQ ID NO: 23807 - DNA, 3394 bp, Zea Mays
gccagacaatgcccaaatggtgtaattgtaaatttctgaatgccatgtattgcttaagaaactgaaacaaatgctatataaacatccttcaaaattagctgtatgtttgtgttctgtttgcatgtgctgttggtaagctgtactatgtgcaaacataacctgtttgggatccagacgtattcctgctggtaagctggttcctgctgtgtcccttttgctgtagaaggcaaggtacgtggtgccttaccttggctaagtcactgaatctggatccgtgatttggtaccgtaggctgagctgcctgacaagtggggtccacgtgacagtacccgtgcccccgattctgctcctggctgtgctcgcccaggcccagcaccgctcagtcagcgccgccgcaaccccgccccgaccctagtccaacgttcgtgccgcttgctgggccgccgacgcgccaggccgctggagcagctcgcttgccccccagcccccacgccgtgcccctcgctcagcctgcgctgcctcgcactcctcgcgccgctagcccggccggagccgctcttcttccaccgcgcttgccagctgccgccgctcctctaatggtgacgaggtggagccagaagagcccgggcctcaagatcctgtggatctggaccctgggcaccgccgcaattgtggtcggcggtatcgtccggatgcgggtaaacgatgtgcagaagatccttcgggaagaagaggaagccgccgctaccgccacggccacgtcgccccccagcgagcgagtcctgaaagacgaagagtagaacaggaagtggagagttttgcgccatttgagctggggggtgcatctgtatcgggcccataatgtagtatctccattttaaaaaggtttgagtttaggaaaagaattgtttactgtagtgattcaataacccttcaccctgtctgcattacaactttcatatatgatgtgaacgtttggtgacaagaaagagatggcgggcaatatctgtagactggatggtcaggaacctgtgaggtgatctgtatccaggagttcaaaagggcctgtgaggtgatctgtagtccaggagttccattgttcgcttgaccaggcctggtactggcagttcacatcggtagatagccaaagcacggcacatgtgtacattgtcgcacgacgagttggcggaagtgcaggtcatggtgaggccaagatctcaactcgcactaccgtctgatccgatggcgttggcgtctcggcgattatttcgtcagcggacgtggcgtgtccctggttgcatttcaaaggcaatgccattgccacccaccagctgccaacgtctgcgccgtgtgtgccatctgaatcgccgatgcagaccgcgagcgacggcggccatgtcaaacgggacagcgccagccatccagaaagtaactcgcgcgggagacggcgcaggccgccatcccatcccctttcgttgctgtcgcggcgcccctgccgactgctgcggctgttcgtattctcgctcgtatttgcaacttgtgggcggcgggatttgctgcctcccgccaagacaagaaagccgacgacctccgggcggcgcagcagcttctgggcggcgagatttgctgcaagcttgcttcccgccacggcgtccagccatctcaagattcgcggctccgctgacttcgcagcgctctttcaaacgaggtcccctgcagtatgtggttcaaaacacgacgtcgtcgttgtgatgtgcatgctcgcatgtttgctgagcacgaactcctccagttaacaacaattgctcggatggctgaggaagaagaaaatatgcctcatcgtggctctgttgtgggacgccgaactataccaagggatcgttacagtggttactttcgtttgatgcaagactacttcattcaacagccagtttatggtgacaatttatttcgtcgacggttccgaatgtcaaaaaatatgttcaatgatatttgtgaagctgtggcggcagcaaataggtacttcaggttgacacacaatgccgctgggcaggccgggttctcaactattcaaaaggttactgctgctttgcgaatgcttgcatacggaggacctgccgatagtttggatgagtactttcgcatgggtgagagcacgatcatcgaaacagtaaataaattcactcgcaccattgttgtaatctatggtgaggagtaccttaggcagcccaatacagaggatattgccaggcttcttcgaaaggctgaagaaagaggttttccaggaatgctcggaagcatcgattgtatgcattgggagtgggagaagtgccccactgcgtggcacggtcagtatcgaggtcaccacaagaaacccacaattatactagaagcggtggccagtcatgatctttgggtttggcatgcattttttgggatgccaggttcttgcaacgatataaacgtcttgcatcgttccccggttttcgataacctgtctagcggccatgctcctgaggttaatttcacagttaatggacgggaatacaatatgggttactacctagctgacggtatatatcctccatgggctacattgatcactcccattccagccgctgttagtaataagcagaatcggttcaatgagaaacagcaggagtaccgcaaagacgtcgagcgtacttttggtgtcctacaagcaaagtatgccatcatcaaaggaccttcaagaatgtgggatcccggggatatgaagtacatagttcaatgtgtcatcatactgcacaatatgggtatcaagtatgagagaggaatggagcagttggagatcgaggattatgagggagcatccagaccatcattggatcctaataggaatgtgtcggaggttcagcaactcatcaatgcccaccgacagatccaaagccgaacaaccaatgagcaattgaagaatgaccttgttgatcatatatggaacttgcatggctcatcaactgaaatcttgtataaaagtttggctcatcaaatacctagctgattgacgattccctgatttatcaacttagggcaatcttgtataaaagtttggctcatcaactacctagctgatcgacgattctctaattttattttatagttgatcctatttgtatacacgacatcttaatttcatacttaacagctcatccactgaactaaaatagatacacaacatcttaatttcatacttaacagctcatccactaaactgaaacaaatacaagacatcttgatttcataccgaacatctgatccactgaactgaaatagatacaactcacacagttaacactgttagaacatatcttaatttgtccatctaaactgatacatagataaatactaatatttc

SEQ ID NO: 23808 - DNA, 4521 bp, Zea Mays
gccagacaatgcccaaatggtgtaattgtaaatttctgaatgccatgtattgcttaagaaactgaaacaaatgctatataaacatccttcaaaattagctgtatgtttgtgttctgtttgcatgtgctgttggtaagctgtactatgtgcaaacataacctgtttgggatccagacgtattcctgctggtaagctggttcctgctgtgtcccttttgctgtagaaggcaaggtacgtggtgccttaccttggctaagtcactgaatctggatccgtgatttggtaccgtaggctgagctgcctgacaagtggggtccacgtgacagtacccgtgcccccgattctgctcctggctgtgctcgcccaggcccagcaccgctcagtcagcgccgccgcaaccccgccccgaccctagtccaacgttcgtgccgcttgctgggccgccgacgcgccaggccgctggagcagctcgcttgccccccagcccccacgccgtgcccctcgctcagcctgcgctgcctcgcactcctcgcgccgctagcccggccggagccgctcttcttccaccgcgcttgccagctgccgccgctcctctaatggtgacgaggtggagccagaagagcccgggcctcaagatcctgtggatctggaccctgggcaccgccgcaattgtggtcggcggtatcgtccggatgcgggtaaacgatgtgcagaagatccttcgggaagaagaggaagccgccgctaccgccacggccacgtcgccccccagcgagcgagtcctgaaagacgaagagtagaacaggtaaaaaaggttgcccacttcctctcggcggaccgaactgtgtcatgcgcctccgttgtaatgttcagattttgcagtctgcaatacaatagagaaatgctcaattagttgatacaaacaggccccagttgggaactgaagataatctacgatcgcgctacctagcgatttcacgcgttagagagtgtttaattagctgaggatatagtgccatctggtactgatatgcaatatctgagggaagctctatgtttaggtctacatgttttggttagttttgtcagacactggatagttgtgtttcaacagttcactattgtctgaacacaacatgaacatgtgatcttactgaaaatttgggtatgctgctattattgtataaacatgtttaatttcttggtcatacttatgaactctctctctctctctctctctccacacattaggtcaatacagtgacagggctgtactttaggtagtgtagtttcttagtaccactttggtcagatttgttgaggcctgatgttacaggttggacaaatctttgggtggtattaatgtgaccaatgttgttaggatttggatccaatctttttttgcttgataaaattggatagtaggattggattgtagtatcgatatcttagtggatttttcaaactaaatcacggtgttcatgtcacctttggcgtgattatcatgctctgctgagaatctgcttttattaacctttggtgagcagttccaaacaggcccatggcaggattgatgtcgtcttgccttggtaggatcatggtaacagaagcaacgccgatattatgactttagagatctcatgagtttatggactgaaactaggttgggcagtggcatggttaactttattttgctctatatgggctcttcactctaaagcaacatggcaacaatgcatgcacacaatgcaggagcaaataacagctaattatttctggcaaagcctgaggtattgtgacgaggatgcagccccgtagatgtcagtgataagctacacagtttttcctcctctttcagtggatagcagaaatactcctttgtttcttcttatatatgctagagcttgactgaaattcttttcttacaggaagtggagagttttgcgccatttgagctggggggtgcatctgtatcgggcccataatgtagtatctccattttaaaaaggtttgagtttaggaaaagaattgtttactgtagtgattcaataacccttcaccctgtctgcattacaactttcatatatgatgtgaacgtttggtgacaagaaagagatggcgggcaatatctgtagactggatggtcaggaacctgtgaggtgatctgtatccaggagttcaaaagggcctgtgaggtgatctgtagtccaggagttccattgttcgcttgaccaggcctggtactggcagttcacatcggtagatagccaaagcacggcacatgtgtacattgtcgcacgacgagttggcggaagtgcaggtcatggtgaggccaagatctcaactcgcactaccgtctgatccgatggcgttggcgtctcggcgattatttcgtcagcggacgtggcgtgtccctggttgcatttcaaaggcaatgccattgccacccaccagctgccaacgtctgcgccgtgtgtgccatctgaatcgccgatgcagaccgcgagcgacggcggccatgtcaaacgggacagcgccagccatccagaaagtaactcgcgcgggagacggcgcaggccgccatcccatcccctttcgttgctgtcgcggcgcccctgccgactgctgcggctgttcgtattctcgctcgtatttgcaacttgtgggcggcgggatttgctgcctcccgccaagacaagaaagccgacgacctccgggcggcgcagcagcttctgggcggcgagatttgctgcaagcttgcttcccgccacggcgtccagccatctcaagattcgcggctccgctgacttcgcagcgctctttcaaacgaggtcccctgcagggagtatgtggttcaaaacacgacgtcgtcgttgtgatgtgcatgctcgcatgtttgctgagcacgaactcctccagttaacaacaattgctcggatggctgaggaagaagaaaatatgcctcatcgtggctctgttgtgggacgccgaactataccaagggatcgttacagtggttactttcgtttgatgcaagactacttcattcaacagccagtttatggtgacaatttatttcgtcgacggttccgaatgtcaaaaaatatgttcaatgatatttgtgaagctgtggcggcagcaaataggtacttcaggttgacacacaatgccgctgggcaggccgggttctcaactattcaaaaggttactgctgctttgcgaatgcttgcatacggaggacctgccgatagtttggatgagtactttcgcatgggtgagagcacgatcatcgaaacagtaaataaattcactcgcaccattgttgtaatctatggtgaggagtaccttaggcagcccaatacagaggatattgccaggcttcttcgaaaggctgaagaaagaggttttccaggaatgctcggaagcatcgattgtatgcattgggagtgggagaagtgccccactgcgtggcacggtcagtatcgaggtcaccacaagaaacccacaattatactagaagcggtggccagtcatgatctttgggtttggcatgcattttttgggatgccaggttcttgcaacgatataaacgtcttgcatcgttccccggttttcgataacctgtctagcggccatgctcctgaggttaatttcacagttaatggacgggaatacaatatgggttactacctagctgacggtatatatcctccatgggctacattgatcactcccattccagccgctgttagtaataagcagaatcggttcaatgagaaacagcaggagtaccgcaaagacgtcgagcgtacttttggtgtcctacaagcaaagtatgccatcatcaaaggaccttcaagaatgtgggatcccggggatatgaagtacatagttcaatgtgtcatcatactgcacaatatgggtatcaagtatgagagaggaatggagcagttggagatcgaggattatgagggagcatccagaccatcattggatcctaataggaatgtgtcggaggttcagcaactcatcaatgcccaccgacagatccaaagccgaacaaccaatgagcaattgaagaatgaccttgttgatcatatatggaacttgcatggctcatcaactgaaatcttgtataaaagtttggctcatcaaatacctagctgattgacgattccctgatttatcaacttagggcaatcttgtataaaagtttggctcatcaactacctagctgatcgacgattctctaattttattttatagttgatcctatttgtatacacgacatcttaatttcatacttaacagctcatccactgaactaaaatagatacacaacatcttaatttcatacttaacagctcatccactaaactgaaacaaatacaagacatcttgatttcataccgaacatctgatccactgaactgaaatagatacaactcacacagttaacactgttagaacatatcttaatttgtccatctaaactgatacatagataaatactaatatttc

SEQ ID NO: 23809 - DNA, 6524 bp, Zea Mays
actttcaaaaggtcgatctcttgctgcacacaccataccagcaaaccaccacgaagagaattgtgcagaatcattaaaacatgcacaaagacaattaattaaaaccctaggctgcaggaatacaagagcaattgcagaaaacagtaatattcaccaataggagggaaatgttttgacaacaagagcaaaatataataaagtggtagggattgttatacaggaagaatgcaaaaaaaatgtgcaacttccttaaaaaacttggccagagagggaaagaccgctctcccggtattatattaagaagagactgaaacatggccccaaccgagaaaaccctcgaaccctggcccccagcactagcgggctgtcaccgcccactctgcaacggcccaaccggagggtggcgcacaggacgtaacccgggagcgggcaaggcacagcgaggggatttttttaaccaagcccgaaattcgcccccgagggggatcgaacccgggacctggaggtgctactcggaaaccttgaccattacgctacccagtgttctagaaaaacaagcagtgaaccgaccagtgcatcatatagtcattgatgatatatgatgttacaaccagtatctcctatgcacgccggagaacgagccacacaggtgttgggcccaaattacacctggcataaagtacccatttaggaaatagaattagtgtgttaggaaaggggagtctaaatctataaggattcctcctctagtttgctttggaacaaagtcctctagggactataaatataggagtgatgtaaccagatgaaggaagcaaggcaaacatcttgttgggcctcaagggcctaccctccgtgttccctctctccctcgctcactgtcgtgccgttgttctacacccacgccaccacggcgcctttccgaagtcagaaattcctgactgcggcctccaatctcgcattcctacacacttcgcaaccaagataggatcaaggatcctatgaatctagtatcggagatgtcaggttccgacgctactacagcgattgacaccaagacttcgtctccaccaacacaacaggtcgttcagccggcactgcaaggagtgccaccattctcccttgacaccatggcaaaggccctctctgaggctgcccagcagatggccaacctcaacatgcagcaggtggtcgttctctcgcggctggccaccgtggagagccatcaggcatcctcatcagcgggtgccatggcccaaggcttttcctacgaggtgccgagggacaacacgacggcacttcatatttacttatccaccaccaccatacccccaccaccacgctgcccgccacccaacccctgttgactcattcattcccatcaaccttatcgatttcccaccatcactgtaactgctgcccaacttctcgacaccaccaaccccgctccagcgctgccactagtaacccttggtgcggccaccaaattcgacaagcacgatttcacctcctatgatgactcattgtgagcagtttttttaagggcaacacacgctcacatctgatcgtgtttggctcgcattataccacctacacgacggaccgcgaacgtggtactacacccttgaacaggatgagggcatgccttcctaggagcgcttcacagagctctgcaaactacgcttcgacccgaccatccgtactaattgcctcttcgaattggcacaactctctttcaccaccatagtacagaactaccaggcgcgtttcaacgccctcatttgtcactcggctcagccaaatagcgctcgtgtgtcggacctcagagcacctcacgaactagttcatgggccacctttttttcgcgaccccaatgcagtagagcaccttaggtcccagggcaccccgcacgttggcccccaaggcacctcgtgcgccgacccctagggcacctcttgccccagccctcgaggcacccgaaacattagcccccgagacaccctcaagcatcgacccctaaggcacctattgacatctcacatgctggcccccaaggcacctcttgccccgatctggtaaccaccgacgatgtcctccacgtcaagcgcatcttcatgtcgacatagcacgatttggaccaccaggtggctgcactgtcccattccactaaccacgaagggacctaaaagacccttcagtacctgcgcgaggacttctatatcccaagcgaccacatggccaattagaggtcatcaacaagatgatagtcatgtacctccgctatgccacaaggaaccgactacgtgcatgggtcgactagcttccgtgggtagaatattgctgcaatacctcatcccacacgacgctccgcgccatccccttccaggcggtgttggccatcccatgtccccttttttaccacacatggcagaggctactcaaatggaggtggtgggctccatcctacgtgacagcgatgccttcctcatggaggttcatcggcgcttatccaagcccagcagtacaccaagtgttcctaacttcctatgacgaccaacatcgtgagctcaagttcagggtgggcgactaggtgtggcttcgccgtctccattgcccgacgcactcactagagccctagtccaagggtaagcttggtcctcgctatgcaggccccgttcaggagttggagcgtgttgggcaggtggcctacagcctttagcttccagaaggcacacgtcaatgacgtgttccatgtagagcttagggggaccctctgatgaccccaccacaagggccactatttaggatggtcggttgttgcctactccagagagtgtgctactcgcccatttacatcatggcgcttggcatgtgctggtacagtggcagggtatgaccaccgatgacgctacttgggagctactgcacaacttcaaagacctctacccgaacattcatcgaattgtttgaagagacggggagagatgttatgaccgatatccaaggttattaaaacgataaaacgttggaacgctcatgagtgaaattttgacttttaaacgtttaaactttgtttaaacgtagttttaaacaacataggaaaaataccaatacatcataatttcatacaataatatgaagttaagtaccaaaacagagaggttagtggcttaccaaaacttcacccatgagctggattgaaccccaaaagtaactaatagactgggcccaaaagtagctaatggtctaaaatgcataaaacactgcgttttacagtttagaacgccaaaacgctaaaacgtggtttcaacctcttattagagttttgacgtttaaacgtagtttaaacatcgtttaaacgtagttttaataacactgccgatatcccctatgtgcaacggaaaacgggccacgcgggtgttgggccaaaattacatccggtgtgaacaatactcatttaggaaatagaattagtttgttaggaattcctcctctagtttgcttctgaaccaagtcctctaggaactataaatacaggggcgatgtaaccagacgaaggaagcaagacaaacatctttctaggccacaagggcttgtcctacgcgttgtctctccctcgctcgttatcacgccgctgctctacacccatgccatcacgtcgccttaccaaagtaaaaaaatccaacactgaactccaatctcacattcacatgcacttcgcaactgcgatagaatcaaggatcttatcatatacggccaagtaagcagcatttatgcagttcaccaaaccaagtaatgatataacttattgcccaacaatatgtccatatggtaaataaataaacaattaaagttgttactccctctgtttttatatattagctttgtcttaagtcaaaaaaatgtaattttgaccatcaatttcaaaaaaaaagttcatggcataagatttatgttttttatatttactatgagaagcacttccataatctgtaactcatatcttgtgaaactataaggattttttgaaatggatggccaaagatagcaggggcgaagctatgttgccgggacggggtcagccgaccccgacgacttcgtgatagcatcttatacaatatgattttccaccagcaaagaccctggcaaaaaaaagtaattgtgaccccgacagctcaaatttgaaagccctgcggcccaacacatgcaatccaacctattacatgtacacgtactgccaaaaaatactagcatgcattctgcaagcccacatctatacgtactcacaggtttatcaagcctaagttttagttcttgcttttttattagttcggcaagcccacaactcttgatttatattttaacatattgattattggcgcagtgaatatacatgtttatgaagcctaagtttgaggtcttacctttttattaatttagattttttttctagttacatataacaagagtcgaggaaccctactgtttctattttagtagttttttgagtctggcattcttagactctttcacttatgtgcggtactggcctccgtaaggagttaaatgttgtaaccctggtctactatagacctttttcctcttcttaatatattttaaggcgcagttcccctgcgctttcgagaaaaaaaaaagtctccataattctgttgcttgcaacttggattcaaacagtgaggttgctcttattcaaggaaaatgtcaaagtatgtaaagttatgattttaattatatgtatggctgcaatagatacattaattttataggcaaccgaagcgcgttgaaacgattcttaaaaaggaaaataccaccaaccaatgataatgataatctagaaagatgcacttcaacaagggacgtcaatagatcaaataccaatcgtcctattcattgttcttcacgagtctcacgacatgaggtaaatttcgatgaacttccatatgatccagctgacagaggataatatcagctcatataggctctgatctacaagatgacataaggtgaaagtatttgactagaggtccttgttctcttacataagatggaggatcgtaaccgtagaggaaaaatatagaagatacgcaattactattgtgaaagattattttggcgtaatatgttgcttttattttatagattattgatattatgcatggtattattttttccaacctgtgagttagtactgaccctggcaataaattatccaggcttcgcccttgaaagatagttatgttttacttatgacaaagctaatgtgacatgaaaaaaaggagtatttcacaagctcaggagtcagggcagatgcatcagattcagatatgctccaaaagacaacatttaaacaggtcatacacagatttcaagatcaactaagagttaagtgatacatggaaccaatatcaaaaatacgaaagagaactaattagcgaccaattcacaaaaactaacaccaacacatagaattctattttagatattaacaatttacttgatacctatagagctatagattagatgaaccatcaagtcgtcaaccatgtgtcagcctacacgatctatcaattgcaggaaagttgtcgaggttcaaaatgttattgttgcttgcaagggcatataaggctgcagtcactattagtcatggtgcaaaaaacatcagaaaagctttttcccctgtcaggaaacaaaacttgtctatagatagcaaactcaaaaataatacaatgtgtgataatcaagccaattgcaccaagaaaatgcagtaggaacctaaagtagcgctcctttatgtcatgagtcatatttttatgagagatcgtatcatacaacaattaacaggccaaaagttccatatgatcacaatcagaaaacgtataaccgagtaaccgactcactacagatcgattaacatgccaaacacacaggtaacgcatgtccttgacttctgctataattccaagtttgaacctaccaaacagggatcttgctcactactcccataagtaagctagcagaacctagccctggaatgtaatctcacagcaaaaagtgtgctacaaaagggcgaggtgcatagctaaaactacatattatagctgaactggagccgctgtgtgctagctacacagctcctcccaacaaacacatttcacgcaattacacaccccttcatttcctgtgcatgatatgataagtaagaaaaaacgtcaccattattatgttgagatcctcctgcggaatgttctccagcgagacctgtttgatggccacgaaatcgccattctccaggtcaagccccttgtatacgcggccgtacgcccccttccctatttcatctccaagcatctgcacacgggcccgtgcaggcgcactgagtgagagtaggataaccccaaaattcgcagcaaaaaaacacgaattcccctggatctgaggtgggaggcgcgataaatcctcacgtatttgttgtcaagcgtcttggatttgtggaactgcgcatt

SEQ ID NO: 23810 - DNA, 1911 bp, Zea Mays
acgaaggcaaagcgtggcagaaaaacgcggggagacaagggggaaacgccgtgagaagtcgccgataggtgcgcgggtcgcggtcgtcgcctcctctgcctccctggcgcccgcttggctcggttctacgcgtatgctgcccttgcgccttgcggcaaacgcaacaacacggagcgggcgtggggagcggagcggtgagcgaggatcgagggcaacgtggcgaggcactcccgagggggagaggcgactttgcttccagttccaggaaagagtgggctataaaaaggcgctcgagatccagatctgggccgatgcgaccgccctcgctgctctccctcaccctcgacgccgcgctcctccgcatcgccaatatcgccgacctctcccacctcccagaccacctcctcatcgacctcttccagaaccctcagtgctggtaagctgacagagaaagttctcaagttgtttctagcaaccgactgtgaggatatcatattggctgttcggttgctcaacattaagcagccactcgtaccagtccttcccacaaggtgctctgagagattctagatctgctgccgctcacatcgttttgattacctgagaagatgcctttggaaattcaagatagtgaggttgacatagtgattgcggcactccagcccaacctgaccactttctttgaggcatggcgaccatttttctcccgtttccacatcattgtcgtcaaagatccagacatggcagaggatcttcaaatccctgcaggttttgatctcaaggtttacaccaagtcagatattaatgggttgcttggtgcctcctcatccataaacttatctggtcactcatgccgttactttgggtatcttgtctcacgcaagaagtatgtgatttcaattgatgacaattgcctcccagcgaaggacactgctgggtcgactgttgatgttgttgcacagcacatggccaatctgaaaacacctgctacacctttctttttcaacacactctatgatccatacaggaaaggtgctgactttgtccgtggttacccattcagcctgcgcgagggggttgagtgcatgctctcgtgtggtttgtggcttcataatgctgactacgacccgatgactcatgttgtgaagagaaatcaacggaacacaacatatgtggatgctgtgatgacggttccgcttggtgccatgctgcctgtgagcgggataaatgttgcattcaaccgcgatgtgctggggcctgctatgttcccaggcctgcgtctacgaaacgaagggaagcacagatgggatacccttgaagacatatggaatggcttatgtgctaaagtagtctgcgacagcttgggatatggtgtgaagaccggactgccttatgtgatgagaagtgatgcagaagcaggtaaagctctggagagcttgaaagagtgggaaggggtaaaagtcatggatgatgttctcccattcttccagtcgctcaagctatcgaggactgcagttactgttgacgattgtgttaaggagcttgctggagttgtccgtgagaagctaggacctaagaatgcaatcttcaccaaagcagccgatgccatggtggaatggaacaatctctggaaagtgcatggtgctcagaatgcatagtttgggagtttgcatgtttcctacagagcatctaatagttgtttggagtgcgcgttttacagttctaaattttccctgtggaactcatgaagctgaaataaacaacggtcctttatgccgtgaatttggcatgaatagctgagcatctcattgtatacgcttaagaattatgtaatgtaatgcatcaaaagaacatgtgatgttttcttgcatcttgtcttgttaaacggaatctgctaagaggttggatacc

SEQ ID NO: 23811 - DNA, 1511 bp, Zea Mays
attttttatgcgtgcaacttggttcagatcttgtgccgtttcgccatgaggaaagtgctgagagaggtggcatctggaggacgtgatgccgagcgtgtgaagcttaagttagaaattgtagtcgagtctgtagactatgacaaggagggatctgttttacgtgtgcgtggaaaaaatatcactgagaatgaccatgtgaagattggccagttccacacgttagagcttgagctgaagagaccttttgttctacgaaaggaaatttgggattggttagcacttgagaccattcagcaagcatgtgatcctgctgcaagtgctgatctagcagttattctcatgcaagaaggacttgcccacctattcctcattggcaaaagcataacagcaacccgggcacgtattgaaacatcaattcctaggaagcatggccctgcaattgctggctacgagacggccctcaagaagttctttgagtatgttttgcaagcatttctgaaacacattgattttgaagttgtccagtgtactgtaattgcaagcccaggttttacgaaggaccagttccgcgattatttgtttcttgaagctgcacggcgagatttaagagtaataattgagaacaagcaacgccttgttctggcgcatgcaacatcaggttacaagcatagtttaaaggaagttttggacacaccaggtgtgatggcactgataaaagatacaaaagcagcacaggaggtccgagctctgcaggatttcttcaatatgcttactaatgagtcagctcgtgcttgttatggaccgaagcatgttgagtttgcactgcaacagtttgctatccagactcttttaataactgatactttgtttcggaacgctgacattgctacgaggcaaaggtacgtgaagttggttgaagatgtcaagaaaaatagtggcacagtacacatattttcctcgatgcatgtctcgggcgaacagttggcgcaactgacaggaatagcggctatacttcgttttcctcttcctgaactagaggacatggagctgtgatgaaaccaacctttttgcttctcgataacattctttttggttgtgatctgttagcatactacctgtatcatgtgtaacgttatggagctatttgatattgtataggcaaccctggaaaggaattctggtattttttaaggtatatcctattcgttgtaaatggttcatcgtgcgttgtttgccagttctttttctcgttaagggctagtttagaaaccctaatttctcaagggtttttcattttcccaagagaatttagttcattttctcatgggaaattggaaatctcatggaaaaatagggttgccaaactagacctaagtcttgttgttatttttcacatcctaaactatctgcatgtaaagttaccactgagcgttggagctccagacatcagaactaattttcgtgggccttcttgttagttcgtgcctcttttactttattgtatttctttg

SEQ ID NO: 23812 - DNA, 1692 bp, Zea Mays
atccataacttctcgcaattgatctagtcaccatatccgcggtaaggtagtttctaaaaagactttttcatcccctcgccgcccgccgcccgccgcgattcacccccgccaggtcgccacgcccgcagcccgccgacgcaaagccgcgcgcgaggcctctcccctgcgtacgcggcgatgaagatcgtccaccgcgacctcgttcgcaacgggcctggctccgtcaagttggtgccggaggaggaggacgacttgtggcacgcgtacaacctcattgccattggtgacagcctccaggccgtcaccgtacggaaagtgctgagagaggtggcatctggaggacgtgatgccgagcgtgtgaagcttaagttagaaattgtagtcgagtctgtagactatgacaaggagggatctgttttacgtgtgcgtggaaaaaatatcactgagaatgaccatgtgaagattggccagttccacacgttagagcttgagctgaagagaccttttgttctacgaaaggaaatttgggattggttagcacttgagaccattcagcaagcatgtgatcctgctgcaagtgctgatctagcagttattctcatgcaagaaggacttgcccacctattcctcattggcaaaagcataacagcaacccgggcacgtattgaaacatcaattcctaggaagcatggccctgcaattgctggctacgagacggccctcaagaagttctttgagtatgttttgcaagcatttctgaaacacattgattttgaagttgtccagtgtactgtaattgcaagcccaggttttacgaaggaccagttccgcgattatttgtttcttgaagctgcacggcgagatttaagagtaataattgagaacaagcaacgccttgttctggcgcatgcaacatcaggttacaagcatagtttaaaggaagttttggacacaccaggtgtgatggcactgataaaagatacaaaagcagcacaggaggtccgagctctgcaggatttcttcaatatgcttactaatgagtcagctcgtgcttgttatggaccgaagcatgttgagtttgcactgcaacagtttgctatccagactcttttaataactgatactttgtttcggaacgctgacattgctacgaggcaaagagttggcgcaactgacaggaatagcggctatacttcgttttcctcttcctgaactagaggacatggagctgtgatgaaaccaacctttttgcttctcgataacattctttttggttgtgatctgttagcatactacctgtatcatgtgtaacgttatggagctatttgatattgtataggcaaccctggaaaggaattctggtattttttaaggtatatcctattcgttgtaaatggttcatcgtgcgttgtttgccagttctttttctcgttaagggctagtttagaaaccctaatttctcaagggtttttcattttcccaagagaatttagttcattttctcatgggaaattggaaatctcatggaaaaatagggttgccaaactagacctaagtcttgttgttatttttcacatcctaaactatctgcatgtaaagttaccactgagcgttggagctccagacatcagaactaattttcgtgggccttcttgttagttcgtgcctcttttactttattgtatttctttg

SEQ ID NO: 23813 - DNA, 1706 bp, Zea Mays
atccataacttctcgcaattgatctagtcaccatatccgcggtaaggtcgccacgcccgcagcccgccgacgcaaagccgcgcgcgaggcctctcccctgcgtacgcggcgatgaagatcgtccaccgcgacctcgttcgcaacgggcctggctccgtcaagttggtgccggaggaggaggacgacttgtggcacgcgtacaacctcattgccattggtgacagcctccaggccgtcaccgtacggaaagtgctgagagaggtggcatctggaggacgtgatgccgagcgtgtgaagcttaagttagaaattgtagtcgagtctgtagactatgacaaggagggatctgttttacgtgtgcgtggaaaaaatatcactgagaatgaccatgtgaagattggccagttccacacgttagagcttgagctgaagagaccttttgttctacgaaaggaaatttgggattggttagcacttgagaccattcagcaagcatgtgatcctgctgcaagtgctgatctagcagttattctcatgcaagaaggacttgcccacctattcctcattggcaaaagcataacagcaacccgggcacgtattgaaacatcaattcctaggaagcatggccctgcaattgctggctacgagacggccctcaagaagttctttgagtatgttttgcaagcatttctgaaacacattgattttgaagttgtccagtgtactgtaattgcaagcccaggttttacgaaggaccagttccgcgattatttgtttcttgaagctgcacggcgagatttaagagtaataattgagaacaagcaacgccttgttctggcgcatgcaacatcaggttacaagcatagtttaaaggaagttttggacacaccaggtgtgatggcactgataaaagatacaaaagcagcacaggaggtccgagctctgcaggatttcttcaatatgcttactaatgagtcagctcgtgcttgttatggaccgaagcatgttgagtttgcactgcaacagtttgctatccagactcttttaataactgatactttgtttcggaacgctgacattgctacgaggcaaaggtacgtgaagttggttgaagatgtcaagaaaaatagtggcacagtacacatattttcctcgatgcatgtctcgggcgaacagttggcgcaactgacaggaatagcggctatacttcgttttcctcttcctgaactagaggacatggagctgtgatgaaaccaacctttttgcttctcgataacattctttttggttgtgatctgttagcatactacctgtatcatgtgtaacgttatggagctatttgatattgtataggcaaccctggaaaggaattctggtattttttaaggtatatcctattcgttgtaaatggttcatcgtgcgttgtttgccagttctttttctcgttaagggctagtttagaaaccctaatttctcaagggtttttcattttcccaagagaatttagttcattttctcatgggaaattggaaatctcatggaaaaatagggttgccaaactagacctaagtcttgttgttatttttcacatcctaaactatctgcatgtaaagttaccactgagcgttggagctccagacatcagaactaattttcgtgggccttcttgttagttcgtgcctcttttactttattgtatttctttg

SEQ ID NO: 23814 - DNA, 1963 bp, Zea Mays
ctaggttcgttttgagtgtgagccgtccagctcaagattttttttagccctacttttcacaaagctgctgcactcgtttagattctctgaccctgctcccgagaactcatcgacgccgtccatgctgtcctcctctccggcgccgtcacaagagggcgccgccgttccctcctcctgggcggaagctgcgtcctcggcggcgctccggcactaccgctcactggccaagaaagggaagccgcaggggcgcgagtccacggtcctcgccgccatcctcctctctgccccgcaggactcgcacagcctcactgtgctctccatgggcaccggcaccaagtgcctcggtgcctcgatgctcagcgcacgtggggacctcgttcacgacgcgcacgctgaggtcatcgctcgccgcgcgctgctccgcctcgtctactccgagatcggccgtggcgccccgcctgattggctggttgcttccggggatgctgggagatggaggctgagggatgggcactgccttcatctttacatcacacaactcccatgtggagtcatgccagtaccaccatcgcagtctgatttgccaagaaaacagctgaacagtatgaatgtcgaaattggctttgttcaaaggaaaccagggcgtggtgatacaacatcgtccatgagctgctttgacaaaatcacccgctggagcgttgtaggaattcaaggtgcattgctgtcacatatactggaacccttgtatttgtccaccattactattggacaattacctgatggtactcctgaacggttctctattaaaaataatatcaagaaggccctggatgctcgtctgtcctctctacccaccgaattgccgcctcctttcaaaatgcagaagccaaaggtttttgaggcgcctgtcccaccaacagagtttcaacagattcctggagacgtacgcctcttgacatgcgggtagtatatggtactcgatttgttggaataaatccggtttgcatgaagttgtcttaggcacaactggtaggaaacaaggaacctcatcaaaggcagcacacttaccctccaccgagtcactggtctgcaaactactagaagcatttttgtcccttgagcatcctttggtgaggcaactaaaatgcgaggagctatcttaccgggcacttaaggatacggctcatgaataccatcacgcgcttgagctcctcaggaaggccccattttttggctgctggcgagctaagcctacatttgttgattcgtttgcagtttcacggtgatgtctcgtgaactggtgaatgccatctccctgtttctttttgtctgttgaaaaaacatactatctccgtcccaaaatatagttctttctagcctatttttttccgatccatattaataaacgtataaatagtgtagaatgaattatattttaggaccgagggagtaggtctgatccagctttgttctgtgtgaaattgtatatgttggtggtccatgaatgaatcaaactgaacttatgcgcgcgtgctgctgtcacttgattccaagcactccctcccggcctccccgcgccagagagttcaagttctgaataatggtccaggtcgtttttgaggttcatcggcgtcaagccgtcagccgctgccggtccatttgttctcgacggatggatcctggaatcccgcccgactcccgagactggaggacaagagactccggagaccggatcacaagcaagcaacatgttcgtttggtttggctttaatttgtaacgaattttattgtttttacaggattttgtatctatagtttacagctgactttaatctgaagcaaacagcataatacatagaggtcgaatggccaggcgaaagagaaagagagataaagttagacactaaaaaaatgaaataaaattattgatataatagaaagataattgttatataaatagacg

SEQ ID NO: 23815 - DNA, 2611 bp, Zea Mays
ctaggttcgttttgagtgtgagccgtccagctcaagattttttttagccctacttttcacaaagctgctgcactcgtttagattctctgaccctgctcccgagaactcatcgacgccgtccatgctgtcctcctctccggcgccgtcacaagagggcgccgccgttccctcctcctgggcggaagctgcgtcctcggcggcgctccggcactaccgctcactggccaagaaagggaagccgcaggggcgcgagtccacggtcctcgccgccatcctcctctctgccccgcaggactcgcacagcctcactgtgctctccatgggcaccggcaccaagtgcctcggtgcctcgatgctcagcgcacgtggggacctcgttcacgacgcgcacgctgaggtcatcgctcgccgcgcgctgctccgcctcgtctactccgagatcggccgtggcgccccgcctgattggctggttgcttccggggatgctgggagatggaggctgagggatgggcactgccttcatctttacatcacacaactcccatgtggagtcatgccagtaccaccatcgcagtctgatttgccaagaaaacagctgaacagtatgaatgtcggtatgcttatactgtcttgatgttggtgttctacataacagtaccttcaaagttttgagctcgtaattttcatgtaccctaacttttaagtatggtagtgtcttccatggtccttgtcccggtaacaattagtttgagaattgtttagtttacaaaccagatgtattttagttatgatggtttcttgattttgtctgctgcccttatatattgataaaacagtagcatggaagtgtggtgctcctagctagttgacttaagtaacctctgtgcaactgtccagctaaactggaacagtggaactggactgcttacattgtttttttatgcttaatggagggtccattttacaccccggtaggtgtttgatacgatccacaagattggtacatgctgacatttgtctctattggttctgccaacagaaattgaattcattgtattgcccacattttaacaaaactatatttcatcctattacatatgtcatatattttctaatataagtatactactctgtatatcagaaattggctttgttcaaaggaaaccagggcgtggtgatacaacatcgtccatgagctgctttgacaaaatcacccgctggagcgttgtaggaattcaaggtgcattgctgtcacatatactggaacccttgtatttgtccaccattactattggacaattacctgatggtactcctgaacggttctctattaaaaataatatcaagaaggccctggatgctcgtctgtcctctctacccaccgaattgccgcctcctttcaaaatgcagaagccaaaggtttttgaggcgcctgtcccaccaacagagtttcaacagattcctggagacgtacgcctcttgacatgcgggtagtatatggtttgttccatgagctggatccttttccccccattttgtctctttctttatgcatccgtttattgtgccattcttttttactgaagcgttagctttgtcgtttatcttttactaggtactcgatttgttggaataaatccggtttgcatgaagttgtcttaggcacaactggtaggaaacaaggaacctcatcaaaggcagcacacttaccctccaccgagtcactggtctgcaagagaagactactagaagcatttttgtcccttgagcatcctttggtgaggcaactaaaatgcgaggagctatcttaccgggcacttaaggatacggctcatgaataccatcacgcgcttgagctcctcaggaaggccccattttttggctgctggcgagctaagcctacatttgttgattcgtttgcagtttcacggtgatgtctcgtgaactggtgaatgccatctccctgtttctttttgtctgttgaaaaaacatactatctccgtcccaaaatatagttctttctagcctatttttttccgatccatattaataaacgtataaatagtgtagaatgaattatattttaggaccgagggagtaggtctgatccagctttgttctgtgtgaaattgtatatgttggtggtccatgaatgaatcaaactgaacttatgcgcgcgtgctgctgtcacttgattccaagcactccctcccggcctccccgcgccagagagttcaagttctgaataatggtccaggtcgtttttgaggttcatcggcgtcaagccgtcagccgctgccggtccatttgttctcgacggatggatcctggaatcccgcccgactcccgagactggaggacaagagactccggagaccggatcacaagcaagcaacatgttcgtttggtttggctttaatttgtaacgaattttattgtttttacaggattttgtatctatagtttacagctgactttaatctgaagcaaacagcataatacatagaggtcgaatggccaggcgaaagagaaagagagataaagttagacactaaaaaaatgaaataaaattattgatataatagaaagataattgttatataaatagacg

SEQ ID NO: 23816 - DNA, 2739 bp, Zea Mays
ctaggttcgttttgagtgtgagccgtccagctcaagattttttttagccctacttttcacaaagctgctgcactcgtttagattctctgaccctgctcccgagaactcatcgacgccgtccatgctgtcctcctctccggcgccgtcacaagagggcgccgccgttccctcctcctgggcggaagctgcgtcctcggcggcgctccggcactaccgctcactggccaagaaagggaagccgcaggggcgcgagtccacggtcctcgccgccatcctcctctctgccccgcaggactcgcacagcctcactgtgctctccatgggcaccggcaccaagtgcctcggtgcctcgatgctcagcgcacgtggggacctcgttcacgacgcgcacgctgaggtcatcgctcgccgcgcgctgctccgcctcgtctactccgagatcggccgtggcgccccgcctgattggctggttgcttccggggatgctgggagatggaggctgagggatgggcactgccttcatctttacatcacacaactcccatgtggagtcatgccagtaccaccatcgcagtctgatttgccaagaaaacagctgaacagtatgaatgtcggtatgcttatactgtcttgatgttggtgttctacataacagtaccttcaaagttttgagctcgtaattttcatgtaccctaacttttaagtatggtagtgtcttccatggtccttgtcccggtaacaattagtttgagaattgtttagtttacaaaccagatgtattttagttatgatggtttcttgattttgtctgctgcccttatatattgataaaacagtagcatggaagtgtggtgctcctagctagttgacttaagtaacctctgtgcaactgtccagctaaactggaacagtggaactggactgcttacattgtttttttatgcttaatggagggtccattttacaccccggtaggtgtttgatacgatccacaagattggtacatgctgacatttgtctctattggttctgccaacagaaattgaattcattgtattgcccacattttaacaaaactatatttcatcctattacatatgtcatatattttctaatataagtatactactctgtatatcagaaattggctttgttcaaaggaaaccagggcgtggtgatacaacatcgtccatgagctgctttgacaaaatcacccgctggagcgttgtaggaattcaaggtgcattgctgtcacatatactggaacccttgtatttgtccaccattactattggacaattacctgatggtactcctgaacggttctctattaaaaataatatcaagaaggccctggatgctcgtctgtcctctctacccaccgaattgccgcctcctttcaaaatgcagaagccaaaggtttttgaggcgcctgtcccaccaacagagtttcaacagattcctggagacgtacgcctcttgacatgcgggtagtatatggtttgttccatgagctggatccttttccccccattttgtctctttctttatgcatccgtttattgtgccattcttttttactgaagcgttagctttgtcgtttatcttttactaggtactcgatttgttggaataaatccggtttgcatgaagttgtcttaggcacaactggtaggaaacaaggaacctcatcaaaggcagcacacttaccctccaccgagtcactggtctgcaagagaagactactagaagcatttttgtcccttgagcatcctttggtgaggcaactaaaatgcgaggagctatcttaccgggcacttaaggatacggctcatgaataccatcacgcgcttgagctcctcaggaaggccccattttttggctgctggcgagctaagcctacatttgttgattcgtttgcagtttcacggtgatgtctcgtgaactggtgaatgccatctccctgtttctttttgtctgttgaaaaaacatactatctccgtcccaaaatatagttctttctagcctatttttttccgatccatattaataaacgtataaatagtgtagaatgaattatattttaggaccgagggagtaggtctgatccagctttgttctgtgtgaaattgtatatgttggtggtccatgaatgaatcaaactgaacttatgcgcgcgtgctgctgtcacttgattccaagcactccctcccggcctccccgcgccagagagttcaagttctgaataatggtaggatttcaagttcttttactcaagaatcgagatgtgaaatttatcgcgcgcgtgactgcgtgagcaccgaacaactaatgcctttctgctcgctcgcttcaatttcctggacgagcctcaccgaggtccaggtcgtttttgaggttcatcggcgtcaagccgtcagccgctgccggtccatttgttctcgacggatggatcctggaatcccgcccgactcccgagactggaggacaagagactccggagaccggatcacaagcaagcaacatgttcgtttggtttggctttaatttgtaacgaattttattgtttttacaggattttgtatctatagtttacagctgactttaatctgaagcaaacagcataatacatagaggtcgaatggccaggcgaaagagaaagagagataaagttagacactaaaaaaatgaaataaaattattgatataatagaaagataattgttatataaatagacg

SEQ ID NO: 23817 - DNA, 2091 bp, Zea Mays
ctaggttcgttttgagtgtgagccgtccagctcaagattttttttagccctacttttcacaaagctgctgcactcgtttagattctctgaccctgctcccgagaactcatcgacgccgtccatgctgtcctcctctccggcgccgtcacaagagggcgccgccgttccctcctcctgggcggaagctgcgtcctcggcggcgctccggcactaccgctcactggccaagaaagggaagccgcaggggcgcgagtccacggtcctcgccgccatcctcctctctgccccgcaggactcgcacagcctcactgtgctctccatgggcaccggcaccaagtgcctcggtgcctcgatgctcagcgcacgtggggacctcgttcacgacgcgcacgctgaggtcatcgctcgccgcgcgctgctccgcctcgtctactccgagatcggccgtggcgccccgcctgattggctggttgcttccggggatgctgggagatggaggctgagggatgggcactgccttcatctttacatcacacaactcccatgtggagtcatgccagtaccaccatcgcagtctgatttgccaagaaaacagctgaacagtatgaatgtcgaaattggctttgttcaaaggaaaccagggcgtggtgatacaacatcgtccatgagctgctttgacaaaatcacccgctggagcgttgtaggaattcaaggtgcattgctgtcacatatactggaacccttgtatttgtccaccattactattggacaattacctgatggtactcctgaacggttctctattaaaaataatatcaagaaggccctggatgctcgtctgtcctctctacccaccgaattgccgcctcctttcaaaatgcagaagccaaaggtttttgaggcgcctgtcccaccaacagagtttcaacagattcctggagacgtacgcctcttgacatgcgggtagtatatggtactcgatttgttggaataaatccggtttgcatgaagttgtcttaggcacaactggtaggaaacaaggaacctcatcaaaggcagcacacttaccctccaccgagtcactggtctgcaaactactagaagcatttttgtcccttgagcatcctttggtgaggcaactaaaatgcgaggagctatcttaccgggcacttaaggatacggctcatgaataccatcacgcgcttgagctcctcaggaaggccccattttttggctgctggcgagctaagcctacatttgttgattcgtttgcagtttcacggtgatgtctcgtgaactggtgaatgccatctccctgtttctttttgtctgttgaaaaaacatactatctccgtcccaaaatatagttctttctagcctatttttttccgatccatattaataaacgtataaatagtgtagaatgaattatattttaggaccgagggagtaggtctgatccagctttgttctgtgtgaaattgtatatgttggtggtccatgaatgaatcaaactgaacttatgcgcgcgtgctgctgtcacttgattccaagcactccctcccggcctccccgcgccagagagttcaagttctgaataatggtaggatttcaagttcttttactcaagaatcgagatgtgaaatttatcgcgcgcgtgactgcgtgagcaccgaacaactaatgcctttctgctcgctcgcttcaatttcctggacgagcctcaccgaggtccaggtcgtttttgaggttcatcggcgtcaagccgtcagccgctgccggtccatttgttctcgacggatggatcctggaatcccgcccgactcccgagactggaggacaagagactccggagaccggatcacaagcaagcaacatgttcgtttggtttggctttaatttgtaacgaattttattgtttttacaggattttgtatctatagtttacagctgactttaatctgaagcaaacagcataatacatagaggtcgaatggccaggcgaaagagaaagagagataaagttagacactaaaaaaatgaaataaaattattgatataatagaaagataattgttatataaatagacg

SEQ ID NO: 23818 - DNA, 1931 bp, Zea Mays
ctaggttcgttttgagtgtgagccgtccagctcaagattttttttagccctacttttcacaaagctgctgcactcgtttagattctctgaccctgctcccgagaactcatcgacgccgtccatgctgtcctcctctccggcgccgtcacaagagggcgccgccgttccctcctcctgggcggaagctgcgtcctcggcggcgctccggcactaccgctcactggccaagaaagggaagccgcaggggcgcgagtccacggtcctcgccgccatcctcctctctgccccgcaggactcgcacagcctcactgtgctctccatgggcaccggcaccaagtgcctcggtgcctcgatgctcagcgcacgtggggacctcgttcacgacgcgcacgctgaggtcatcgctcgccgcgcgctgctccgcctcgtctactccgagatcggccgtggcgccccgcctgattggctggttgcttccggggatgctgggagatggaggctgagggatgggcactgccttcatctttacatcacacaactcccatgtggagtcatgccagtaccaccatcgcagtctgatttgccaagaaaacagctgaacagtatgaatgtcgaaattggctttgttcaaaggaaaccagggcgtggtgatacaacatcgtccatgagctgctttgacaaaatcacccgctggagcgttgtaggaattcaaggtgcattgctgtcacatatactggaacccttgtatttgtccaccattactattggacaattacctgatggtactcctgaacggttctctattaaaaataatatcaagaaggccctggatgctcgtctgtcctctctacccaccgaattgccgcctcctttcaaaatgcagaagccaaaggtttttgaggcgcctgtcccaccaacagagtttcaacagattcctggagacgtacgcctcttgacatgcgggtactcgatttgttggaataaatccggtttgcatgaagttgtcttaggcacaactggtaggaaacaaggaacctcatcaaaggcagcacacttaccctccaccgagtcactggtctgcaaactactagaagcatttttgtcccttgagcatcctttggtgaggcaactaaaatgcgaggagctatcttaccgggcacttaaggatacggctcatgaataccatcacgcgcttgagctcctcaggaaggccccattttttggctgctggcgagctaagcctacatttgttgattcgtttgcagtttcacggtgatgtctcgtgaactggtgaatgccatctccctgtttctttttgtctgttgaaaaaacatactatctccgtcccaaaatatagttctttctagcctatttttttccgatccatattaataaacgtataaatagtgtagaatgaattatattttaggaccgagggagtaggtctgatccagctttgttctgtgtgaaattgtatatgttggtggtccatgaatgaatcaaactgaacttatgcgcgcgtgctgctgtcacttgattccaagcactccctcccggcctccccgcgccaggtccaggtcgtttttgaggttcatcggcgtcaagccgtcagccgctgccggtccatttgttctcgacggatggatcctggaatcccgcccgactcccgagactggaggacaagagactccggagaccggatcacaagcaagcaacatgttcgtttggtttggctttaatttgtaacgaattttattgtttttacaggattttgtatctatagtttacagctgactttaatctgaagcaaacagcataatacatagaggtcgaatggccaggcgaaagagaaagagagataaagttagacactaaaaaaatgaaataaaattattgatataatagaaagataattgttatataaatagacg

SEQ ID NO: 23819 - DNA, 2146 bp, Zea Mays
ctaggttcgttttgagtgtgagccgtccagctcaagattttttttagccctacttttcacaaagctgctgcactcgtttagattctctgaccctgctcccgagaactcatcgacgccgtccatgctgtcctcctctccggcgccgtcacaagagggcgccgccgttccctcctcctgggcggaagctgcgtcctcggcggcgctccggcactaccgctcactggccaagaaagggaagccgcaggggcgcgagtccacggtcctcgccgccatcctcctctctgccccgcaggactcgcacagcctcactgtgctctccatgggcaccggcaccaagtgcctcggtgcctcgatgctcagcgcacgtggggacctcgttcacgacgcgcacgctgaggtcatcgctcgccgcgcgctgctccgcctcgtctactccgagatcggccgtggcgccccgcctgattggctggttgcttccggggatgctgggagatggaggctgagggatgggcactgccttcatctttacatcacacaactcccatgtggagtcatgccagtaccaccatcgcagtctgatttgccaagaaaacagctgaacagtatgaatgtcgaaattggctttgttcaaaggaaaccagggcgtggtgatacaacatcgtccatgagctgctttgacaaaatcacccgctggagcgttgtaggaattcaaggtgcattgctgtcacatatactggaacccttgtatttgtccaccattactattggacaattacctgatggtactcctgaacggttctctattaaaaataatatcaagaaggccctggatgctcgtctgtcctctctacccaccgaattgccgcctcctttcaaaatgcagaagccaaaggtttttgaggcgcctgtcccaccaacagagtttcaacagattcctggagacgtacgcctcttgacatgcgggtagtatatggtttgttccatgagctggatccttttccccccattttgtctctttctttatgcatccgtttattgtgccattcttttttactgaagcgttagctttgtcgtttatcttttactaggtactcgatttgttggaataaatccggtttgcatgaagttgtcttaggcacaactggtaggaaacaaggaacctcatcaaaggcagcacacttaccctccaccgagtcactggtctgcaagagaagactactagaagcatttttgtcccttgagcatcctttggtgaggcaactaaaatgcgaggagctatcttaccgggcacttaaggatacggctcatgaataccatcacgcgcttgagctcctcaggaaggccccattttttggctgctggcgagctaagcctacatttgttgattcgtttgcagtttcacggtgatgtctcgtgaactggtgaatgccatctccctgtttctttttgtctgttgaaaaaacatactatctccgtcccaaaatatagttctttctagcctatttttttccgatccatattaataaacgtataaatagtgtagaatgaattatattttaggaccgagggagtaggtctgatccagctttgttctgtgtgaaattgtatatgttggtggtccatgaatgaatcaaactgaacttatgcgcgcgtgctgctgtcacttgattccaagcactccctcccggcctccccgcgccagagagttcaagttctgaataatggtaggatttcaagttcttttactcaagaatcgagatgtgaaatttatcgcgcgcgtgactgcgtccaggtcgtttttgaggttcatcggcgtcaagccgtcagccgctgccggtccatttgttctcgacggatggatcctggaatcccgcccgactcccgagactggaggacaagagactccggagaccggatcacaagcaagcaacatgttcgtttggtttggctttaatttgtaacgaattttattgtttttacaggattttgtatctatagtttacagctgactttaatctgaagcaaacagcataatacatagaggtcgaatggccaggcgaaagagaaagagagataaagttagacactaaaaaaatgaaataaaattattgatataatagaaagataattgttatataaatagacg

SEQ ID NO: 23820 - DNA, 1940 bp, Zea Mays
ctaggttcgttttgagtgtgagccgtccagctcaagattttttttagccctacttttcacaaagctgctgcactcgtttagattctctgaccctgctcccgagaactcatcgacgccgtccatgctgtcctcctctccggcgccgtcacaagagggcgccgccgttccctcctcctgggcggaagctgcgtcctcggcggcgctccggcactaccgctcactggccaagaaagggaagccgcaggggcgcgagtccacggtcctcgccgccatcctcctctctgccccgcaggactcgcacagcctcactgtgctctccatgggcaccggcaccaagtgcctcggtgcctcgatgctcagcgcacgtggggacctcgttcacgacgcgcacgctgaggtcatcgctcgccgcgcgctgctccgcctcgtctactccgagatcggccgtggcgccccgcctgattggctggttgcttccggggatgctgggagatggaggctgagggatgggcactgccttcatctttacatcacacaactcccatgtggagtcatgccagtaccaccatcgcagtctgatttgccaagaaaacagctgaacagtatgaatgtcgaaattggctttgttcaaaggaaaccagggcgtggtgatacaacatcgtccatgagctgctttgacaaaatcacccgctggagcgttgtaggaattcaaggtgcattgctgtcacatatactggaacccttgtatttgtccaccattactattggacaattacctgatggtactcctgaacggttctctattaaaaataatatcaagaaggccctggatgctcgtctgtcctctctacccaccgaattgccgcctcctttcaaaatgcagaagccaaaggtttttgaggcgcctgtcccaccaacagagtttcaacagattcctggagacgtacgcctcttgacatgcgggtactcgatttgttggaataaatccggtttgcatgaagttgtcttaggcacaactggtaggaaacaaggaacctcatcaaaggcagcacacttaccctccaccgagtcactggtctgcaagagaagactactagaagcatttttgtcccttgagcatcctttggtgaggcaactaaaatgcgaggagctatcttaccgggcacttaaggatacggctcatgaataccatcacgcgcttgagctcctcaggaaggccccattttttggctgctggcgagctaagcctacatttgttgattcgtttgcagtttcacggtgatgtctcgtgaactggtgaatgccatctccctgtttctttttgtctgttgaaaaaacatactatctccgtcccaaaatatagttctttctagcctatttttttccgatccatattaataaacgtataaatagtgtagaatgaattatattttaggaccgagggagtaggtctgatccagctttgttctgtgtgaaattgtatatgttggtggtccatgaatgaatcaaactgaacttatgcgcgcgtgctgctgtcacttgattccaagcactccctcccggcctccccgcgccaggtagtccaggtcgtttttgaggttcatcggcgtcaagccgtcagccgctgccggtccatttgttctcgacggatggatcctggaatcccgcccgactcccgagactggaggacaagagactccggagaccggatcacaagcaagcaacatgttcgtttggtttggctttaatttgtaacgaattttattgtttttacaggattttgtatctatagtttacagctgactttaatctgaagcaaacagcataatacatagaggtcgaatggccaggcgaaagagaaagagagataaagttagacactaaaaaaatgaaataaaattattgatataatagaaagataattgttatataaatagacg

SEQ ID NO: 23821 - DNA, 1959 bp, Zea Mays
gctgacaaaaaatcagtttcagctaggttcgttttgagtgtgagccgtccagctcaagattttttttagccctacttttcacaaagctgctgcactcgtttagattctctgaccctgctcccgagaactcatcgacgccgtccatgctgtcctcctctccggcgccgtcacaagagggcgccgccgttccctcctcctgggcggaagctgcgtcctcggcggcgctccggcactaccgctcactggccaagaaagggaagccgcaggggcgcgagtccacggtcctcgccgccatcctcctctctgccccgcaggactcgcacagcctcactgtgctctccatgggcaccggcaccaagtgcctcggtgcctcgatgctcagcgcacgtggggacctcgttcacgacgcgcacgctgaggtcatcgctcgccgcgcgctgctccgcctcgtctactccgagatcggccgtggcgccccgcctgattggctggttgcttccggggatgctgggagatggaggctgagggatgggcactgccttcatctttacatcacacaactcccatgtggagtcatgccagtaccaccatcgcagtctgatttgccaagaaaacagctgaacagtatgaatgtcgaaattggctttgttcaaaggaaaccagggcgtggtgatacaacatcgtccatgagctgctttgacaaaatcacccgctggagcgttgtaggaattcaaggtgcattgctgtcacatatactggaacccttgtatttgtccaccattactattggacaattacctgatggtactcctgaacggttctctattaaaaataatatcaagaaggccctggatgctcgtctgtcctctctacccaccgaattgccgcctcctttcaaaatgcagaagccaaaggtttttgaggcgcctgtcccaccaacagagtttcaacagattcctggagacgtacgcctcttgacatgcgggtactcgatttgttggaataaatccggtttgcatgaagttgtcttaggcacaactggtaggaaacaaggaacctcatcaaaggcagcacacttaccctccaccgagtcactggtctgcaagagaagactactagaagcatttttgtcccttgagcatcctttggtgaggcaactaaaatgcgaggagctatcttaccgggcacttaaggatacggctcatgaataccatcacgcgcttgagctcctcaggaaggccccattttttggctgctggcgagctaagcctacatttgttgattcgtttgcagtttcacggtgatgtctcgtgaactggtgaatgccatctccctgtttctttttgtctgttgaaaaaacatactatctccgtcccaaaatatagttctttctagcctatttttttccgatccatattaataaacgtataaatagtgtagaatgaattatattttaggaccgagggagtaggtctgatccagctttgttctgtgtgaaattgtatatgttggtggtccatgaatgaatcaaactgaacttatgcgcgcgtgctgctgtcacttgattccaagcactccctcccggcctccccgcgccaggtccaggtcgtttttgaggttcatcggcgtcaagccgtcagccgctgccggtccatttgttctcgacggatggatcctggaatcccgcccgactcccgagactggaggacaagagactccggagaccggatcacaagcaagcaacatgttcgtttggtttggctttaatttgtaacgaattttattgtttttacaggattttgtatctatagtttacagctgactttaatctgaagcaaacagcataatacatagaggtcgaatggccaggcgaaagagaaagagagataaagttagacactaaaaaaatgaaataaaattattgatataatagaaagataattgttatataaatagacg

SEQ ID NO: 23822 - DNA, 1969 bp, Zea Mays
gctgacaaaaaatcagtttcagctaggttcgttttgagtgtgagccgtccagctcaagattttttttagccctacttttcacaaagctgctgcactcgtttagattctctgaccctgctcccgagaactcatcgacgccgtccatgctgtcctcctctccggcgccgtcacaagagggcgccgccgttccctcctcctgggcggaagctgcgtcctcggcggcgctccggcactaccgctcactggccaagaaagggaagccgcaggggcgcgagtccacggtcctcgccgccatcctcctctctgccccgcaggactcgcacagcctcactgtgctctccatgggcaccggcaccaagtgcctcggtgcctcgatgctcagcgcacgtggggacctcgttcacgacgcgcacgctgaggtcatcgctcgccgcgcgctgctccgcctcgtctactccgagatcggccgtggcgccccgcctgattggctggttgcttccggggatgctgggagatggaggctgagggatgggcactgccttcatctttacatcacacaactcccatgtggagtcatgccagtaccaccatcgcagtctgatttgccaagaaaacagctgaacagtatgaatgtcgaaattggctttgttcaaaggaaaccagggcgtggtgatacaacatcgtccatgagctgctttgacaaaatcacccgctggagcgttgtaggaattcaaggtgcattgctgtcacatatactggaacccttgtatttgtccaccattactattggacaattacctgatggtactcctgaacggttctctattaaaaataatatcaagaaggccctggatgctcgtctgtcctctctacccaccgaattgccgcctcctttcaaaatgcagaagccaaaggtttttgaggcgcctgtcccaccaacagagtttcaacagattcctggagacgtacgcctcttgacatgcgggtagtatatggtactcgatttgttggaataaatccggtttgcatgaagttgtcttaggcacaactggtaggaaacaaggaacctcatcaaaggcagcacacttaccctccaccgagtcactggtctgcaagagaagactactagaagcatttttgtcccttgagcatcctttggtgaggcaactaaaatgcgaggagctatcttaccgggcacttaaggatacggctcatgaataccatcacgcgcttgagctcctcaggaaggccccattttttggctgctggcgagctaagcctacatttgttgattcgtttgcagtttcacggtgatgtctcgtgaactggtgaatgccatctccctgtttctttttgtctgttgaaaaaacatactatctccgtcccaaaatatagttctttctagcctatttttttccgatccatattaataaacgtataaatagtgtagaatgaattatattttaggaccgagggagtaggtctgatccagctttgttctgtgtgaaattgtatatgttggtggtccatgaatgaatcaaactgaacttatgcgcgcgtgctgctgtcacttgattccaagcactccctcccggcctccccgcgccaggtccaggtcgtttttgaggttcatcggcgtcaagccgtcagccgctgccggtccatttgttctcgacggatggatcctggaatcccgcccgactcccgagactggaggacaagagactccggagaccggatcacaagcaagcaacatgttcgtttggtttggctttaatttgtaacgaattttattgtttttacaggattttgtatctatagtttacagctgactttaatctgaagcaaacagcataatacatagaggtcgaatggccaggcgaaagagaaagagagataaagttagacactaaaaaaatgaaataaaattattgatataatagaaagataattgttatataaatagacg

SEQ ID NO: 23823 - DNA, 983 bp, Zea Mays
aaggcattcagcaaatcgccaaactcctggggttgccccctcccgtgcccctagctacctaataattgtgcgctcctattcctgtggcctcctaacgcaatcgctcgctcgctcgctcgatatttagccgtggagaggggccgagggagggagcctgctccgctctgcagcacgaacatgatgaagccatcgtgtgtactgcttctttccagccttcttgtagccactcttgcagctacttcttcgtcctctcctccgtattccgtcggcaagcacccagggtggctgctggttctaggtcgcaaaggcagagaactcggccagtcgtcagggtaccattattaccagcatcagagcaagcagcccgagggagtggctatggaggtaaagaaacccgaggaggaggcgacggcgaggcgaacggccgatcagagcggggacgccgagacagggctgatctacagcgcggactacagcagcgtggccatgcatgctgcctctccgccgacggcgaagcccaagcacaggcaccccaccagaccataggaagctgtccttatgtaagccagtcgtatgccgtccgtttcgtgtgtttcttatctcgctggattgtacgagcagaagcacccctgctgtctctgtaaaatataggccctcctgatgtgctgcttctttccttctgttgctctcgctctctgtccctgccattgctgatgagtgctatggcgatatgttgatccaaacacacaaaatgggatggcaacacaattgtacgtcgaatcgtcgttaaagtggccccaaaaaagcaccgtgaaagaaggtagctatgttaggtggcatgctgccgacacacttgcacaacgccgacaagtctactgacatattacattttaaactaaggacctgtttgacgagattataaatctatatgtagctatttggatgactagattatataaatgaagattattgatttttgagac

SEQ ID NO: 23824 - DNA, 406 bp, Zea Mays
ggcattcagcaaatcgccaaactcctggggttgccccctcccgtgcccctagctacctaataattgtgcgctcctattcctgtggcctcctaacgcaatcgctcgctcgctcgctcgatatttagccgtggagaggggccgagggagggagcctgctccgctctgcagcacgaacatgatgaagccatcgtgtgtactgcttctttccagccttcttgtagccactcttgcagctacttcttcgtcctctcctccgtattccgtcggcaagcacccagggtggctgctggttctaggtcgcaaaggcagagaactcggccagtcgtcagggtaccattattaccagcatcagagcaagcagcccgagacagagaacctgacacagctatccgtccatggcgtgcag

SEQ ID NO: 23825 - DNA, 5324 bp, Zea Mays
catcccaacccacgaagcagcagcagcagcagcaggcagccgcctcgccacgcgcccgagcaacgccgccgagagagcaacccgcccgcccgccggtgggcagtgagggcaattcgtcttcggctggtccccgtcccgctcccgcccgccaaccccaattgctcccctcccgaggtcagctcaattcctgctgtttctcggattcgattcggttccgccgggcgcgccatctccctcgccggagatccagcagttacgagctcgccggggcccgggatcatgcctccattgctctagggtttgggcgggtaatccaattggctcgcctggcccgcggcttccatgctcgattcaggcctgccgcgccgctccctgggcggctccttgatcccgcggcggttggtgtggcgccagcggagatgagatcccctccatggccggcgagctgggaattcgggtacggcctcgcgctctgcaggaagcggcgcaagccctaatggtttgatcctacggcgtgctatccccaattcgttggtttctctactccgggtctgatatcggggtttgctgcggtggtaattgcatggacacagtaagggaggaggcatggccaatggctgcaccacagcagcggaggcggcagccgtcagctccacaacagcaacatcagaatggccgtattgatctcagggatctcaaggctcagatgttgaagcggcttggtccggatcgctcgcggagatattttggctacttgaatggctacttatcggagaggctcagcaggcaagactttgaaaagctgtgcctgcagaccctggggcaggagaacctccagctgcacaaccggctaatccgtgcaattctctacaatgcctaccagggaaagtgcccgcctcctccattggatgcagggagacctgtagggtcatcagtaaagaaggcttctcaggctgctgaagtgttgaatacttgcaatagtgatgccaagttgttacaggttcagggattgagatctgtggccacagcacaggatcatactttgaaagatagtatgaataacatgggtccaaagtgtagggtggctgctgtaaatcacaaccaagttactcacggtgcttctggatctctggagaatggtactataaatccaattgagttaaagagattgcattttcaacaatgtgaacctgtagagccaccggcaaagcatccacgtgtggaacagttgccccccaataatatgcttttgcagagaagcatgagtagcactgcagaacgttctgcagaaatattaagaagtcctgtacgagctccactaggaattccattttgttcagcaagtgtgggcggtgcaaggaaatttccacctccaccaattgttacaggtgaggatcacttcaacagctgttttgaggatggtgggctgttcagcaccgagctgctgcatagacgtatggagaaaacagcagaaacactgggtttagctggtgtcactatgcatagtgctgagcttctaaatattgctctggatgagtacatgaaaaacttgattaggtcatctgttgagttagtaggaggtagtgttcagagggatgcaaggaaagggacactaccacacaagaaccaagtttatggaaatcggattaatggtgtctggctgccaaaccatgttcatatgcaatcaggcagtggttcatcaggaactacgaatgagattggaagtaaccaattgatctccgtaagtgattttaaggtagccatgcagctaaaccctcaacatcttggggagaactggccagtccttctggagaagatatgtctatgttcttcagaggaaaatgactgacagatggcgcctttttacttcacattgaagttctgtaccaatgtgcttcttggtgcccatccgatgtacatttgagctggaagtggcaagattgcaggcacaacacagaatatgcacatatggggtcaaagcagaattctgattccacgttcagccgtcggagttgtagtagtgaaagaaagacattctttttttcctgataaatcatgcccaaataaaggaaaacgtcttccggccaagccatgcagcttaggcctcattagcacttacaaggtggatagtgttacatctaaaagtcccaacttctatgtaacatctggcataagggactgggggcagcaaaatgcaagtgttgccttgtaacttataggaaaatgttctgtaagtttctaggtcaggatgtacattattgattgcaaaatttttctaggtatcttcagtactaatttcagggatctcgaatgttaatttcatttaattcttttgtaactgtgctatgagggttatatgttagatccctacctttctaccttgacgtgcgtgagtgtctttgggattaggttggtgcccccatacacttttttggtgtttattatactaaaaaaagcgagatgatgcatcgttgatcacactgttcagagatgccccccatacaccgtgttctttgatgtcaacatgtctgaaacagagatccccgttcaaaattttgtcactttcggttctttctgttgtccaactttttattttccattctgtacaatttcagtaatatcagtattatgtttcagagataagaaaagatatctggtctctggtgtcattttaaggctgtcaaaagcattttcaactatcgttatactgtcctgtaccgcaagtatgttgtatctgaactagtgctcttattggtgttggagaggatcagagaaccttggatgctgactgtttgaatccccaatgttctctggccgtgtgtgttcacttttggttgtcagtctggcatccaggctatcggcccaattgtccaagtttgaactaaaattcagatctgcctttctagtgataacaaggacttgtgtttgtcagtcaggcacccagcctatcagtccacctgtccaagtttgaaccaaaattcagaccgtctgctgccagtggtaacaccttgttcatccataaatttccttgctgtctcattaacggtcgctaaggtgtatatataccagtcttgtgaacatatattgatcacgaaagttttgcttgtgctttgcagactgagtggcaggtttatgtatgaaagatgaggtgggttgccctgctgcttggacatgagaaccctcgcccaataccttcagaaatggaactgtatcccgcgaggtgattgattggctgcggcggcaccgagcaaagtacagagccggtactgtggtctctctatctctcttctcttccttagaaagatgaaactgtgaatatttacatccgggcgaaggaaacgaaaggcgcagcagcagggctgtactgtaccctgtatgtagcatgtaatatgtacacacagccgcagatgagcggctctcgcatcacagggcaaggctgcacagggtggcacggcagctggcaagcaaagccgaaggggcagcaggaggaaggaaaagcatcagggtgtcgtcgtcgtcctcctcctcagcagcgccggcgcgggtccatcttgtggtggcggcgcagccagacgagcgcgcgcgcgccctttggcgagggctcgcgcgccagcctctccgtctcggcccgctgcagcatctcccacatcacctgcacgtcctcgtacgcgcacgtctggacgtcgtcgtggagcttcaccaggacgccgtggccgccgtctgcatgcacacacaggcaagcacgtaacgtatgatcagcttcagctagctgtttgttttcttccgaaaaggaaaaaaaaagtaaaggtgtattacgttacgtatttatttataagaaaaaaatatatgtaattccttgcacacagctggagctatgttgtacacctctctttcgtgtgagcgtgacaggggaacggaaagatgcgatgcttctggcagtggcaggcaggcagcgcatgcgttcctgcgaccgcctgagagatggatgcctgccatgcatggcccatggttgcctcccgctgttcacttgagccactgctcgcagtcacagcatgagcagcgtcagcaacagccagccttcgatgggagtcatcagggacaggactggtcactagtcacgggggacaagaagggttcagagtactcctacagacaaaagaaatcgatcagtataaaccaatcaaggcaggcaggcaggcaggcatgcagttggagagactacaacattcacagtttcacacacacaagaacaacaagaagaagcagcagctttaattatttggatgctggtgttttgatgaatgaatgagtgagtgaggaatggacggataatagtacaaacagcggcggcgatcatgatatattaccttctttcttatgtcgcgtcgtcagccgggcggcggcggcgatccacgcgcgcttcaccggcaccaccaccgccttctgccaccactccatcgacaccgccgcggccgtcagtgccctttgccagacagacagacagagagagagagagaagagagacaggagagatggaagaaagaaggagcaggagagaatcaatcacatggactgtgaacagaagcggcgagcttaagtagtagtagtacaacaaagaaaggaaggaagaaagggggaggagacgccgccgccgcctgctgccagtgccacctaacccctgttggataccctacacgttgcctcgggccctgcgccaggcgcccattcctaatacgctcccccctccctcggccatgcatgcatgctcaccgtctctgccacgcaaataaatcatcaaaaaagctaattaagcaagcaatcccgcgtggaggataaactagctagccgtcgtgtatctgttggattggtttcccacaagcaaagcaaagcgaagcaaagctttattaactggtatcaaggtctctctcacgcatatcaccttctcttctcaccagattatttactagtactagtttagtttccatgtgtagtacgtctgatctgggtcgaatagatgaaagggtagtgtaccaccagatcctttcatgccattgccaaggagagctgagaatcccctagatcacgcatccccggcccagatgtggcaacaaattaagtcaggtataaactgtgtgtcagaaggaggactgatgaggctctttggacgcttccgctcgctccacatacatacatacatgggccactccgtggcacagctcacaagtctttcgagtcaacccaaagactttttggcaatgcacgatgagagtaattaaggacaatgacgatatgcgttcctttcagcagttcatatctgaacccac

SEQ ID NO: 23826 - DNA, 2568 bp, Zea Mays
ctcgtcctccgccctgctggcgcctcttttctctcctgcgcactcctgcgcgatcaaatccgattcaacggccgagaaaaaaaccctgaaagaggaaaacaaaaaaaggaagaagaaaaaaacagggagaacccaaaactgagacgaacacgaagaagcaaggagcaaagcacacacgagcgagcccatcccaacccacgaagcagcagcagcagcagcaggcagccgcctcgccacgcgcccgagcaacgccgccgagagagcaacccgcccgcccgccggtgggcagtgagggcaattcgtcttcggctggtccccgtcccgctcccgcccgccaaccccaattgctcccctcccgagactgagtggcaggtttatgtatgaaagatgaggtgggttgccctgctgcttggacatgagaaccctcgcccaataccttcagaaatggaactgtatcccgcgaggtgattgattggctgcggcggcaccgagcaaagtacagagccggtactgtggtctctctatctctcttctcttccttagaaagatgaaactgtgaatatttacatccgggcgaaggaaacgaaaggcgcagcagcagggctgtactgtaccctgtatgtagcatgtaatatgtacacacagccgcagatgagcggctctcgcatcacagggcaaggctgcacagggtggcacggcagctggcaagcaaagccgaaggggcagcaggaggaaggaaaagcatcagggtgtcgtcgtcgtcctcctcctcagcagcgccggcgcgggtccatcttgtggtggcggcgcagccagacgagcgcgcgcgcgccctttggcgagggctcgcgcgccagcctctccgtctcggcccgctgcagcatctcccacatcacctgcacgtcctcgtacgcgcacgtctggacgtcgtcgtggagcttcaccaggacgccgtggccgccgtctgcatgcacacacaggcaagcacgtaacgtatgatcagcttcagctagctgtttgttttcttccgaaaaggaaaaaaaaagtaaaggtgtattacgttacgtatttatttataagaaaaaaatatatgtaattccttgcacacagctggagctatgttgtacacctctctttcgtgtgagcgtgacaggggaacggaaagatgcgatgcttctggcagtggcaggcaggcagcgcatgcgttcctgcgaccgcctgagagatggatgcctgccatgcatggcccatggttgcctcccgctgttcacttgagccactgctcgcagtcacagcatgagcagcgtcagcaacagccagccttcgatgggagtcatcagggacaggactggtcactagtcacgggggacaagaagggttcagagtactcctacagacaaaagaaatcgatcagtataaaccaatcaaggcaggcaggcaggcaggcatgcagttggagagactacaacattcacagtttcacacacacaagaacaacaagaagaagcagcagctttaattatttggatgctggtgttttgatgaatgaatgagtgagtgaggaatggacggataatagtacaaacagcggcggcgatcatgatatattaccttctttcttatgtcgcgtcgtcagccgggcggcggcggcgatccacgcgcgcttcaccggcaccaccaccgccttctgccaccactccatcgacaccgccgcggccgtcagtgccctttgccagacagacagacagagagagagagagaagagagacaggagagatggaagaaagaaggagcaggagagaatcaatcacatggactgtgaacagaagcggcgagcttaagtagtagtagtacaacaaagaaaggaaggaagaaagggggaggagacgccgccgccgcctgctgccagtgccacctaacccctgttggataccctacacgttgcctcgggccctgcgccaggcgcccattcctaatacgctcccccctccctcggccatgcatgcatgctcaccgtctctgccacgcaaataaatcatcaaaaaagctaattaagcaagcaatcccgcgtggaggataaactagctagccgtcgtgtatctgttggattggtttcccacaagcaaagcaaagcgaagcaaagctttattaactggtatcaaggtctctctcacgcatatcaccttctcttctcaccagattatttactagtactagtttagtttccatgtgtagtacgtctgatctgggtcgaatagatgaaagggtagtgtaccaccagatcctttcatgccattgccaaggagagctgagaatcccctagatcacgcatccccggcccagatgtggcaacaaattaagtcaggtataaactgtgtgtcagaaggaggactgatgaggctctttggacgcttccgctcgctccacatacatacatacatgggccactccgtggcacagctcacaagtctttcgagtcaacccaaagactttttggcaatgcacgatgagagtaattaaggacaatgacgatatgcgttcctttcagcagttcatatctgaacccac

SEQ ID NO: 23827 - DNA, 3723 bp, Zea Mays
ttttaaggctgtcaaaagcattttcaactatcgttatactgtcctgtaccgcaagtatgttgtatctgaactagtgctcttattggtgttggagaggatcagagaaccttggatgctgactgtttgaatccccaatgttctctggccgtgtgtgttcacttttggttgtcagtctggcatccaggctatcggcccaattgtccaagtttgaactaaaattcagatctgcctttctagtgataacaaggacttgtgtttgtcagtcaggcacccagcctatcagtccacctgtccaagtttgaaccaaaattcagaccgtctgctgccagtgactgagtggcaggtttatgtatgaaagatgaggtgggttgccctgctgcttggacatgagaaccctcgcccaataccttcagaaatggaactgtatcccgcgaggtgattgattggctgcggcggcaccgagcaaagtacagagccggtactgtggtctctctatctctcttctcttccttagaaagatgaaactgtgaatatttacatccgggcgaaggaaacgaaaggcgcagcagcagggctgtactgtaccctgtatgtagcatgtaatatgtacacacagccgcagatgagcggctctcgcatcacagggcaaggctgcacagggtggcacggcagctggcaagcaaagccgaaggggcagcaggaggaaggaaaagcatcagggtgtcgtcgtcgtcctcctcctcagcagcgccggcgcgggtccatcttgtggtggcggcgcagccagacgagcgcgcgcgcgccctttggcgagggctcgcgcgccagcctctccgtctcggcccgctgcagcatctcccacatcacctgcacgtcctcgtacgcgcacgtctggacgtcgtcgtggagcttcaccaggacgccgtggccgccgtctgcatgcacacacagctggagctatgttgtacacctctctttcgtgtgagcgtgacaggggaacggaaagatgcgatgcttctggcagtggcaggcaggcagcgcatgcgttcctgcgaccgcctgagagatggatgcctgccatgcatggcccatggttgcctcccgctgttcacttgagccactgctcgcagtcacagcatgagcagcgtcagcaacagccagccttcgatgggagtcatcagggacaggactggtcactagtcacgggggacaagaagggttcagagtactcctacaggtcagattctctctctgtttccgctccagagctgttgctgctcgctccttgtaaacagtagtagaagtagaacccaatgtctccatcgatattacaatacacctgaatgtgtacattaattgattatttggcgtacgcgccacgcagctccacatgagaaagtgacccacgtagtgattaaactatgcatggcacgggtgcgacgttgatgccaactggtcgtttggagattaatcagttgggcatgcatggttaagtcagtgagtcaaataaagatgctagtgtgttgctacagcatgccacggcggcatcgcttcttcgtcactgcatgcaggcccaggagcagccggttgtcacctggcaaatgatggccatgcatgtgtctgtgtgtttttgctaatttcctatagttttcctactgtagatgatgcatgcacggctctatatttacttgagttcctagatgtcgatatctaccaagagtgacgtgtggcgatatatgtagacctggtataggttccggctggctgcgcgcggacacaacgagcattattatggctttcaattccgctatatatactactaccatatgtgatgactgatgagggcagttaccaacttaggccttgtttggatactattaattgtattcacatcaatacacgtgtattggattgaagtgtaagcttaaactaatttatttatgttataatccacttagattaaaatgaatccgagtatccaaacaagtctttatggattaaaatgaatacacttagtctttgttcggttattcttgtaccatatagtttgaataagattagaaaaaaataaaaaagattttttttgccttactcaagatttaaacctactcaatcccaggtatccatatggattgagatcaaaccaaacatgtccttaccatgcgacgtatagtttctatgtctaataattctaaaaaccatgttataattaaaaacaatattttcaatgaatagtctttccggagtacatctcatttaaagtatcattatttccattggatatatagatgtgtgtgtatgcgcgtatagtaatttctataatacgtaaatgataatagtaggtgtatgtatatatggatatagctgtgtgtgcatgcggcttgcgtgcgtgtaataaaatacaagtaaaaactccctcaaagtttgactctagcaagggtacaaacaattaaaacatgcatgcatcctgcacgcacgcactcgccgacagaccagccgagttggagacaccgcaaccgcatgcacctcacatccagccacgtgccgcacgatcgaaacaaaaaaacatcctatcctactactgcaatagtagtacgtacggagtactctgtactcctcctacttggtgcacgcggaaacaagaagaaaaaaaaagcaaagctgcaaacttccatgcatgcgttgtgcggtgtccaagccacactgaccgctgctcacgccatgagagctcgcgctgctttgtcctcttgcacgggagcaaaacgacacggccacgcatgactcatcgatgtgcatgcatgtgagtgcggtgcgcgcgcgcatgatgatcgccgtcagctcgtcaccccgctaatacaatacaaaccgcacgcgcgacacgtgtttggtctgacgacggccagagaagaagcaaactagcttggtggcgacctggctagaactgaacagataaccgatcacaatgttttcatttacacattgattgcaacaaggttagtctagattaagtactgaaacgatgcgttcagcggctctaatctaaaacgaggctagagaccgatcggacgggatctatacatatattcatattgtgaggaattgttcaggatcacggactgatgactgactgttcgccatgcagacaaaagaaatcgatcagtataaaccaatcaaggcaggcaggcaggcaggcatgcagttggagagactacaacattcacagtttcacacacacaagaacaacaagaagaagcagcagctttaattatttggatgctggtgttttgatgaatgaatgagtgagtgaggaatggacggataatagtacaaacagcggcggcgatcatgatatattaccttctttcttatgtcgcgtcgtcagccgggcggcggcggcgatccacgcgcgcttcaccggcaccaccaccgccttctgccaccactccatcgacaccgccgcggccgtcagtgccctttgccagacagacagacagagagagagagagaagagagacaggagagatggaagaaagaaggagcaggagagaatcaatcacatggactgtgaacagaagcggcgagcttaagtagtagtagtacaacaaagaaaggaaggaagaaagggggaggagacgccgccgccgcctgctgccagtgccacctaacccctgttggataccctacacgttgcctcgggccctgcgccaggcgcccattcctaat

SEQ ID NO: 23828 - DNA, 4519 bp, Zea Mays
cgcctcttttctctcctgcgcactcctgcgcgatcaaatccgattcaacggccgagaaaaaaaccctgaaagaggaaaacaaaaaaaggaagaagaaaaaaacagggagaacccaaaactgagacgaacacgaagaagcaaggagcaaagcacacacgagcgagcccatcccaacccacgaagcagcagcagcagcagcaggcagccgcctcgccacgcgcccgagcaacgccgccgagagagcaacccgcccgcccgccggtgggcagtgagggcaattcgtcttcggctggtccccgtcccgctcccgcccgccaaccccaattgctcccctcccgaggtcagctcaattcctgctgtttctcggattcgattcggttccgccgggcgcgccatctccctcgccggagatccagcagttacgagctcgccggggcccgggatcatgcctccattgctctagggtttgggcgggtaatccaattggctcgcctggcccgcggcttccatgctcgattcaggcctgccgcgccgctccctgggcggctccttgatcccgcggcggttggtgtggcgccagcggagatgagatcccctccatggccggcgagctgggaattcggtaagggaggaggcatggccaatggctgcaccacagcagcggaggcggcagccgtcagctccacaacagcaacatcagaatggccgtattgatctcagggatctcaaggctcagatgttgaagcggcttggtccggatcgctcgcggagatattttggctacttgaatggctacttatcggagaggctcagcaggcaagactttgaaaagctgtgcctgcagaccctggggcaggagaacctccagctgcacaaccggctaatccgtgcaattctctacaatgcctaccagggaaagtgcccgcctcctccattggatgcagggagacctgtagggtcatcagtaaagaaggcttctcaggctgctgaagtgttgaatacttgcaatagtgatgccaagttgttacaggttcagggattgagatctgtggccacagcacaggatcatactttgaaagatagtatgaataacatgggtccaaagtgtagggtggctgctgtaaatcacaaccaagttactcacggtgcttctggatctctggagaatggtactataaatccaattgagttaaagagattgcattttcaacaatgtgaacctgtagagccaccggcaaagcatccacgtgtggaacagttgccccccaataatatgcttttgcagagaagcatgagtagcactgcagaacgttctgcagaaatattaagaagtcctgtacgagctccactaggaattccattttgttcagcaagtgtgggcggtgcaaggaaatttccacctccaccaattgttacaggtgaggatcacttcaacagctgttttgaggatggtgggctgttcagcaccgagctgctgcatagacgtatggagaaaacagcagaaacactgggtttagctggtgtcactatgcatagtgctgagcttctaaatattgctctggatgagtacatgaaaaacttgattaggtcatctgttgagttagtaggaggtagtgttcagagggatgcaaggaaagggacactaccacacaagaaccaagtttatggaaatcggattaatggtgtctggctgccaaaccatgttcatatgcaatcaggcagtggttcatcaggaactacgaatgagattggaagtaaccaattgatctccgtaagtgattttaaggtagccatgcagctaaaccctcaacatcttggggagaactggccagtccttctggagaagatatgtctatgttcttcagaggaaaatgactgacagatggcgcctttttacttcacattgaagttctgtaccaatgtgcttcttggtgcccatccgatgtacatttgagctggaagtggcaagattgcaggcacaacacagaatatgcacatatggggtcaaagcagaattctgattccacgttcagccgtcggagttgtagtagtgaaagaaagacattctttttttcctgataaatcatgcccaaataaaggaaaacgtcttccggccaagccatgcagcttaggcctcattagcacttacaaggtggatagtgttacatctaaaagtcccaacttctatgtaacatctggcataagggactgggggcagcaaaatgcaagtgttgccttgtaacttataggaaaatgttctgtaagtttctaggtcaggatgtacattattgattgcaaaatttttctaggtatcttcagtactaatttcagggatctcgaatgttaatttcatttaattcttttgtaactgtgctatgagggttatatgttagatccctacctttctaccttgacgtgcgtgagtgtctttgggattaggttggtgcccccatacacttttttggtgtttattatactaaaaaaagcgagatgatgcatcgttgatcacactgttcagagatgccccccatacaccgtgttctttgatgtcaacatgtctgaaacagagatccccgttcaaaattttgtcactttcggttctttctgttgtccaactttttattttccattctgtacaatttcagtaatatcagtattatgtttcagagataagaaaagatatctggtctctggtgtcattttaaggctgtcaaaagcattttcaactatcgttatactgtcctgtaccgcaagtatgttgtatctgaactagtgctcttattggtgttggagaggatcagagaaccttggatgctgactgtttgaatccccaatgttctctggccgtgtgtgttcacttttggttgtcagtctggcatccaggctatcggcccaattgtccaagtttgaactaaaattcagatctgcctttctagtgataacaaggacttgtgtttgtcagtcaggcacccagcctatcagtccacctgtccaagtttgaaccaaaattcagaccgtctgctgccagtggtaacaccttgttcatccataaatttccttgctgtctcattaacggtcgctaaggtgtatatataccagtcttgtgaacatatattgatcacgaaagttttgcttgtgctttgcagactgagtggcaggtttatgtatgaaagatgaggtgggttgccctgctgcttggacatgagaaccctcgcccaataccttcagaaatggaactgtatcccgcgaggtgattgattggctgcggcggcaccgagcaaagtacagagccggtactgtggtctctctatctctcttctcttccttagaaagatgaaactgtgaatatttacatccgggcgaaggaaacgaaaggcgcagcagcagggctgtactgtaccctgtatgtagcatgtaatatgtacacacagccgcagatgagcggctctcgcatcacagggcaaggctgcacagggtggcacggcagctggcaagcaaagccgaaggggcagcaggaggaaggaaaagcatcagggtgtcgtcgtcgtcctcctcctcagcagcgccggcgcgggtccatcttgtggtggcggcgcagccagacgagcgcgcgcgcgccctttggcgagggctcgcgcgccagcctctccgtctcggcccgctgcagcatctcccacatcacctgcacgtcctcgtacgcgcacgtctggacgtcgtcgtggagcttcaccaggacgccgtggccgccgtctgcatgcacacacaggcaagcacgtaacgtatgatcagcttcagctagctgtttgttttcttccgaaaaggaaaaaaaaagtaaaggtgtattacgttacgtatttatttataagaaaaaaatatatgtaattccttgcacacagctggagctatgttgtacacctctctttcgtgtgagcgtgacaggggaacggaaagatgcgatgcttctggcagtggcaggcaggcaggcaggcatgcagttggagagactacaacattcacagtttcacacacacaagaacaacaagaagaagcagcagctttaattatttggatgctggtgttttgatgaatgaatgagtgagtgaggaatggacggataatagtacaaacagcggcggcgatcatgatatattaccttctttcttatgtcgcgtcgtcagccgggcggcggcggcgatccacgcgcgcttcaccggcaccaccaccgccttctgccaccactccatcgacaccgccgcggccgtcagtgccctttgccagacagacagacagagagagagagagaagagagacaggagagatggaagaaagaaggagcaggagagaatcaatcacatggactgtgaacagaagcggcgagcttaagtagtagtagtacaacaaagaaaggaaggaagaaagggggaggagacgccgccgccgcctgctgccagtgccacctaacccctgttggataccctacacgttgcctcgggccctgcgccaggcgcccattcctaat

SEQ ID NO: 23829 - DNA, 930 bp, Zea Mays
agtcccaattcgtttgaccaaactctgtgaggtgcgagtagaaggattggaaactctggattacctagacaacttacaagatagagctcgttccactgaacaaggcgatgcaattgtttttgaatccgaactggacagaatatatctgggcacaccatcgaaaattgccattattgatcatgagaagaaaagaacatttgttgtgaggaaaggaggccttcctgatgctggtcttgtgaatgctcatctttccttttgcttgctactgaaatagattattatcattgaaataattcaagaatgaagttcacgaggtttcatatattcttcgttacagttgtttggaacccctgggataaaaaagcaaaggctatgtcagattttggggatgatgaatataaacgaatggtatgcgtggaggcggctgctattgaaaagactgtcactctgaagcctggtgaagagtggactggaaagttggaactttctgctgtgccatctagctattacagtggtcagctagaccctgaccgtgtgattcaggattccactgtcccggaggactccatcagctagtccttattctatttttgcaggtagagcattgtatcattatgcataagagatgctggcaacaagggctgtccacatgtttcttccattctgttcaaatcttcggtgtttttttattccgaatgcatatccgaaccaaggaatgtgaaattggtttccgctttttgaggatctatgtagcataatggataagtcggtgtttcgtaccctatttagggatgcttgaagcaagaaacatcttcatgggttgtaaaataaaagaaaaattatctttatatttgatcaattcttttgccttaaaacgtataataagttctatactggagaaaagaaaaaaaaaatatggtgtagaaatgg

SEQ ID NO: 23830 - DNA, 1573 bp, Zea Mays
aaaagcctgaagctgaagcaaagcaaaagcaacgaggagtggagaaaaaaaaaaaagaggcgccgcagcgaggtcgaggtgattattatttaggcacaaggggcgctgtccggaaattccccaaatcgacctgggctggacccagccgcgccccgtctgcctcctgcttctctctccgcttccgcttcctgcgcctccaggctccacttctccgctcggcagtcggcactggaaggacagcatgtcggtctcggcgtcgtcaccggcggcggcggcgggcgatgagaagcaggaggcggcgcccgtcaggcgctgcaagggcgtcaacgacctcgacaaggtcgttctccgcgaggtccggggcagctccgcagaggtgtacttgtatggtgggcatgtgacatcatggaaagatgagcatggagatgaattactttttgttagcaataaggaatcttaattccacttatgtagttctccaactttgggaatctggaaccacatggatttgcaaggaataggacatggagtgttgatgatgatcctccaccatttccagtgccaacctccaatagcgcttatattgacttgatcctcaaacctactgaagatgatttgaagatctggcctcatagtttttgaataccgcctgagggttgcacttagtcctggtggtgatttgatgctaacttcacgtataagaaacactaatgcagacgggaagccattctctttcacttttgcataccacacatacttcaagatttctgatatcagtgaggtgcgagtagaaggattggaaactctggattacctagacaacttacaagatagagctcgttccactgaacaaggcgatgcaattgtttttgaatccgaactggacagaatatatctgggcacaccatcgaaaattgccattattgatcatgagaagaaaagaacatttgttgtgaggaaaggaggccttcctgatgctgttgtttggaacccctgggataaaaaagcaaaggctatgtcagattttggggatgatgaatataaacgaatggtatgcgtggaggcggctgctattgaaaagactgtcactctgaagcctggtgaagagtggactggaaagttggaactttctgctgtgccatctagctattacagtggtcagctagaccctgaccgtgtgattcaggattccactgtcccggaggactccatcagctagtccttattctatttttgcaggtagagcattgtatcattatgcataagagatgctggcaacaagggctgtccacatgtttcttccattctgttcaaatcttcggtgtttttttattccgaatgcatatccgaaccaaggaatgtgaaattggtttccgctttttgaggatctatgtagcataatggataagtcggtgtttcgtaccctatttagggatgcttgaagcaagaaacatcttcatgggttgtaaaataaaagaaaaattatctttatatttgatcaattcttttgccttaaaacgtataataagttctatactggagaaaagaaaaaaaaaatatggtgtagaaatgg

SEQ ID NO: 23831 - DNA, 1487 bp, Zea Mays
gcaaaagcaacgaggagtggagaaaaaaaaaaaagaggcgccgcagcgaggtcgaggtgattattatttaggcacaaggggcgctgtccggaaattccccaaatcgacctgggctggacccagccgcgccccgtctgcctcctgcttctctctccgcttccgcttcctgcgcctccaggctccacttctccgctcggcagtcggcactggaaggacagcatgtcggtctcggcgtcgtcaccggcggcggcggcgggcgatgagaagcaggaggcggcgcccgtcaggcgctgcaagggcgtcaacgacctcgacaaggtcgttctccgcgaggtccggggcagctccgcagaggtgtacttgtatggtgggcatgtgacatcatggaaagatgagcatggagatgaattactttttgttagcaataaggctattttcaagcctccaaaagctatacgtggaggaataccaatatgctttccgcagttctccaactttgggaatctggaaccacatggatttgcaaggaataggacatggagtgttgatgatgatcctccaccatttccagtgccaacctccaatagcgcttatattgacttgatcctcaaacctactgaagatgatttgaagatctggcctcatagtttttgaataccgcctgagggttgcacttagtcctggtggtgatttgatgctaacttcacgtataagaaacactaatgcagacgggaagccattctctttcacttttgcataccacacatacttcaagatttctgatatcagtgaggtgcgagtagaaggattggaaactctggattacctagacaacttacaagatagagctcgttccactgaacaaggcgatgcaattgtttttgaatccgaactggacagaatatatctgggcacaccatcgaaaattgccattattgatcatgagaagaaaagaacatttgttgtgaggaaaggaggccttcctgatgctgttgtttggaacccctgggataaaaaagcaaaggctatgtcagattttggggatgatgaatataaacgaatggtatgcgtggaggcggctgctattgaaaagactgtcactctgaagcctggtgaagagtggactggaaagttggaactttctgctgtgccatctagctattacagtggtcagctagaccctgaccgtgtgattcaggattccactgtcccggaggactccatcagctagtccttattctatttttgcaggtaatatttctagaactagtgtatgcgctatataaagtctgtgaattgaatcaagtaaaaatcaaccgttgtgctaacatcacattctattgtagtattaaactatgatagaccaaatacatttcttgtacatgtaccgtgtcagtactcagtacatgtatgagcaaacacaaatatgatcattgtatcagtcagttcctaataatcaaggaaaccaagttttgttgatcaacaca

SEQ ID NO: 23832 - DNA, 809 bp, Zea Mays
tgctgctcaaacggtgatgctgttgggtatgccacggagcaccagtccgggctgtgccgtcggcttgagcagcgtatagggcacctccacctgccccgtccggttcttcagcgcagggtccgcgttccgcctgtcgatgttgcccgcgacctcctccaacctcgcccggaactccgccagcgcctcggccgccctccgctcgcgcgtccactgctccgtgtccgggcgctgccccaggtacacctccgtgcccttgagccccatcggccccgaggcgatggacatgaagccgagcgcctcggtgaccggcgtgacgctcgccaggaagtccgactccgtgacctccgccccggcgtccgggcccggcaccggccgcgtggtgatggagggcccgttcgggacgaagcccaggtagtcgtactgcccgaagctgatggacgcgtggtacgccgagctcagccagacgacggtggcgcaggtctccacgaggtcggcgacgcagtccatcgccggccaccacggcgcgtccgccaggtcgccgtgccccacgttcctgacctcgctccaccacccctgcagctcgctgtccctcgccaccgcgccgtcgtcggcgtagtagatggcgcagtagtcagccacccacttcttgatcgccgcccacatgtcgagcccgtccaccgcgtacgggtagtcctttatcgccagctccaccgtctctggcttctttggatctccttttgccagacctctgttcgtcatgtatagcatgctcttgatgagatcgttgggaagagcaaggtccgtgaagt

SEQ ID NO: 23833 - DNA, 461 bp, Zea Mays
tcccttccccccgtccgctagctgctgaaatccttcgaggagctcgacgagaagtactcggacttcgacgagtcaggcgggcggcagcggcggtctcgccgcagggccgagcgcgacaggaagaagtccaaatgattggccacgccgccatttgtgtccctgctggtttgagaggggactgacgggggatgaagacgcagctgctacttacaaatttttgggtttcaagtcatgggtgagtgtgagtgtgtgtggttatgaacatctgcctatttcctagctattagccactgaagcagctaaaacgatggatttatttaaaagatcgactccgtaatacattatgtaccctctgttgtgctttcagttctgtcatcgggacttataaaacaaatttcccatggattgcttctagattgcgtagtccaaacgccaatttccctctgcatacaagcttcacg

SEQ ID NO: 23834 - DNA, 512 bp, Zea Mays
ggcgagtgcaaaaacacacgagcgagatgtgtatctgtgattctggataggggcgctggcaccgattggctccggatatcgcagcgtggcggtcgctcagttcagtccgccatggaaggtgcagccggccaaatgctcgtcccgatcctcggcatcgttgccgtggccgccgtgaccttctacaccgtcagcttcatggagatgcgagacaaatccttcgaggagctcgacgagaagtactcggacttcgacgagtcaggcgggcggcagcggcggtctcgccgcagggccgagcgcgacaggaagaagtccaaatgattggccacgccgccatttgtgtccctgctggtttgagaggggactgacgggggatgaagacgcagctgctacttacaaatttttgggtttcaagtcatggttctgtcatcgggacttataaaacaaatttcccatggattgcttctagattgcgtagtccaaacgccaatttccctctgcatacaagcttcacg

SEQ ID NO: 23835 - DNA, 409 bp, Zea Mays
gctgcgtacggttgaagcgcgcgtaaccgcgtgtcaatgggaaacatccataaggaattagaatctactagaagaacatctggatcaatctatatcatccaatcggggcaggtccgctagctcagagcaaggatgtcatctcatggctaccaaaatccatccgacaaacgtacgtatataaacaagagaaagaagaagtgaaataagtgaaacccacgcacgcaagcagcaagcagccaatgcaggcttagttgacggcggtgcagacgcggcgtatctcgccgtcggcgccggtcttgaggccgatcctgccgagcttggccatggcggcgacgaatgcctcgtagaaggcggtggcgttggcggcgaagaggttgacggtgggtcgggagcggcggtcggtgaagag

SEQ ID NO: 23836 - DNA, 2806 bp, Zea Mays
cgtgggttcagtcttgtccatggctgaaggttctgagagatggccgatggggcgagcaagaggctgcaatcttggttcctggtgacatcatcagcatcaagcttggcgatatcgtccctgccgacgctcgtctcctcgagggtgatgcactcaaggttgaccagtctgcgcttactggagaatccctcccggttaccaagggcccaggggacgaagtcttctcgggttccacttgtaagcagggtgagatcgaggccgtggtcattgccaccggagtgcacaccttcttcggcaaggccgctcatcttgtggacagcaccaaccaggtcggacacttccagcaggtgctgacagcaatcggtaacttctgcatctgctccattggggtcggcatcctcgtcgagatcatcgtcatgttcccaatccagcaccggaagtaccgcagcggaatcgagaacctgttggtcctcttgatcggtggtatcccaatcgccatgcctaccgtgctttcagttaccatggccattggttcgcacaagctgtcacagcagggtgccatcactaagaggatgactgccattgaggagatggctggtatggacgtgctttgcagtgacaaaaccggcacactcaccctcaacaagcttagcgtcgataagaacctcgtcgaggtgttctgcaaaggcgtcgacaaagaccatgtgttgctgttggctgcaagggcttcaaggactgagaaccaggacgctatcgatgccgccatggttggcatgcttgctgatcctaaggaggccagggctggtataagggaaatccacttcttgcccttcaaccctgttgataagaggactgctctgacgtacattgatgccgatggcaactggcaccgtgtcagcaagggtgctcctgaacagattcttgacctgtgccactgcaaggaggatctgaggcggaaggtgcactctattatcgacaagtatgccgagcgtggtcttcgttcgcttgctgttgccagacaggaagtacctgagaaaaacaaggagtcccctggtggaccatggcagttcgttggtctgttgcccctgtttgatccgcctaggcatgacagcgctgagacaattcgcaaggctcttgttcttggtgttaacgtcaagatgatcacgggtgatcagcttgctattggtaaggagactggaaggaggcttggcatgggtaccaacatgtatccatcctctgcgctgctcggccaaaacaaggatgctacgcttgaagcgcttcctgtagatgagctcattgagaaggccgatggttttgccggagtcttccctgaacacaagtacgagatcgtgaagagactgcaggagaagaagcacatcgttggtatgactggagatggtgtcaacgatgccccggctcttaagaaggctgacatcggtattgctgttgcggatgctactgacgctgcgaggagtgcttccgatattgtccttactgagccaggtcttagcgtcattatcagcgccgtcctcaccagcagatgcatcttccagaggatgaagaactacaccatctatgcagtttccatcacaatccgtatagtgctcggatttatgctcattgcgttgatctggcaatacgatttctctcccttcatggttcttatcattgccattctcaatgacggtactatcatgaccatctctaaggacagagttaagccatctccgttgcccgacagttggaagctgaaggagatctttgctacgggcatcgtgcttggaagctaccttgctctgatgactgtcattttcttctgggctatgcacaagaccgacttcttctcggacaaattcggtgtgaggtcgatcagggacagcgagcatgagatgatgtccgccctgtacctccaagtcagtatcgtgagccaggctctgatcttcgtcacccgttcccgtagctggtccttcgtggagcgccctggtctgctcctggtcaccgcgttcctgctcgctcaacttgttgccaccttcctcgctgtctacgccaactggggcttcgccaggatcaagggtatcggctggggctgggcaggtgtggtctggctctacagcatcgtcttctacttccccctggacctgctcaagttcttcatccgcttcgtgctcagcggcagggcatgggacaacctcctcgagaacaagaccgccttcaccaccaagaaggactacgggcgggaagagagggaggcgcagtgggccaccgcgcagaggacgctgcacgggctccagccgccggaggcttcctccaacacgctgttcaacgacaagagcagctaccgcgagctgtccgagatcgccgagcaggccaagagacgagctgagatcgcgaggctgagggagctcaacaccctcaagggccacgtggagtcggtggtcaagctcaagggcctggacatcgacaccatccagcagaactacacggtgtgagagcccctctgctgcgatgtcgacgacaacacctttgctgcccgacgggagccatctgattacagataaaaattttcctagctgtaaagctctctataccaccagatactgccatatgatggtatggttgggtacccgtctttctagggagtttcttttctctctctcttttcttattgttatgtttttcaatagtggagtgtgcgcgtgttgtaatcgtttttacctgcgttttcctctaactagccggtgatctcgcgggaagcgaggtgaagaaataatgcaactaaaattctctgccaaaagcattgttccttctc

SEQ ID NO: 23837 - DNA, 3171 bp, Zea Mays
ccgattccacgcgcagggcaagagcaagggcatgcaggagaacatccccatcgaggaggtgttcgagcagctgaaatgcacccgcgaggggctgagctccagcgagggccagcagcgtctcgagatctttggccccaacaggctcgaggagaagaaggagagcaaggtcctcaagttccttgggttcatgtggaacccgctgtcatgggtcatggagatggctgccatcatggctattgcactcgccaacggtggtggcaagcccccggactggcaggacttcgtcggtatcatcgtgctcttggttatcaactccaccatctccttcattgaggagaacaatgccggcaacgccgccgccgcactcatggccaaccttgctcccaaaaccaaggttctgagagatggccgatggggcgagcaagaggctgcaatcttggttcctggtgacatcatcagcatcaagcttggcgatatcgtccctgccgacgctcgtctcctcgagggtgatgcactcaaggttgaccagtctgcgcttactggagaatccctcccggttaccaagggcccaggggacgaagtcttctcgggttccacttgtaagcagggtgagatcgaggccgtggtcattgccaccggagtgcacaccttcttcggcaaggccgctcatcttgtggacagcaccaaccaggtcggacacttccagcaggtgctgacagcaatcggtaacttctgcatctgctccattggggtcggcatcctcgtcgagatcatcgtcatgttcccaatccagcaccggaagtaccgcagcggaatcgagaacctgttggtcctcttgatcggtggtatcccaatcgccatgcctaccgtgctttcagttaccatggccattggttcgcacaagctgtcacagcagggtgccatcactaagaggatgactgccattgaggagatggctggtatggacgtgctttgcagtgacaaaaccggcacactcaccctcaacaagcttagcgtcgataagaacctcgtcgaggtgttctgcaaaggcgtcgacaaagaccatgtgttgctgttggctgcaagggcttcaaggactgagaaccaggacgctatcgatgccgccatggttggcatgcttgctgatcctaaggaggccagggctggtataagggaaatccacttcttgcccttcaaccctgttgataagaggactgctctgacgtacattgatgccgatggcaactggcaccgtgtcagcaagggtgctcctgaacagattcttgacctgtgccactgcaaggaggatctgaggcggaaggtgcactctattatcgacaagtatgccgagcgtggtcttcgttcgcttgctgttgccagacaggaagtacctgagaaaaacaaggagtcccctggtggaccatggcagttcgttggtctgttgcccctgtttgatccgcctaggcatgacagcgctgagacaattcgcaaggctcttgttcttggtgttaacgtcaagatgatcacgggtgatcagcttgctattggtaaggagactggaaggaggcttggcatgggtaccaacatgtatccatcctctgcgctgctcggccaaaacaaggatgctacgcttgaagcgcttcctgtagatgagctcattgagaaggccgatggttttgccggagtcttccctgaacacaagtacgagatcgtgaagagactgcaggagaagaagcacatcgttggtatgactggagatggtgtcaacgatgccccggctcttaagaaggctgacatcggtattgctgttgcggatgctactgacgctgcgaggagtgcttccgatattgtccttactgagccaggtcttagcgtcattatcagcgccgtcctcaccagcagatgcatcttccagaggatgaagaactacaccatctatgcagtttccatcacaatccgtatagtgctcggatttatgctcattgcgttgatctggcaatacgatttctctcccttcatggttcttatcattgccattctcaatgacggtactatcatgaccatctctaaggacagagttaagccatctccgttgcccgacagttggaagctgaaggagatctttgctacgggcatcgtgcttggaagctaccttgctctgatgactgtcattttcttctgggctatgcacaagaccgacttcttctcggacaaattcggtgtgaggtcgatcagggacagcgagcatgagatgatgtccgccctgtacctccaagtcagtatcgtgagccaggctctgatcttcgtcacccgttcccgtagctggtccttcgtggagcgccctggtctgctcctggtcaccgcgttcctgctcgctcaacttgttgccaccttcctcgctgtctacgccaactggggcttcgccaggatcaagggtatcggctggggctgggcaggtgtggtctggctctacagcatcgtcttctacttccccctggacctgctcaagttcttcatccgcttcgtgctcagcggcagggcatgggacaacctcctcgagaacaagaccgccttcaccaccaagaaggactacgggcgggaagagagggaggcgcagtgggccaccgcgcagaggacgctgcacgggctccagccgccggaggcttcctccaacacgctgttcaacgacaagagcagctaccgcgagctgtccgagatcgccgagcaggccaagagacgagctgagatcgcgaggctgagggagctcaacaccctcaagggccacgtggagtcggtggtcaagctcaagggcctggacatcgacaccatccagcagaactacacggtgtgagagcccctctgctgcgatgtcgacgacaacacctttgctgcccgacgggagccatctgattacagataaaaattttcctagctgtaaagctctctataccaccagatactgccatatgatggtatggttgggtacccgtctttctagggagtttcttttctctctctcttttcttattgttatgtttttcaatagtggagtgtgcgcgtgttgtaatcgtttttacctgcgttttcctctaactagccggtgatctcgcgggaagcgaggtgaagaaataatgcaactaaaattctctgccaaaagcattgttccttctc

SEQ ID NO: 23838 - DNA, 1811 bp, Zea Mays
cagcctggcgcacggatccgccccgcgccgtacgatcgttatccaccccggtcacggacggaggccgcggccggcggcggctccgccaaggaaaggaaagggaatctccgcgtcccgatcccacgcacgcctaccggggctcgtaaattcaccgagacccacccccccaagcctgcgccgtccgctccgccccgttatcctccgtccgccatgggtgggctcgaggagatcaagaacgaagccgtcgatctggagaacatccccatcgaggaggtgttcgagcagctgaaatgcacccgcgaggggctgagctccagcgagggccagcagcgtctcgagatctttggccccaacaggctcgaggagaagaagaagcacatcgttggtatgactggagatggtgtcaacgatgccccggctcttaagaaggctgacatcggtattgctgttgcggatgctactgacgctgcgaggagtgcttccgatattgtccttactgagccaggtcttagcgtcattatcagcgccgtcctcaccagcagatgcatcttccagaggatgaagaactacaccatctatgcagtttccatcacaatccgtatagtgctcggatttatgctcattgcgttgatctggcaatacgatttctctcccttcatggttcttatcattgccattctcaatgacggtactatcatgaccatctctaaggacagagttaagccatctccgttgcccgacagttggaagctgaaggagatctttgctacgggcatcgtgcttggaagctaccttgctctgatgactgtcattttcttctgggctatgcacaagaccgacttcttctcggacaaattcggtgtgaggtcgatcagggacagcgagcatgagatgatgtccgccctgtacctccaagtcagtatcgtgagccaggctctgatcttcgtcacccgttcccgtagctggtccttcgtggagcgccctggtctgctcctggtcaccgcgttcctgctcgctcaacttgttgccaccttcctcgctgtctacgccaactggggcttcgccaggatcaagggtatcggctggggctgggcaggtgtggtctggctctacagcatcgtcttctacttccccctggacctgctcaagttcttcatccgcttcgtgctcagcggcagggcatgggacaacctcctcgagaacaagaccgccttcaccaccaagaaggactacgggcgggaagagagggaggcgcagtgggccaccgcgcagaggacgctgcacgggctccagccgccggaggcttcctccaacacgctgttcaacgacaagagcagctaccgcgagctgtccgagatcgccgagcaggccaagagacgagctgagatcgcgaggctgagggagctcaacaccctcaagggccacgtggagtcggtggtcaagctcaagggcctggacatcgacaccatccagcagaactacacggtgtgagagcccctctgctgcgatgtcgacgacaacacctttgctgcccgacgggagccatctgattacagataaaaattttcctagctgtaaagctctctataccaccagatactgccatatgatggtatggttgggtacccgtctttctagggagtttcttttctctctctcttttcttattgttatgtttttcaatagtggagtgtgcgcgtgttgtaatcgtttttacctgcgttttcctctaactagccggtgatctcgcgggaagcgaggtgaagaaataatgcaactaaaattctctgccaaaagcattgttccttctc

SEQ ID NO: 23839 - DNA, 2766 bp, Zea Mays
caacggcacgctcccgctaaaaccagtggccgtagcagttcgcggctcccctgcctcacgcttcctgttcgaactcttcgtcgcctcacactggtgctcctcctctccccatcgctccgccactcccatggcgtccctcttcggggctggccgccggcgatcaccggaggacgacggcgaggacgatagatccggcagagggaggaccaagcgcttccgcctctccccggaggaggacgcagcgtcgccggcggaggcggggcccggcgcggcgacggagaccggctggctctccggcttcgtctacggagcgaagagggtcatttcttccgttttactgttctcctcgcccgaggagaccggctcgggggaggacgaggaagaggagaaggacgacgacgacgacgaagagggcatccacttgaatgaacatgaagctactcatgacactcatggagcaatagttccttatagcgagccaaagcttactattgagcaaatggttatgaaggaaacattctcaagggatgaatgtgataggatggtagagctaataaaatcaagagttagagattctacttttcctgaagcccatgagtatgtaaagccagaagaaatccctagtaggaatgcaggcattacacatgacttcacaggaacatggcgctccttgagccgtgatcggaatgtccctgaatcagttccactctctagtatgagaacaagacctggtagtttttctcaaggctctccactccaagcatcacctgagctatgcactgcagcagttacggaagcaaaaaaatggttggaagagaaaaggcagggactgggcttcaagcctgaagacaatggaccatgcacactaaatactgatatacttagttctcatgatgactctgtctctgacctgggttctccagttgatttagcgaaatcatacatgcagtcgttacctccttggaaatccccattcttaggccgtcagaagtttaacacaccaccctccaaatattttatctcatcagcagaggtaactacaaaggaggactacctttccagcttttggacaaaattggaggaatcacaaagagctcgtattggatcatctggaggttctgctgatgctcctaaattctggaattatggttctaattccaggttatttgagaatgacacctctatattttcattgggcactgatgaaaaagttggagatcctaccaaaatctataatgggtctgggaaatttgcagcaacagaaccagttggtggatgctgcttacctattacacccactgaagatagaactgatggtattactgagcctgtggaccttgcaaggaacaacgggaatgcaccccaagaaaaccaggttgcatctgaaattctccctgataaagttccagagggtaacgatgtgtcttccactggaattactaaggacactactggccatagtggagatgttaaagctcccacttcagaaccacatttaggggaaacacgtatcaactcagcatcagaatccataccaaatgatgcgggccccccaacccagaacaaaaagaacgggtcgacgaccaagaaaacattagtaaacggtctcgtggaccaatcaaatgccaactccgggctagaatcttcaggaaacgataaccctagctacaccaactcgagcagtgctgtgccacccgcaagcacccaaccagtcgagtctgcagccgctgctgtagacgttgattcggtcgagaaaggcccaggtacgacaccagagcaaccggcgaagcgaagggcacccaacgttcgacgaggacagagaagggtgctgcgaagcgcaacgagagaaggaagagcgacgtaggggatattgtgttatagcgaattaaagggggcaacacatgatccctagctaggttaactagagctatagcaatgactggccgtttccacgtacgagatgcgtagtgtgcatcaaactgtatccatgttgtattatcgtaggagtcgtaggccttacagtgaccacgcgtactggttagagttggtcgttcaggaccagtagctgcttgatttgggtttcggtgtcaggatttggttaggtcctgtgtgtagtttgcgcagtcggaaagagactgttggttgtattgcaggttgcaagcagactgtgttgtagcgaccaggtagtaaatccagcgagagctgctcctctctctctctctctctctctctctctctctctctctctctctctctctctctctctctctctgtatgatgatggacgctggtgtttcaggcgatgtactcatgtaacccttgttttgtactgagctatgggcctttctgtgttgtgcgtgctcgcatgcatgagctgcttcctttttttttcctttttctttttttaacgacaatacgctgacaattttttttttctttttctgtgcttgaagcagtgcaggctgtcgcatcgcgccaccactgcatggtttaagatacgtgaccactgactggacgcatgctctgttgattcataggatggggcggcggggctcgtcttcgcatgcacaacacaggctgttcttgcatgggccaaacaggatacggcgaaacggatcgctcctggaggagtgggtgtcggatctcggagacccaggagccccagtgcctctgcctcactcctctgaacctctgcagcttcggcatggcgatgggcggccactctgctccgcggtctctgtctgttcggtggtgcgtggacttgag

SEQ ID NO: 23840 - DNA, 1577 bp, Zea Mays
ctgcctcacgcttcctgttcgaactcttcgtcgcctcacactggtgctcctcctctccccatcgctccgccactcccatggcgtccctcttcggggctggccgccggcgatcaccggaggacgacggcgaggacgatagatccggcagagggaggaccaagcgcttccgcctctccccggaggaggacgcagcgtcgccggcggaggcggggcccggcgcggcgacggagaccggctggctctccggcttcgtctacggagcgaagagggtcatttcttccgttttactgttctcctcgcccgaggagaccggctcgggggaggacgaggaagaggagaaggacgacgacgacgacgaagagggcatccacttgaatgaacatgaagctactcatgacactcatggagcaatagttccttatagcgagccaaagcttactattgagcaaatggttatgaaggaaacattctcaagggatgaatgtgataggatggtagagctaataaaatcaagagttagagattctacttttcctgaagcccatgagtatgtaaagccagaagaaatccctagtaggaatgcaggcattacacatgacttcacaggaacatggcgctccttgagccgtgatcggaatgtccctgaatcagttccactctctagtatgagaacaagacctggtagtttttctcaaggctctccactccaagcatcacctgagctatgcactgcagcagttacggaagcaaaaaaatggttggaagagaaaaggcagggactgggcttcaagcctgaagacaatggaccatgcacactaaatactgatatacttagttctcatgatgactctgtctctgacctgggttctccagttgatttagcgaaatcatacatgcagtcgttacctccttggaaatccccattcttaggccgtcagaagtttaacacaccaccctccaaatattttatctcatcagcagaggtaactacaaaggaggactacctttccagcttttggacaaaattggaggaatcacaaagagctcgtattggatcatctggaggttctgctgatgctcctaaattctggaattatggttctaattccaggttatttgagaatgacacctctatattttcattgggcactgatgaaaaagttggagatcctaccaaaatctataatgggtctgggaaatttgcagcaacagaaccagttggtggatgctgcttacctattacacccactgaagatagaactgatggtattactgagcctgtggaccttgcaaggaacaacgggaatgcaccccaagaaaaccaggttgcatctgaaattctccctgataaagttccagagggtaacgatgtgtcttccactggaattactaaggacactactggccatagtggagatgttaaagctcccacttcagaaccacatttaggggaaacacgtatcaactcagcatcagtgcaggctgtcgcatcgcgccaccactgcatggtttaagatacgtgaccactgactggacgcatgctctgttgattcataggatggggcggcggggctcgt

SEQ ID NO: 23841 - DNA, 2165 bp, Zea Mays
cggctcccctgcctcacgcttcctgttcgaactcttcgtcgcctcacactggtgctcctcctctccccatcgctccgccactcccatggcgtccctcttcggggctggccgccggcgatcaccggaggacgacggcgaggacgatagatccggcagagggaggaccaagcgcttccgcctctccccggaggaggacgcagcgtcgccggcggaggcggggcccggcgcggcgacggagaccggctggctctccggcttcgtctacggagcgaagagggtcatttcttccgttttactgttctcctcgcccgaggagaccggctcgggggaggacgaggaagaggagaaggacgacgacgacgacgaagagggcatccacttgaatgaacatgaagctactcatgacactcatggagcaatagttccttatagcgagccaaagcttactattgagcaaatggttatgaaggaaacattctcaagggatgaatgtgataggatggtagagctaataaaatcaagagttagagattctacttttcctgaagcccatgagtatgtaaagccagaagaaatccctagtaggaatgcaggcattacacatgacttcacaggaacatggcgctccttgagccgtgatcggaatgtccctgaatcagttccactctctagtatgagaacaagacctggtagtttttctcaaggctctccactccaagcatcacctgagctatgcactgcagcagttacggaagcaaaaaaatggttggaagagaaaaggcagggactgggcttcaagcctgaagacaatggaccatgcacactaaatactgatatacttagttctgtaactacaaaggaggactacctttccagcttttggacaaaattggaggaatcacaaagagctcgtattggatcatctggaggttctgctgatgctcctaaattctggaattatggttctaattccaggttatttgagaatgacacctctatattttcattgggcactgatgaaaaagttggagatcctaccaaaatctataatgggtctgggaaatttgcagcaacagaaccagttggtggatgctgcttacctattacacccactgaagatagaactgatggtattactgagcctgtggaccttgcaaggaacaacgggaatgcaccccaagaaaaccaggttgcatctgaaattctccctgataaagttccagagggtaacgatgtgtcttccactggaattactaaggacactactggccatagtggagatgttaaagctcccacttcagaaccacatttaggggaaacacgtatcaactcagcatcagaatccataccaaatgatgcgggccccccaacccagaacaaaaagaacgggtcgacgaccaagaaaacattagtaaacggtctcgtggaccaatcaaatgccaactccgggctagaatcttcaggaaacgataaccctagctacaccaactcgagcagtgctgtgccacccgcaagcacccaaccagtcgagtctgcagccgctgctgtagacgttgattcggtcgagaaaggcccaggtacgacaccagagcaaccggcgaagcgaagggcacccaacgttcgacgaggacagagaagggtgctgcgaagcgcaacgagagaaggaagagcgacgtaggggatattgtgttatagcgaattaaagggggcaacacatgatccctagctaggttaactagagctatagcaatgactggccgtttccacgtacgagatgcgtagtgtgcatcaaactgtatccatgttgtattatcgtaggagtcgtaggccttacagtgaccacgcgtactggttagagttggtcgttcaggaccagtagctgcttgatttgggtttcggtgtcaggatttggttaggtcctgtgtgtagtttgcgcagtcggaaagagactgttggttgtattgcaggttgcaagcagactgtgttgtagcgaccaggtagtaaatccagcgagagctgctcctctctctctctctctctctctctctctctctctctctctctctctctctctctctctctctctgtatgatgatggacgctggtgtttcaggcgatgtactcatgtaacccttgttttgtactgagctatgggcctttctgtg

SEQ ID NO: 23842 - DNA, 1720 bp, Zea Mays
ctgcctcacgcttcctgttcgaactcttcgtcgcctcacactggtgctcctcctctccccatcgctccgccactcccatggcgtccctcttcggggctggccgccggcgatcaccggaggacgacggcgaggacgatagatccggcagagggaggaccaagcgcttccgcctctccccggaggaggacgcagcgtcgccggcggaggcggggcccggcgcggcgacggagaccggctggctctccggcttcgtctacggagcgaagagggtcatttcttccgttttactgttctcctcgcccgaggagaccggctcgggggaggacgaggaagaggagaaggacgacgacgacgacgaagagggcatccacttgaatgaacatgaagctactcatgacactcatggagcaatagttccttatagcgagccaaagcttactattgagcaaatggttatgaaggaaacattctcaagggatgaatgtgataggatggtagagctaataaaatcaagagttagagattctacttttcctgaagcccatgagtatgtaaagccagaagaaatccctagtaggaatgcaggcattacacatgacttcacaggaacatggcgctccttgagccgtgatcggaatgtccctgaatcagttccactctctagtatgagaacaagacctggtagtttttctcaaggctctccactccaagcatcacctgagctatgcactgcagcagttacggaagcaaaaaaatggttggaagagaaaaggcagggactgggcttcaagcctgaagacaatggaccatgcacactaaatactgatatacttagttctcatgatgactctgtctctgacctgggttctccagttgatttagcgaaatcatacatgcagtcgttacctccttggaaatccccattcttaggccgtcagaagtttaacacaccaccctccaaatattttatctcatcagcagaggtaactacaaaggaggactacctttccagcttttggacaaaattggaggaatcacaaagagctcgtattggatcatctggaggttctgctgatgctcctaaattctggaattatggttctaattccaggttatttgagaatgacacctctatattttcattgggcactgatgaaaaagttggagatcctaccaaaatctataatgggtctgggaaatttgcagcaacagaaccagttggtggatgctgcttacctattacacccactgaagatagaactgatggtattactgagcctgtggaccttgcaaggaacaacgggaatgcaccccaagaaaaccaggttgcatctgaaattctccctgataaagttccagagggtaacgatgtgtcttccactggaattactaaggacactactggccatagtggagatgttaaagctcccacttcagaaccacatttaggggaaacacgtatcaactcagcatcagtatctacatccaaacggacccttagattatccagctgagagcagggagcgattggccacatatcatggacaaccttgcctgcaggctcaggaaaggcataattgctgatgttagccagtaaatcatgtcttcaattggaatgccactacacagacaagtttgagacgatttatgttgaaaaaaaaactacaactcctggttccaggtttatatgggttttacaaccatcatgaggcttattgat

SEQ ID NO: 23843 - DNA, 1697 bp, Zea Mays
ctgcctcacgcttcctgttcgaactcttcgtcgcctcacactggtgctcctcctctccccatcgctccgccactcccatggcgtccctcttcggggctggccgccggcgatcaccggaggacgacggcgaggacgatagatccggcagagggaggaccaagcgcttccgcctctccccggaggaggacgcagcgtcgccggcggaggcggggcccggcgcggcgacggagaccggctggctctccggcttcgtctacggagcgaagagggtcatttcttccgttttactgttctcctcgcccgaggagaccggctcgggggaggacgaggaagaggagaaggacgacgacgacgacgaagagggcatccacttgaatgaacatgaagctactcatgacactcatggagcaatagttccttatagcgagccaaagcttactattgagcaaatggttatgaaggaaacattctcaagggatgaatgtgataggatggtagagctaataaaatcaagagttagagattctacttttcctgaagcccatgagtatgtaaagccagaagaaatccctagtaggaatgcaggcattacacatgacttcacaggaacatggcgctccttgagccgtgatcggaatgtccctgaatcagttccactctctagtatgagaacaagacctggtagtttttctcaaggctctccactccaagcatcacctgagctatgcactgcagcagttacggaagcaaaaaaatggttggaagagaaaaggcagggactgggcttcaagcctgaagacaatggaccatgcacactaaatactgatatacttagttctcatgatgactctgtctctgacctgggttctccagttgatttagcgaaatcatacatgcagtcgttacctccttggaaatccccattcttaggccgtcagaagtttaacacaccaccctccaaatattttatctcatcagcagaggtaactacaaaggaggactacctttccagcttttggacaaaattggaggaatcacaaagagctcgtattggatcatctggaggttctgctgatgctcctaaattctggaattatggttctaattccaggttatttgagaatgacacctctatattttcattgggcactgatgaaaaagttggagatcctaccaaaatctataatgggtctgggaaatttgcagcaacagaaccagttggtggatgctgcttacctattacacccactgaagatagaactgatggtattactgagcctgtggaccttgcaaggaacaacgggaatgcaccccaagaaaaccaggttgcatctgaaattctccctgataaagttccagagggtaacgatgtgtcttccactggaattactaaggacactactggccatagtggagatgttaaagctcccacttcagaaccacatttaggggaaacacgtatcaactcagcatcagagattatccagctgagagcagggagcgattggccacatatcatggacaaccttgcctgcaggctcaggaaaggcataattgctgatgttagccagtaaatcatgtcttcaattggaatgccactacacagacaagtttgagacgatttatgttgaaaaaaaaactacaactcctggttccaggtttatatgggttttacaaccatcatgaggcttattgat

SEQ ID NO: 23844 - DNA, 1788 bp, Zea Mays
atcaccattcaccactgaatcagctagactgctctctcatcagctcaacgatttaggcatttagccctgcgggcagcagttgcgagcaaaggccaaagaacacggagaggctaaggctatccacacccacacagagtctaatcaagcttacagcccagaagcgtcacagacatggggaacgcagcagttgcaatcaaaggtgccgcgtcgtgaggaagaagataaagaagaaaatcgtaaagaaagtcttggaggagatcgagcggaagaaccgcgtgggggcagcctgcgacgccttggaagacgtggtgatcgagatcggtcccgtggagaagttcctcaacgagatcctgaacgagaagccgatgcgtttcagctccgagcagctggcggcctgcaccaagaactactcgtcggagctggggtccggcggctacggcgtggtctacaagggtgagctgcccaacggcctgctggtggccgtgaaggtgctcaaggtgtccatgaacaagaaggtgcaggaggcgttcatggcggagatcggcaccatcgggcggacgtaccacgtgcacctcgtccgcctctacggcttctgcttcgacgcggacaccaaggcgctggtgtacgagttcctggagaaggggtcgctcgagaagtacctctactgtgacgagggcagcacggccacgcggctggagtgggcaacgctgcacggcatcgccgtcggcacggcgaaggggatcaggtacctgcacgaggagtgccagcagcggatcgtgcactacgacatcaagccggccaacatcctgctcacggccgactacaccccgaaggtggccgacttcgggctggcacggctgggcgagcgcgagaacacgcacatgtcactgaccggcggcggccgtgggacgcccgggtacgcggcgccggagctgtggatggcgctgccggcttcggagaagtgcgacgtgtacagctttggaatggtgttgttcgagatcctagggcggcgccggaactacgacccctgccagggcgagagcaaggagtggttcccgagatgggtctgggagaggtacgcgcagggtgagatcgaggacgtcgtggcctgcgacgggatcgttggagacgcggacagagagaaggcggagatgatgtgcaaggtggcgctgtggtgcgtgcagttccagccgtcggcgcgaccgacgatgagcagcgtggtgcggatgctggagggggagatggccatcgtcccgcccgtgaaccccttccactacgtcatggaaagcagcagtgcctcgactagctcggggttgtggagcggcacataccagagcagcagagacaccactgccagagaaagtgagctgtcggctagcccagctgccaagtcgactgacgccatgattgaagatgttgagcgggcttatgcgtcagtgttggcgaaacagagcttgtagtcttgtacacattaattattgagtaaaatgcatccgcgacggtgggataattgactttccaaattagaaaaacagaaagacacgtcctaaacttgggcgggatggcatgactccaaagcaaaacttcaaggacgagctggttaaagtctgtcaaacactctcacttcagagttttaaactccataaagtttttagagttctagtacaaatttttgggtacctcttttgctgctccctaaactctaaaaagcaagctagagatagagtttggagttatttatccgctactgtcactagttatgagatagcaatgtattgagcagagctg

SEQ ID NO: 23845 - DNA, 2044 bp, Zea Mays
atcaccattcaccactgaatcagctagactgctctctcatcagctcaacgatttaggcatttagccctgcgggcagcagttgcgagcaaaggccaaagaacacggagaggctaaggctatccacacccacacagatcgatggaatgatcagtaacttttatcgattcagagattttgttcgggtcgattcctcctccatgctgtttgcattaggtatctcaggaagaaaatatgtttccttttttttccctgaaggattgggattgcaagctcgttcctgattttgactgtgctgttcatccaactaacttgcttatgtgacgcatgccatggcgcagagtctaatcaagcttacagcccagaagcgtcacagacatggggaacgcagcagttgcaatcatatcttcagtctcggcaactgcgacggtagtagtaatgatcgccctcatcagaaggtgccgcgtcgtgaggaagaagataaagaagaaaatcgtaaagaaagtcttggaggagatcgagcggaagaaccgcgtgggggcagcctgcgacgccttggaagacgtggtgatcgagatcggtcccgtggagaagttcctcaacgagatcctgaacgagaagccgatgcgtttcagctccgagcagctggcggcctgcaccaagaactactcgtcggagctggggtccggcggctacggcgtggtctacaagggtgagctgcccaacggcctgctggtggccgtgaaggtgctcaaggtgtccatgaacaagaaggtgcaggaggcgttcatggcggagatcggcaccatcgggcggacgtaccacgtgcacctcgtccgcctctacggcttctgcttcgacgcggacaccaaggcgctggtgtacgagttcctggagaaggggtcgctcgagaagtacctctactgtgacgagggcagcacggccacgcggctggagtgggcaacgctgcacggcatcgccgtcggcacggcgaaggggatcaggtacctgcacgaggagtgccagcagcggatcgtgcactacgacatcaagccggccaacatcctgctcacggccgactacaccccgaaggtggccgacttcgggctggcacggctgggcgagcgcgagaacacgcacatgtcactgaccggcggcggccgtgggacgcccgggtacgcggcgccggagctgtggatggcgctgccggcttcggagaagtgcgacgtgtacagctttggaatggtgttgttcgagatcctagggcggcgccggaactacgacccctgccagggcgagagcaaggagtggttcccgagatgggtctgggagaggtacgcgcagggtgagatcgaggacgtcgtggcctgcgacgggatcgttggagacgcggacagagagaaggcggagatgatgtgcaaggtggcgctgtggtgcgtgcagttccagccgtcggcgcgaccgacgatgagcagcgtggtgcggatgctggagggggagatggccatcgtcccgcccgtgaaccccttccactacgtcatggaaagcagcagtgcctcgactagctcggggttgtggagcggcacataccagagcagcagagacaccactgccagagaaagtgagctgtcggctagcccagctgccaagtcgactgacgccatgattgaagatgttgagcgggcttatgcgtcagtgttggcgaaacagagcttgtagtcttgtacacattaattattgagtaaaatgcatccgcgacggtgggataattgactttccaaattagaaaaacagaaagacacgtcctaaacttgggcgggatggcatgactccaaagcaaaacttcaaggacgagctggttaaagtctgtcaaacactctcacttcagagttttaaactccataaagtttttagagttctagtacaaatttttgggtacctcttttgctgctccctaaactctaaaaagcaagctagagatagagtttggagttatttatccgctactgtcactagttatgagatagcaatgtattgagcagagctg

SEQ ID NO: 23846 - DNA, 1982 bp, Zea Mays
atcaccattcaccactgaatcagctagactgctctctcatcagctcaacgatttaggcatttagccctgcgggcagcagttgcgagcaaaggccaaagaacacggagaggctaaggctatccacacccacacaggttagctttacttcttccgctagctgatttcctctgcgtttgaagctcttgttgctgttgccgatcgatggaatgatcagtaacttttatcgattcagagattttgttcgggtcgattcctcctccatgctgtttgcattagagtctaatcaagcttacagcccagaagcgtcacagacatggggaacgcagcagttgcaatcatatcttcagtctcggcaactgcgacggtagtagtaatgatcgccctcatcagaaggtgccgcgtcgtgaggaagaagataaagaagaaaatcgtaaagaaagtcttggaggagatcgagcggaagaaccgcgtgggggcagcctgcgacgccttggaagacgtggtgatcgagatcggtcccgtggagaagttcctcaacgagatcctgaacgagaagccgatgcgtttcagctccgagcagctggcggcctgcaccaagaactactcgtcggagctggggtccggcggctacggcgtggtctacaagggtgagctgcccaacggcctgctggtggccgtgaaggtgctcaaggtgtccatgaacaagaaggtgcaggaggcgttcatggcggagatcggcaccatcgggcggacgtaccacgtgcacctcgtccgcctctacggcttctgcttcgacgcggacaccaaggcgctggtgtacgagttcctggagaaggggtcgctcgagaagtacctctactgtgacgagggcagcacggccacgcggctggagtgggcaacgctgcacggcatcgccgtcggcacggcgaaggggatcaggtacctgcacgaggagtgccagcagcggatcgtgcactacgacatcaagccggccaacatcctgctcacggccgactacaccccgaaggtggccgacttcgggctggcacggctgggcgagcgcgagaacacgcacatgtcactgaccggcggcggccgtgggacgcccgggtacgcggcgccggagctgtggatggcgctgccggcttcggagaagtgcgacgtgtacagctttggaatggtgttgttcgagatcctagggcggcgccggaactacgacccctgccagggcgagagcaaggagtggttcccgagatgggtctgggagaggtacgcgcagggtgagatcgaggacgtcgtggcctgcgacgggatcgttggagacgcggacagagagaaggcggagatgatgtgcaaggtggcgctgtggtgcgtgcagttccagccgtcggcgcgaccgacgatgagcagcgtggtgcggatgctggagggggagatggccatcgtcccgcccgtgaaccccttccactacgtcatggaaagcagcagtgcctcgactagctcggggttgtggagcggcacataccagagcagcagagacaccactgccagagaaagtgagctgtcggctagcccagctgccaagtcgactgacgccatgattgaagatgttgagcgggcttatgcgtcagtgttggcgaaacagagcttgtagtcttgtacacattaattattgagtaaaatgcatccgcgacggtgggataattgactttccaaattagaaaaacagaaagacacgtcctaaacttgggcgggatggcatgactccaaagcaaaacttcaaggacgagctggttaaagtctgtcaaacactctcacttcagagttttaaactccataaagtttttagagttctagtacaaatttttgggtacctcttttgctgctccctaaactctaaaaagcaagctagagatagagtttggagttatttatccgctactgtcactagttatgagatagcaatgtattgagcagagctg

SEQ ID NO: 23847 - DNA, 1115 bp, Zea Mays
gtcaaatgttcttatccatattccttctgctgggaaggggttcatcagttgcctgaaaccttcgtttccggtctggaatgttgccgatgtcgaacgtgtccgctaatccttcacagcttacaattttctatggcggatcagtatgtgtgtatgactcagtgccaccggaaaaggctcaagcaatcatgcttatagctgcagctgcagcggcagcggcagctaccaaaagcagtgctgcccctactgttaagcctccaatggtgcctgcagccactgttgccccagcagctgtcgtttctcctgtgcttacacggtctccatcactgcagagcacttctgtagcaactgggcaacctcaggttgttgctgaacctagctcgatatgcaaacttcaggctgatctccccattgccaggaggcactctcttcagcgtttccttgagaaacgccgtgacagggtcgtgagcaaagctccatacagcaccgccaagtcgtccgatggcatggagtcaccgaggattgaggtgacagcggagggcaaggcccagtaacttgaaaggtccccgcggagtcccatcggtgaaggctgacgttgtgggaaggggcagggacgcgctgttgttgccttatgttatgtggcggcggcagcgtggaaccgcactaataatgtggaccggaacctctgttaccgtcgtttgtgctgtcgcgtgctaggtttatgctgaagtggattcctttactccgcacaccgaactgtgtctgttgtacatcacgccgtgacgccggtggtctcgtctgtctgacttcgttacatggatcgtctagtagtaacggaatgcagtaccacgtgtggacatgtgtttagtgtgaaagatgatggggctttgcttgcttgtttccactaccatttcccattttggcacttaacgtttgttcttctcttcgctaccttgttctcagctcaaatggtcccacgcagatgcatgtgtagggaggttgaaaatgatagaaatacgctcagatcaccttcgttccttgcttctcttgccgtttctgttggaccaaaaataaaataaaatttcgatgtcgtcccacgcagatgcatgcggaacccc

SEQ ID NO: 23848 - DNA, 1096 bp, Zea Mays
gctcctgctttccactctctcctgctgtcgcgaagctgtaacctgatttcggtctggaatgttgccgatgtcgaacgtgtccgctaatccttcacagcttacaattttctatggcggatcagtatgtgtgtatgactcagtgccaccggaaaaggctcaagcaatcatgcttatagctgcagctgcagcggcagcggcagctaccaaaagcagtgctgcccctactgttaagcctccaatggtgcctgcagccactgttgccccagcagctgtcgtttctcctgtgcttacacggtctccatcactgcagagcacttctgtagcaactgggcaacctcaggttgttgctgaacctagctcgatatgcaaacttcaggctgatctccccattgccaggaggcactctcttcagcgtttccttgagaaacgccgtgacagggtcgtgagcaaagctccatacagcaccgccaagtcgtccgatggcatggagtcaccgaggattgaggtgacagcggagggcaaggcccagtaacttgaaaggtccccgcggagtcccatcggtgaaggctgacgttgtgggaaggggcagggacgcgctgttgttgccttatgttatgtggcggcggcagcgtggaaccgcactaataatgtggaccggaacctctgttaccgtcgtttgtgctgtcgcgtgctaggtttatgctgaagtggattcctttactccgcacaccgaactgtgtctgttgtacatcacgccgtgacgccggtggtctcgtctgtctgacttcgttacatggatcgtctagtagtaacggaatgcagtaccacgtgtggacatgtgtttagtgtgaaagatgatggggctttgcttgcttgtttccactaccatttcccattttggcacttaacgtttgttcttctcttcgctaccttgttctcagctcaaatggtcccacgcagatgcatgtgtagggaggttgaaaatgatagaaatacgctcagatcaccttcgttccttgcttctcttgccgtttctgttggaccaaaaataaaataaaatttcgatgtcgtcccacgcagatgcatgcggaacccc

SEQ ID NO: 23849 - DNA, 1218 bp, Zea Mays
ggaagtgccacgtgggatgggccttgggctgtggccgtacctttcgctgggtcaaatctgattgcgggcttgcggccgctcctccgggcgaggatacggagccggcgtggcggatccgggaaggcgtgttcgccctctcctcggctcctcgctcgcaggcgaaatccccttcggtctggaatgttgccgatgtcgaacgtgtccgctaatccttcacagcttacaattttctatggcggatcagtatgtgtgtatgactcagtgccaccggaaaaggctcaagcaatcatgcttatagctgcagctgcagcggcagcggcagctaccaaaagcagtgctgcccctactgttaagcctccaatggtgcctgcagccactgttgccccagcagctgtcgtttctcctgtgcttacacggtctccatcactgcagagcacttctgtagcaactgggcaacctcaggttgttgctgaacctagctcgatatgcaaacttcaggctgatctccccattgccaggaggcactctcttcagcgtttccttgagaaacgccgtgacagggtcgtgagcaaagctccatacagcaccgccaagtcgtccgatggcatggagtcaccgaggattgaggtgacagcggagggcaaggcccagtaacttgaaaggtccccgcggagtcccatcggtgaaggctgacgttgtgggaaggggcagggacgcgctgttgttgccttatgttatgtggcggcggcagcgtggaaccgcactaataatgtggaccggaacctctgttaccgtcgtttgtgctgtcgcgtgctaggtttatgctgaagtggattcctttactccgcacaccgaactgtgtctgttgtacatcacgccgtgacgccggtggtctcgtctgtctgacttcgttacatggatcgtctagtagtaacggaatgcagtaccacgtgtggacatgtgtttagtgtgaaagatgatggggctttgcttgcttgtttccactaccatttcccattttggcacttaacgtttgttcttctcttcgctaccttgttctcagctcaaatggtcccacgcagatgcatgtgtagggaggttgaaaatgatagaaatacgctcagatcaccttcgttccttgcttctcttgccgtttctgttggaccaaaaataaaataaaatttcgatgtcgtcccacgcagatgcatgcggaacccc

SEQ ID NO: 23850 - DNA, 999 bp, Zea Mays
ctagtccctcgattggtggcctggtctggaatgttgccgatgtcgaacgtgtccgctaatccttcacagcttacaattttctatggcggatcagtatgtgtgtatgactcagtgccaccggaaaaggctcaagcaatcatgcttatagctgcagctgcagcggcagcggcagctaccaaaagcagtgctgcccctactgttaagcctccaatgagcacttctgtagcaactgggcaacctcaggttgttgctgaacctagctcgatatgcaaacttcaggctgatctccccattgccaggaggcactctcttcagcgtttccttgagaaacgccgtgacagggtcgtgagcaaagctccatacagcaccgccaagtcgtccgatggcatggagtcaccgaggattgaggtgacagcggagggcaaggcccagtaacttgaaaggtccccgcggagtcccatcggtgaaggctgacgttgtgggaaggggcagggacgcgctgttgttgccttatgttatgtggcggcggcagcgtggaaccgcactaataatgtggaccggaacctctgttaccgtcgtttgtgctgtcgcgtgctaggtttatgctgaagtggattcctttactccgcacaccgaactgtgtctgttgtacatcacgccgtgacgccggtggtctcgtctgtctgacttcgttacatggatcgtctagtagtaacggaatgcagtaccacgtgtggacatgtgtttagtgtgaaagatgatggggctttgcttgcttgtttccactaccatttcccattttggcacttaacgtttgttcttctcttcgctaccttgttctcagctcaaatggtcccacgcagatgcatgtgtagggaggttgaaaatgatagaaatacgctcagatcaccttcgttccttgcttctcttgccgtttctgttggaccaaaaataaaataaaatttcgatgtcgtcccacgcagatgcatgcggaacccc

SEQ ID NO: 23851 - DNA, 455 bp, Zea Mays
ctctcctcggctcctcgctcgcaggcgaaatccccttcggtctggaatgttgccgatgtcgaacgtgtccgctaatccttcacagcttacaattttctatggcggatcagtatgtgtgtatgactcagtgccaccggaaaaggctcaagcaatcatgcttatagctgcagctgcagcggcagcggcagctaccaaaagcagtgctgcccctactgttaagcctccaatggtgcctgcagccactgttgccccagcagctgtcgtttctcctgtgcttacacggtctccatcactgcagagcacttctgtagcaactgggcaacctcaggttgttgctgaacctagctcgatatgcaaacttcaggctgatctccccattgccaggaggcactctcttcagcgtttccttgagaaacgccgtgacaggttgcaaactagctgaacaccattttgtt

SEQ ID NO: 23852 - DNA, 1160 bp, Zea Mays
cttccttgcttgcttgtatggttgggcaagcaagttaggctgcttgcgtcacacatgcatggtaatgcaaagcatataagcaacgaggttagttaggctgtttggttggtagcagaagcgatgtggcgcatgtaggtttcgtgtaccctttttacagatgctatttctgttctatcacaaaagaggggactgccacaacaccaaaggggagaagaacatgtgcgtggtcggagccatcaacaactacacggcggcgctgaaagactcatcaagtccatttgatccgacggagagcttgatgttcctggcgcacttcgtcggcgacgtccaccagcctctccactgcggccacaccgacgacctcggcggcaacaccatcgtcgtccactggtaccgaaggaagaccaacctgcaccacgtctgggacgtgaacgtcatcgagacggccatgaaggacttctacggcaacgaccagagcaccatgatacaggccatccagcagaacatcacggaggagtgggctgatgaggagaagaagtgggaggcctgccgtagccggacaaagacctgtgctgacaagtacgctgcagagagcgcgaagctggcctgcacggcgtacgagggtgtcgaccaggactccaccttggaagatgactacttcttcgccgcgctgccggtggttcagaagaggatcgcgcaaggaggcgtcaggctggccgcgatcctcaacaggatatttggtgggaacagcagatcaggcttcagagcagttgattgatcgatccataccagtagtagatatcaaacgattggacatgtggaggagtgggtggggaggggcagacatgatctgccatctgaattagaataataagaggtatcttgttgccgtctggcaatattgtaacttcagtcttcagtagccactagctcacgaattttattatttcagaatcgaagcacttgtacgtactgtgcaatagaatagatgacgcggtcacacattcgtattcatatatgttcgcgtatctttcagatcgacgtgatgagaaatgtcttagaaggatatttgaaggattcacattcatctgcaagtgggcacatgcatcgaccgtctgagcacatgcatcaatactattcacgcaatggcacagtacatg

SEQ ID NO: 23853 - DNA, 1232 bp, Zea Mays
ggtgtataaatagaggaacagagcagtagcatcaagagaccaggctggtggttgaggtgagaagctagaggagctagagcgagagagtcccatcgcaacacacaaagggaagaggaagaggaaggcgaggacgatgggcttgctcctgctgctccacgtcctcctcgtcgcggcggcggcgacagctcctgcagccgacgcatggggcaaggaggggcactacatggtgtgcaagatcgctgagagctttctgacgaaagaggcatcgacggcggtgaaggagctgctgccggggtgggccggcggcgagctcgcggagacgtgctcttgggcggacacgcagaggttccggtaccgctggtccagcccgctgcacttcgccgacacgccaggggactgcgagttcgactacgcccgggactgccacaacaccaaaggggagaagaacatgtgcgtggtcggagccatcaacaactacacggcggcgctgaaagactcatcaagtccatttgatccgacggagagcttgatgttcctggcgcacttcgtcggcgacgtccaccagcctctccactgcggccacaccgacgacctcggcggcaacaccatcgtcgtccactggtaccgaaggaagaccaacctgcaccacgtctgggacgtgaacgtcatcgagacggccatgaaggacttctacggcaacgaccagagcaccatgatacaggccatccagcagaacatcacggaggagtgggctgatgaggagaagaagtgggaggcctgccgtagccggacaaagacctgtgctgacaagtacgctgcagagagcgcgaagctggcctgcacggcgtacgagggtgtcgaccaggactccaccttggaagatgactacttcttcgccgcgctgccggtggttcagaagaggatcgcgcaaggaggcgtcaggctggccgcgatcctcaacaggatatttggtgggaacagcagatcaggcttcagagcagttgattgatcgatccataccagtagtagatatcaaacgattggacatgtggaggagtgggtggggaggggcagacatgatctgccatctgaattagaataataagagatcgacgtgatgagaaatgtcttagaaggatatttgaaggattcacattcatctgcaagtgggcacatgcatcgaccgtctgagcacatgcatcaatactattcacgcaatggcacagtacatg

SEQ ID NO: 23854 - DNA, 1936 bp, Zea Mays
aatttgagaaacagacatcgctaaatcggtaataaatcaaaagctgagagatgtcgaccgccgtctcgtcccgccgactggcgactatcggcgtgatcggagccctcacgcttcagttcgtcgcgtcagcgacggcggggccgatagccctgcctggctgcccggagaactgcggcggcgtacaagtgccgtacccgttcgggatcggccgtggctgcttccacgaaggcttcaacctcacctgcgacgaggcgcagcacccggcgaagctgctgctgggggacggcgtcgaggtgctcgacatctccttgccggactgcacgatattgacgagtgccagctgccagatatttacccatgtcatggaacctgcatcaatgtgcctgggacatacagatgctcatcaaagaaaggcatcaagagccttccaggcttaattgctataatagcactaagtgctggttttggcctactattttcaattcttggtgtttccaacatcatcaataaactcaagcaaagaagggcaaaacttctaagacaaaagtttttcaagagaaaccatggtttgcttctacaacagttaatatcttcaaataaagatatagctgaaaggatgaagatttttagctttgaagaactagagcaagcaaccaacatgtttgaccagaatcgcatcattggtgatggaggtcatggaacagtctacaaaggtatcttatctgatcaacgtgttgttgccatcaagaagtccagagtagtggtccaaagggaaattgaccagttcataaatgaggttgttatactttcacagactaaccatagaaatgtggtaacactctttggttgttgtcttgagactgaggttcctttactagtttacgagttcatatcgaataggaccctatcctaccatcttcatggacaatatgaaaatcctctgtcatggaatgatagactaaggattgcactggaaactgcaagggcaatcgcatatctacactctgcagcttccatatcagtgttccatagagatatcaaatctgcaaatatactgctcaccgatacgttaacagcaaaagtgtcagattttggagcttcaaggtcaatttcaatagatgaaactggaatacataccgccatccaaggaacccatggttaccttgatcctgaatattattacactagtcgactcaccgagaagagtgatgtttatagctttggtgtaatcttagcagagctactaacaaggattaaaccggtattctctactcattcatcagagggcaaaagcctagcatcacacttcgtgtctgtgataaaagactgtagtttgttggatattctagatccacaaattgttgaagagggaagggctaaagatgccgaggctgttgcaaggcttgcggaagtatgcttaagcttgaaaggtgaagaaaggcctacaatgaggcaagttgagataacacttgaagatgtgctaggtccaaatgtccattcgagctgtcgagtttcaaggacaagtcaaggtgctcttaaagaccagacacagaaccaaaacaaaggcaatgaaggaactagactatacagtttggagaaagagttcatacagtcatctgaaattccaagatgatattttgcttttgtgggttcatatcttgtttagtaattttgagtgccattttgcacgcttggcgtcaattataaacctagagatatagccttgtgcacctccacaatattatggttgatgtagaactaataagctataccagtaaataattgaacttttggttatagtctgcttaggtggtgtatggtgttcattttgttatgtatccagtatcttgtcttgtggatgtgcaaatgtcacacgcaaagggagacagaaggacccgcgtcatattttatccaccttgatttgcactgttatgct

SEQ ID NO: 23855 - DNA, 2203 bp, Zea Mays
ataatagtaaagtgagagcgccgcaccaagccacaccaccaccagacgccacccaacaccctaaacccttcgacccaacccgcctccaactccaaagccgtcatggcggcgccgtccccgaccactaccgccgccgccgccgccgccgccacgacccaccaccgcgtgctcctcccatccgcgcgcccccgcgccgcgccctcttctctccgcctcccgctccgcgcgcagccccacgcccacgcccacgcccagcgcgcgcgcctcgccgcccccgtcgcggccgcggccccggccccggcggcgtcgacggcctcccccgagtcccccgcgtcgggcgccgtcgcggggaagcccacggtgctcgtggccgagaagctcggcgccgcggggctcgcgctgctgcgggagttcgccaacgtcgactgctcctacggcctctcccccgaggacctccgcgccaagatctcgctctgcgacgcgctcatcgtcaggtccgggaccaaggtcggccgcgacgtcttcgaggcgtccgggggcaggctccgcgtcgtcggccgcgccggcgtcgggatcgacaacgtcgacctcgccgccgccaccgagcacggctgcctcgtcgtcaacgcgcccaccgccaacaccgtcgccgctgccgagcatggcatcgcgctgctcaccgccatggccaggaacatcgcgcaggccgacgcgtcactcaaggctggcttaggaatgcatgtgattgcacatgatccatatgcttctgctgaccgggctcgtgcaatcggggttgaactagttagcatggaggaggccatgacaactgctgactttatctcgttacacatgcctcttacgcctgcaacggacaagatgctcaatgatgaggccttcgctaagatgaagaagggtgttcgcattataaatgttgcacgtggtggcgtaattgatgaagaagctctagtcagggcacttgattcaggggtagtagcacaggctgctcttgatgttttcactaaagaacccccagcagctgacaacaagttggtactgcacgggaatgttactgtcacacctcaccttggtgccagcacagtggaggcacaggaaggggtggctattgagatagctgaagctgtcattggagctctgaaaggggagcttgcagcttctgcagtgaacgcgccgatggttcctgctgaggtgctgtcagagcttgcaccttttgttgtgctcgcagaaaagcttgggcgcttggctgtgcaactagttgctggtggtggtggtatcaagtctgtgaaagtgacctatgcatctgcgcgggcccctgatgatcttgacacgagacttctccgtgcaatgatcaccaagggattgattgaaccaatctccagcgtttttgtcaatctggtaaatgccgacttcaccgcaaagcagaggggagttcgcatcacggaggagaggatcctgctggacggctcacctgaaacacctatcgactacattcaagttcagattgccaatgtcgagtccaaatttcccagtgcgatatctgagactggagaaatcactgtggagggcagagtgaaggatggtgttcctcatctaacaaaggttggagcattccaggtggatgtgagcttggaaggaagcctcatcctctgcaggcaggttgatcaaccgggtatgattgggtcagttggaagcgtcttgggtgaggagaacgttaatgtcagtttcatgagtgtcggaagaattgctcctcgcaagcatgctgtcatggcaattggtgttgatgaggaaccaagcaagggcacactgacgaagatcggggagattccagcgatcgaagagtttgttttcctcaagctctaggcgcgaatgtatgtttgaagttgcaagcatggtgtgcaattttgatgtagctagcaatccggaggacggatggttctccttgaaataagcttttaggagtatttttgtagtggcgctcttgaatatggtctggtatcgatgcctacttttgaacggggtgtttattaataaaaacttatatatcaatgcttggctcattggttgattcacttggcttctttggtacagttatctgtttgctttgttgcatgcagtctcggtttgaaaggcagggttgaaatttgtagctgatttgtttttcagctagtgtcgaataattttgtac

SEQ ID NO: 23856 - DNA, 786 bp, Zea Mays
aattgaagcgaacgtagcacagctcctgcctgctccacccactgtgcacctcacgcgccatgcttctctgttaaccaagctcgtgggccgtggccgctggtgttgttggtgcgcgtgtgggcgccgaggcccgagccgcatccacggaatccacgcagggaccatcggcctccacttggcccctgtggctggcctggagaccgtggacaacagctacttcatcacggatgacaacgtcggctactgcgtcaaggagcgcctcgaccagggattcgccggcctcatcgccgtctccggcaccggcgaggtggcgtacggattcaactgcaccggcatgttccggggctgcgccaccgaggacgggttcatggaggtcggcatctgggagtgagctggaggccccgccatctaaacacaaatcaaaatcagtgtgcgtgcagctgcatgtggccatcctgcgattgccatgtgtttaatctccgggtcacaggtgttgtcgatgatccaccactagtagtagcgattgcatggagattggtgctcgggtcaataatgatggtgattgtgacggagtgccctgcaaaataattaataattcgtgtgaaaaagttgattatatggttcctgacactatgatgttcggcctttttttttgtcttcatctgtctttcattcgattattaaacatgtcctcattgggttgatagaaatctgggctgatagttggcccaagcccaacccaagtttcggtaccccaaatggttcctagagttttgggccccaata

SEQ ID NO: 23857 - DNA, 1532 bp, Zea Mays
gaatttcacgcatcgcacggggaacaccgatcgatcgatccctcgagaagcagagacaagtagcccgcccgcccgcccgcacacatagagacagagagaatcaagccgccgccgaccagtgacatggcgccctgggccattgccatccacggcggcgcgggcgtggacccgaacctcccggagcaccggcaggaggaggcgaagcgcgtgctggcgcggtgcctgcaggtgggcgtggacctgctgcgcgcgggcgcgcaggcgctggacgtcgtggaggccgtggtgcgcgagctggagacggaccccttcttcaactcggggcgcgggtccgcgctcacccgcgccggcaccgtggagatggaggccagcatcatggacggccgcggccgccgctgcggcgccgtgtccggcgtctccaccgtcaagaaccccgtgtccctggcgcgccgcgtcatggacaactcgccccactcgtacctcgccttcgacggcgccgaggagttcgcccgtgcgcagggcctggagaccgtggacaacagctacttcatcacggatgacaacgtcggcatgctcaagctcgccaaggaggccggcagcatcctgttcgactaccggatcccgctggcggggacggacacgtgcagcgcgctggcgggcgcggcggacagcaacggcggcggcgtgcacaaggcggggatggtcatgaacgggctgcccatcagcgtgtacgcgccggagacggtggggtgcgcggtggtggacgcgtcgggggcctgcgcggcggccacgtccacgggcgggctcatgaacaagatggccggccgcatcggggactcgccgctcatcggctccggcacctacgcgtgcggcgcctgcgccgtgtcgtgcacgggcgagggcgaggccatcatccgctgcacgctcgcgcgcgacgtggccgccgtcatggagtacaagggactgcccctgcagcaggccgtcgactactgcgtcaaggagcgcctcgaccagggattcgccggcctcatcgccgtctccggcaccggcgaggtggcgtacggattcaactgcaccggcatgttccggggctgcgccaccgaggacgggttcatggaggtcggcatctgggagtgagctggaggccccgccatctaaacacaaatcaaaatcagtgtgcgtgcagctgcatgtggccatcctgcgattgccatgtgtttaatctccgggtcacaggtgttgtcgatgatccaccactagtagtagcgattgcatggagattggtgctcgggtcaataatgatggtgattgtgacggagtgccctgcaaaataattaataattcgtgtgaaaaagttgattatatggttcctgacactatgatgttcggcctttttttttgtcttcatctgtctttcattcgattattaaacatgtcctcattgggttgatagaaatctgggctgatagttggcccaagcccaacccaagtttcggtaccccaaatggttcctagagttttgggccccaata

SEQ ID NO: 23858 - DNA, 474 bp, Zea Mays
  misc_feature (1)..(1): n is a, c, g, or t
ntcccctcagtaggctctggtctcttctttggctctggatcctcagtaggatctgatctcttcttcggctctagatcctcagtatcttccttgtttgcgtgttttttacttctcttctttcgctgaaccccctcggcatgctctttctttggctctggatcctcaataggctctggtctcttctttggctctggatcctcagtatctctcacaaagttatttctcttcttttgctgaacccccttggcatgctctttctttggctctggatcctcagtaggctctggtctcttccttggaacttcgatctgtttgggccaggaatcgtataccatcttccgaacatagaagctcacgacatctccattgtcaagcttcagcagtacatgcttttgaagtctcccacctgagtcctgcatgtttaaagaaaaagttaaaaggcagaggcttagtagtatattgatgatattaaac

SEQ ID NO: 23859 - DNA, 3707 bp, Zea Mays
accaacataacaaatatatcaaacccaacataattttatcacaggttcaacaatattcaatattaaatggcaatatcatgccttcaaatcacacaaaacatagcattgattctacaaaactatggacaaaacgtagcattcattttatatgagacatataaatctggacccacatgtcatatattagcgggttccccatcgggtagcgggtatggggcaaaagagaacatactcacgcccaccatacccgatgggcataacaaatgacccaataaaatacctatgggtatcaaaatccgccatacccgtgccctaatagggtttttacccatcgggtttcgggtttcgggtacccattgccatccctgggtgggagagtaaactatggatctaaatgggccggcttacatgcagcacgagaagtgggctgaaagccgcgaaacagaaaagggcccacgactcgtctgctgaagtataaaagttaggggccgaaaatatagccgttgagcgcacacctgccattcgccgtgcggtactccgggccctcccagttttccccctctcccttccagtaccggcgccgctggccgactcccgtggcgacaacctgagaccggagcgccataatcctccggattcgagacaccgagcgcaccgcgaactttatctgctgtgtttggagctgaaaatgagtgaggcgaatactactcagcttgaccttgagaaaggattttctcaagtgtctaatgataatgattcgagtagccctgcgaccatgcacaagatgaaagttgagacagaagatggtggaagtgagattgaatcacccactccagaaaaacgtgaatctagaagcaaaggggtcgttgtgagttcactggcaaggaatttgcttgcagagaggtacagagacagattttcaaatcagctggtggaagatgagggtcagacagatgatgaagactataatggaagtgtttcgcctagtagtagccaatcacttttttcagaaagcattgaactgcttgataaacacaaggatttgctgagtcttttcaatagaatggagagttctattagattgcttcacctgcgtaagaagatggctacatttaataatattgccacccaggtggagattctcacaaaaaggaagttattatacagtcatttggcccagatgaagcatttattcccagaagcaatccagataaagaggatactagtacatgatgagaagagcctatgcatgtatgctgatatggaaatcacacttttaatggatgttgtggaatgcacaagtcctgatcagtctccatccatgacaatttgtgaggctttttactcaaagctattgagttttttggatgctcatcataagggtgcagacattcctgaggcaatcctaccggaactctttaattcaaagccaagggagaagttatatcttgaggcagtacacaatggatatgctgctgagtcacctctgcagggtgccactgaggagagattcttaaatgcttcccactttccacaatcttttcgaaaactcatgtcgcagaaaatcattgctgatggaattcaaaagactcaattgctgtctgatccagcagatttgagttctgtgattgcttatggtacaaaagggtcaaacggaaaccctaaaaaggaagatgaacatgctccagttccagggaagtatgaaatttctgctactccaagccgccatttgatctcttgttgtcaagagggtacgccaaaacaagggacctcagagtcaccattgttctctggaacacctgtaatgcagacaccaaaaaggcaattgccgacttcacttgacaaacccaaggccacatgtggacacattagtgaaccatgttcagccagttctgcccgcagatcactaaatacattgttaaagtttgaagtaggaagcccttattatgatggagtggaacatacggatacaactaaaaagggcatgatctcagaagactcatcgaattttaacaagtcatttgaggaagatagtcctgtcttatttattgataaagacaaaatcgacgaagtagactcagtggatagccaggaaaagatagcttcgctacataccacatttgacatagtctgcgacatttctcatcctaccaagaattcacttatcacgaaacaggaacttttccataatattcttgccaacaacttggagatagaagaaattggggagatagaagagcagctgaatattttagaggatctggctcctgatttgatatcaaagaagatgataaatggaggagaaatactttatagcatccaacctatatcagatcaaaattcagttcgggttaggcttgtagaacctgtatgagatagctacggttggttcaaagctgaagaaattatttatatgtatgtaccactaatgaaacccacattagctaattaacatcatggaagcatctgcatcagcagcatcgctcttgtctgattggacttgaaatctatattttttgttgaccctgctcaatgctgaaattttaatgaaacttaaatttgcactagctgctcaatgctgaaatttcaataatgatatatattatatctatatatagtaatgacatggcacacataaattacactagtgatggcaatgatcccacgatctgtatcctctaatcattgtaatcatatgtatgtacacgacatatatatcaagtgctaacagatggaggaaacacagttatcaactgcctctcactcctcagaccaggtgatgtccaccattccgacgttctggtcgagtcccagggcgtcccaaaccgctggcgaggcgtcgacgatgttgttgtcgcacggcggctcaaagttgtgctcgtcatcgcagccatgcacggagtcgcactcgtccaccaccttggcgtacacggagttgccgttggcgctgatcctgattcggtgcccgcagcgcgccatgttgctgaaccaccccgtggagagcgccaccaccttctccgagtcgctgtggtacgcgttgtcgcactccgacgggccgccgccgtccttgcccttctcgaagctgttgagcgtcagcacggccttggtgctcgccgtcaccggcggcgagcagtggtactgcggatacatcttgccgtcctcgcagcagtccgggtcgttgctcttctcgcagttgccggagcggcccgggaggtatccgctggcgcggcacgtgccgaggccggcgccggggcggagggaggacgccgtgtgggaggcggagagcgcgactaggaagaacatgcccatggcggctgtccctctcgcagtggccatctttgcttgcctgaagaaatgatcgagctccttgtcactctgctgtgtttgtggtgctctgctctgcttgatggttttgagattagtcgtgcatgggattatatagttgcatttcccgcttgcattgctacattagtatgaacttgcatcgatgcacatggcgtacggaatggtttgagtggatgccatttgctctgcagcggaagctagtctttgagtcgggggactgtcatgttctttgacagtattccaaataaaagatggtacccaacgatttggcaccggtgttttcagtaatggatgcttccgtgtgttttttttttaaaaactagatgtaccgtatacgatatgcccgtatgaaatggtttgag

SEQ ID NO: 23860 - DNA, 3398 bp, Zea Mays
accaacataacaaatatatcaaacccaacataattttatcacaggttcaacaatattcaatattaaatggcaatatcatgccttcaaatcacacaaaacatagcattgattctacaaaactatggacaaaacgtagcattcattttatatgagacatataaatctggacccacatgtcatatattagcgggttccccatcgggtagcgggtatggggcaaaagagaacatactcacgcccaccatacccgatgggcataacaaatgacccaataaaatacctatgggtatcaaaatccgccatacccgtgccctaatagggtttttacccatcgggtttcgggtttcgggtacccattgccatccctgggtgggagagtaaactatggatctaaatgggccggcttacatgcagcacgagaagtgggctgaaagccgcgaaacagaaaagggcccacgactcgtctgctgaagtataaaagttaggggccgaaaatatagccgttgagcgcacacctgccattcgccgtgcggtactccgggccctcccagttttccccctctcccttccagtaccggcgccgctggccgactcccgtggcgacaacctgagaccggagcgccataatcctccggattcgagacaccgagcgcaccgcgaactttatctgctgtgtttggagctgaaaatgagtgaggcgaatactactcagcttgaccttgagaaaggattttctcaagtgtctaatgataatgattcgagtagccctgcgaccatgcacaagatgaaagttgagacagaagatggtggaagtgagattgaatcacccactccagaaaaacgtgaatctagaagcaaaggggtcgttgtgagttcactggcaaggaatttgcttgcagagaggtacagagacagattttcaaatcagctggtggaagatgagggtcagacagatgatgaagactataatggaagtgtttcgcctagtagtagccaatcacttttttcagaaagcattgaactgcttgataaacacaaggatttgctgagtcttttcaatagaatggagagttctattagattgcttcacctgcgtaagaagatggctacatttaataatattgccacccaggtggagattctcacaaaaaggtagtaatggtgatgaaagtgtcatatgggttgttgtatttattatttgtttgtttgttacagttggatgttaatctttctgcattacaggaagttattatacagtcatttggcccagatgaagcatttattcccagaagcaatccagataaagaggatactagtacatgatgagaagagcctatgcatgtatgctgatatggaaatcacacttttaatggatgttgtggaatgcacaagtcctgatcagtctccatccatgacaatttgtgaggctttttactcaaagctattgagttttttggatgctcatcataagggtgcagacattcctgaggcaatcctaccggaactctttaattcaaagccaagggagaagttatatcttgaggcagtacacaatggatatgctgctgagtcacctctgcagggtgccactgaggagagattcttaaatgcttcccactttccacaatcttttcgaaaactcatgtcgcagaaaatcattgctgatggaattcaaaagactcaattgctgtctgatccagcagatttgagttctgtgattgcttatggtacaaaagggtcaaacggaaaccctaaaaaggaagatgaacatgctccagttccagggaagtatgaaatttctgctactccaagccgccatttgatctcttgttgtcaagagggtacgccaaaacaagggacctcagagtcaccattgttctctggaacacctgtaatgcagacaccaaaaaggcaattgccgacttcacttgacaaacccaaggccacatgtggacacattagtgaaccatgttcagccagttctgcccgcagatcactaaatacattgttaaagtttgaagtaggaagcccttattatgatggagtggaacatacggatacaactaaaaagggcatgatctcagaagactcatcgaattttaacaagtcatttgaggaagatagtcctgtcttatttattgataaagacaaaatcgacgaagtagactcagtggatagccaggaaaagatagcttcgctacataccacatttgacatagtctgcgacatttctcatcctaccaagaattcacttatcacgaaacaggaacttttccataatattcttgccaacaacttggagatagaagaaattggggagatagaagagcagctgaatattttagaggatctggctcctgatttgatatcaaagaagatgataaatggaggagaaatactttatagcatccaacctatatcagatcaaaattcagttcgggttaggcttgtagaacctgtatgagatagctacggttggttcaaagctgaagaaattatttatatggcgtcccaaaccgctggcgaggcgtcgacgatgttgttgtcgcacggcggctcaaagttgtgctcgtcatcgcagccatgcacggagtcgcactcgtccaccaccttggcgtacacggagttgccgttggcgctgatcctgattcggtgcccgcagcgcgccatgttgctgaaccaccccgtggagagcgccaccaccttctccgagtcgctgtggtacgcgttgtcgcactccgacgggccgccgccgtccttgcccttctcgaagctgttgagcgtcagcacggccttggtgctcgccgtcaccggcggcgagcagtggtactgcggatacatcttgccgtcctcgcagcagtccgggtcgttgctcttctcgcagttgccggagcggcccgggaggtatccgctggcgcggcacgtgccgaggccggcgccggggcggagggaggacgccgtgtgggaggcggagagcgcgactaggaagaacatgcccatggcggctgtccctctcgcagtggccatctttgcttgcctgaagaaatgatcgagctccttgtcactctgctgtgtttgtggtgctctgctctgcttgatggttttgagattagtcgtgcatgggattatatagttgcatttcccgcttgcattgctacattagtatgaacttgcatcgatgcacatggcgtacggaatggtttgagtggatgccatttgctctgcagcggaagctagtctttgagtcgggggactgtcatgttctttgacagtattccaaataaaagatggtacccaacgatttggcaccggtgttttcagtaatggatgcttccgtgtgttttttttttaaaaactagatgtaccgtatacgatatgcccgtatgaaatggtttgag

SEQ ID NO: 23861 - DNA, 1348 bp, Zea Mays
ccccgagtgggttgctgtgaagcggtggtccaaatcggagttggcataactgcttgaaacgcccccatgacaggggtggttcatcacgcaggagctggctgtaccaagtccgtgcagcaccgagcatgtgatatgaagccaaccagactttctcctcttccaacgtgcgttgtccctcgaagaattgttcacatcgagtcaaccagtgcattggatcttccttgccatcaaaggttgcaaactccaagcggtggaagcgaggaacagcagcagatggtggtggagagaaagcactgggtatggtgtgcggtagtgggggaaaggatggaatgggagacggtgaatgtggtaacggcagcaggtgcggtggaagtgaggtggtggtgtgtgctggtgcggatatggtggtgggtggtggtggaaggtggccatcggccgctgtcatagccggtggcagtccaccatatccaggcatgtcgtaggggcagtctggtggcggcgccatggccgatgttcctggggtggattccaccgcggcaatgcgggaggacatggaggccatctgcgtggcgaagagccccagttggcgctggacttcagcaagggcagtggtgattgctgccaactccgacggctgggctgaagctgcagtttcagcttcagcagatcctggcatatctgataccaggttgttagaattaccccggctgcggaggttgtatgagtggctaatggttggaggaagaggtgtgagagattgccgtggtgacgcctgacctagggttcaggcgcagcaatggagttgagaacaacagggaggcaagactcaatctctttctttgattaatctttcctgattagaaactaaaggcatagagggcttctatattgccctggcctaacaagacttcctccttttaaggggatctaaacaaactacctttatttaaggaaaatctaaacaactctagctatcttatctgagtacttatctgttcagtctagcttatcttcctggctgcttaggccggcgcccatatacttttccagtcataacatctaccatgtgtatgatagcaatttgtatgatcaggaaaatattatctaggtcagagaacaaatatttgcagatgaagagggcagaaaaacatctaattagtagatgcagcatgttttactcagtgttactggaagcaaaagcagtttcagttatataccagtttagaaaataccccttccgttccaatttataggttgctttggcttttctagatagacaacttttattatgtatctagacacatcgtatctctaggtgcatagcaaaagctatgtacctagaaaagac

SEQ ID NO: 23862 - DNA, 1070 bp, Zea Mays
atacctgtatgcattcccttcacgaaaacctggtgaggaatctaccaattgcttttcgtctcctgtccatcccttgtgcgctaccgctcctctcccttggcaacgacgactggcgccgccgctgccagacttcgctgggcatctcgccggcgacgagctcccaccagagaaggtgatggcgaggagtgacagctgcctggcgcgcgtgggtgccggagttgcgatcggtggcgcggtcggcggagccgtcggtgcttgttatggaacttttgaggcattcagatacaagatccctttattgctaagatcagacatatcgggcaaactactgttggcagcgctgcaatttttgggcttttcttgggggctgggagcttgattcactgcggaaaatcctactagtttgtttccctcctttttctgaacacgactttgtcgatgtgcttcagaggaggattctagattttgagcgctaccctgagtggcttcagtgaaaactattcaacgcctgtacaatttaacagctaatacctcagggttggaaagagcaatcaagttatgtcctggtttggtgtggatggaaatactccctccatttcaaattaaaataaaattcgttttaaatacttaataggtttatacaatattttatgtatatgttttatgtgtctagatttattatcttctagttaaatatagacaaaaatctaaaactaaaacgaatactattttaagatagagggagtagaattcatgtttatacgagaatagccaatctctaatctagcgtattagggcttgtttagtagagtttcgctctatgattctctagttttgagagctgatgatcaaatagagcgattatgaatgattatctagtagtagtgaatctattttacgaaaatcgtttgacaaatagtatgattatctagtagtatctagtagtagtgaatctattttacgaaaatcgtttgacaaatagtatgattatctagtagtagtgaatctattttacgaaaatcgtttgacaaatagttcatgaagcgatttatgaggggttggagagtgga

SEQ ID NO: 23863 - DNA, 1127 bp, Zea Mays
attgaattacacattctagaaggtaaataaccaggatctaaaacaaattaattgtatacctgtatgcattcccttcacgaaaacctggtgaggaatctaccaattgcttttcgtctcctgtccatcccttgtgcgctaccgctcctctcccttggcaacgacgactggcgccgccgctgccagacttcgctgggcatctcgccggcgacgagctcccaccaggattagagaaggtgatggcgaggagtgacagctgcctggcgcgcgtgggtgccggagttgcgatcggtggcgcggtcggcggagccgtgcttgttatggaacttttgaggcattcagatacaagatccctttattgctaagatcagacatatcgggcaaactactgttggcagcgctgcaatttttgggcttttcttgggggctgggagcttgattcactgcggaaaatcctactagtttgtttccctcctttttctgaacacgactttgtcgatgtgcttcagaggaggattctagattttgagcgctaccctgagtggcttcagtgaaaactattcaacgcctgtacaatttaacagctaatacctcagggttggaaagagcaatcaagttatgtcctggtttggtgtggatggaaatactccctccatttcaaattaaaataaaattcgttttaaatacttaataggtttatacaatattttatgtatatgttttatgtgtctagatttattatcttctagttaaatatagacaaaaatctaaaactaaaacgaatactattttaagatagagggagtagaattcatgtttatacgagaatagccaatctctaatctagcgtattagggcttgtttagtagagtttcgctctatgattctctagttttgagagctgatgatcaaatagagcgattatgaatgattatctagtagtagtgaatctattttacgaaaatcgtttgacaaatagtatgattatctagtagtatctagtagtagtgaatctattttacgaaaatcgtttgacaaatagtatgattatctagtagtagtgaatctattttacgaaaatcgtttgacaaatagttcatgaagcgatttatgaggggttggagagtgga

SEQ ID NO: 23864 - DNA, 839 bp, Zea Mays
gcgtccaagaaaatgaatgtagtataacattgctggtcgttgcaatatcagtccccattacatcaaataataatagatcgcagctgtgtcgagctacgccggggagcttagctgagttttacattgtgcgcgaaagcaaatttgccagggttccataaacaactgaaccctctttttttctgcagggtttatgtacaggagtgagtacctactaaaatcgatataggtagatagcggccgccgagccatgcttccgtcgtcaatcagggggccaggtgaccatttcccacgcaggggctctaatcgaccacccaggttgctgacgacctaatgccacgctgcgttttctcatgcgctgctcttcattccgtcagctgtgttgccggagaaagcccagtgcggcttggccagggttcgcttcgtagccttcactgacaatgggccgagcatttaccatgaggcaggttccctgcctgacgttgcagatggggtagtcatgggggcagcagctgtagtgatcgtcgcagcaggtggtgctgtcagggcacgagtagtagttgtcgcacacggcgggcgccggggtcggggacggcgggctggggccagggttcggcgggttggcgccctccttcaacgggtatgacggctcaaccgcgataccgcacttgccgctggacgccttgatgttgcgctccatcctcacgtacccggactcgccccagctgctgccccatgagttcttcacgatccagtagtccttgccgttctctgtcccgtagccgacggccgtgacaccatggtccagcgctgttccacagcttccagtgaagatacccaaa

SEQ ID NO: 23865 - DNA, 847 bp, Zea Mays
gcgtccaagaaaatgaatgtagtataacattgctggtcgttgcaatatcagtccccattacatcaaataataatagatcgcagctgtgtcgagctacgccggggagcttagctgagttttacattgtgcgcgaaagcaaatttgccagggttccataaacaactgaaccctctttttttctgcagggtttatgtacaggagtgagtacctactaaaatcgatataggtagatagcggccgccgagccatgcttccgtcgtcaatcagggggccaggtgaccatttcccacgcaggggctctaatcgaccacccaggttgctgacgacctaatgccacgctgcgttttctcatgcgctgctcttcattccgtcagctgtgttgccggagaaagcccagtgcggcttggccagggttcgcttcgtagccttcactgacaatgggccgagcatttaccatgaggcaggttccctgcctgacgttgcagatggggtagtcatgggggcagcagctgtagtgatcgtcgcagcagcaggtggtgctgtcagggcacgagtagtagttgtcgcacacggcgggcgccggggtcggggacggcgggctggggccagggttcggcgggttggcgccctccttcaacgggtatgacggctcaaccgcgataccgcacttgccgctggacgccttgatgttgcgctccatcctcacgtacccggactcgccccagctgctgccccatgagttcttcacgatccagtagtccttgccgttctctgtcccgtagccgacggccgtgacaccatggtccagcgctgttccacagcttccagtgaagataccctgaggcca

SEQ ID NO: 23866 - DNA, 3001 bp, Zea Mays
ggtttgtgctagcacacttgtttcaattttcaaagtgtgaccaccggcaccaggtcaccacatgtgacacggctgcagggagacgacacgacggtcaagtaaaagtaaaaaaaaaaaacctgaggctggctggctacgctgagcaaaccctgtgccgcccccaaatggagaaggcgccggcaccagcaccagcaccgggcacccaacgggcgttcgtgtccgcctatcggatctggtcgctttgacgaaggaaccagcgaatgatcactgctactagctagctaggttgttgcgcggccgcgataagagtaacatgacacttgttttgcttttgtttttactaggcttgctgagtgaggtgctgctgatggatcatggatgtggtgcggtgctgccttttataaccgcgcgcgcgcaccacacaacacaacagacaccaccacggccccgcgcgcgcgcgcctccctctccctcctagtcctaggcacacacaacacaacgcaatcctccaccggctccgctacccgcgggcgggcgggcgcttttcgcctcctctgctccgagctctcctaggttggaagagtctttgccaaggggataacaaaagagaaaagtacttgcataccccaacaaggcagcagcggctgcttttggcctcctttttctcgcacctcgctcctctattctcttctcttgttcgttcatcacccgagttggagtgcgaggcaagaaggagatcgagcctgaggagggagggagccagggagggaactggacgtccggaccaccaccaccaccaccacacacacaccagcctcgtacgaagtaaggaaggaaggaagcccagcgcctagcagccatgtgggaccttaacgactcgccggccgccgaggccgccccgccttccccgtccgccgacgactccggcgcgtcctcctcgtcggcggccgcgctggtcgagatacccgacgacgcggacgacgactcggccgccgccgccgcggaagccgtcgtcacgcgccagttcttcccggccccggccgccgtcggcgcggcgcccgggcccggctcgtcgagcgcgcgcgcgggctggcttcgcctggccgccgcggctccaccgcccgcggcgggcggcagtaacggcgtcgcgcaaaccggtggccccgcggcggcggcggcggcggctggcaagaagagccggcgcgggccgcggtcgcgcagctcgcagtaccgcggcgtcacgttctaccgccggacggggcggtgggagtcgcacatatgggattgcggcaagcaggtctatttgggcgggtttgacaccgctcatgcggcggctcgggcgtacgatcgggcggcgatcaagttccgcggcgtggaggccgacatcaatttcagtctggaggattaccaggacgacatgaagcagatgggccacctgagcaaggaggagttcgttcacgtgctccggcggcagagcacggggttcccccggggcagctccaagtacagaggcgtgacgctccacaagtgcgggaggtgggaggcgcgcatgggccagttcctcggcaagaagtacgtctacttgggcctgttcgacaccgaggaggaagccgccagggcgtacgaccgcgcggccatcaagtgcaacggcaaggacgcggtgacaaacttcgatcccagcatttacgccgaggagctcgagccggcggcgtcgacgggcggcggtggcgatgaccacaatcacaacctggacctgtcgctggggagctcggcggggaacaaaaggggcagccttgacgacggcggcggcggaggaggcggcggcgacgacgagacctcggaccagcgcgtccccatggcgttcgacgtcgactggcagacggccgcgccccggagcacgaaagcaaagctggacgcgagctccaagcaaccccagacccagatgctgcctcctccgcctcctgctgtcttgcgagtcgcccaccagctgccgttgccgttcggtcccaggcatccgcaattcctgagcaacggcggcgatccggggacctcgggaggcctgtccctcgcgatcggcggcgcgggcggcgggcactggcctccccagctgcagcacctgcagcagcagaggctgcacggcgcctgggccaacggcggcggcacgagctggccgcctccgccgcacccgcacccgcacccgcacccgccgccaccgagcaccgccgcgaccgcagctgcagcatcatcacgattccctccctacgttgttactacgacgcaaggcccggcaggctgggctcagaagaatgggttccattcgctggccaggccaacctagtatgccaagaaccacgactggccggagcgttcattcgtcgtcgatcgtcgacccagggcaaacgacacctccaaccactgcacgacgacgttttaatttaccggatgccattctctctctcccctccccccttcccttctcccttctcccttctcccttctctgtgttcttgattgggtgagacatggatccgaggatggatggacggcctgtacctgaggagttcccgggaagaagacgagtgagtgagtgagtgattggtagggtaggcgactaggcgtcgcgtcaggcagtacgtccttttggcgccttttttcttctttcactcaccattggcgaccaccaatgaatgatgacactgactggggtgtcaacatcgcagctggttttgtttggtctcatgttgcatcactcgctgctccacgatgccttgctatggttggggggagatttgctccatccaccccacgccggtcaggcgacagagcctccgctgcgtcgtctcatccgtctggtgagttgccactgtcttagaatctgagtggtacggtacgtgtggatctcgcgcgcgtgtaaacctagtattatgtactacaaactgtcatcatcggagatcactcgaataagatatcgatcttgagattacgggcggcggctcctgtc

SEQ ID NO: 23867 - DNA, 2660 bp, Zea Mays
cgaattcagccaaacttctctctcccaccgcgcttgcatcctctcatcgccaccccaccctcctcctccctgtctttctccccccctctctctccccctcttgacaaattttcctccacccattcccttcctcccctcttcttcttctccacccactccaccgatccccctctttctctctgaattctctctcgtcgtgcccacccttccatctgtctgctgcctctctctctcgcaatcagtcactcggctcttgtttcttccgtctgctgggttgattctttctcttcctctccgtggagaaacaggaggagagaggaaagaagagaaatcggaaccagcctgttctttttgcctggattgcggttcttgcgagttgttcagaaactctgggccagtttctggtcctttaaactactggaaagaggaaccatcagagatgccaaggcagccaacaaattgatatctaattgccctactttggatcatcataatgcaaggacagaggaattctatggagcattttgctgatgtctttggattcgacgttgcatcgagttcaggcaaccctgtgatggatcagcagtcatattggaataatgttcttggatcagtagaatcacataatcttcaaggttatcagatggctcacagtgatgccgccatgccatatggaaatgaaccacagcaagatggtacatttcttggtttctgggaatcaggcgaagcaagttcaagtgccagtgcactaaactatggcagctctaataatgtcaaaacagagcatcttaacattggtggtggaggtggactgaggattggtgaaagccgactggtagctgacaatggcatttctctggatgtggatatcaaccttaacgccaacgttaacgatctttgtggtcaaagttcaaatgttaactgtgcctctcaaggtcctgagcagtattgtggcagtgatcgtaatgctataaattctcagccgactgacctgggattacacccattcaggacattcctactagatgcacagcaagcagaatcttttactttgaatcctagtgaaaaccctttgggtgatttttcatcaatgcaagaaagcattgaacaaagaccaggtggttccctggatggtcgccggctagcgtgcaagagaaaaaatattgaaggagccaatggccagagttcagcaggtgctagtacaagttttccccacaggaacgataatgcattccataacattgcttcttcaagttacaatcctgcacctatcagaaattcatcctctcccaagtgtttgccagttccaagttctattgaagatcaactcccacggtatggaactaatgtagggctctcagccggtacttatgaccttcatggaggggtcaacaatgctgtgaattcacagagaagtttccgagcaagaactaccacatctcaacaggttgctccctgtagtgtatggccctcttcaaatgctatcagactttctaattcatggaatcaccagccacctcatttccaaagtgcatttgatgatccccaggaggttattcctgtggtcagcagcctcaacttgcaataccaacatccaatgaatgttcctggtgtgccacaggctgctaaccgtttcactgaccatggagcttcatcatcgagagctgggagtttggagaacagaattattggtagtgaagaggttcctaggaggtatgccgcgcctaccaactactctgatttagttcccccacctgcagtagacctgagacgtttggtgccagaaccatttaattggagttctgatgtccgaggcactgcaatatcaggaagtattattcctcctgtatcaagaactaataacagttcaacagttaatccaccagcaggattcaatcaccaaaacctcaccagacgccatcctcgaaatttatcagaggagattggtcgtctatctggagcactccgcggccatcaacccccacgcttaaggtcagggtttctgttggagcgtcagggcgatggtgtttggggcgttcctttatcaacaaggggtagagaaggaagaaggttaatggagattcggaatgcacttgaaatgattcaaaggggggaaaatgtaaggctcgagtctatcttctatggcggcctcgacattcatgacagacacagggacatgcgccttgacattgacaatatgtcctatgaggaactattagcacttgaggaaaggatcggaaatgttagcactggcctcagcgaggaagctgtgataaagttgctcaaacaaaggaaattttcatcgtggagactaaaagcatctttggacccagaaccatgctgtatttgccaggaggagtacgttgatggagacgatctcgggaggctggactgcgggcacgacttccatgctggctgcatcaagcaatggctggtggtgaagaacgtgtgccccatctgcaagaacaccgcattgaaggcctgaaaccgaacaaaggaggcatgctgctctgctctcggattcgacctgattgagaacacaacatatccaggcctactgccgcgggcgtggggtgggtgtttgcatggatcccatgcgtccgttgcacctgcatatgttccttgccggcgtcaggcgccggccgggccgcgagaaaacc

SEQ ID NO: 23868 - DNA, 2518 bp, Zea Mays
ctcccaccgcgcttgcatcctctcatcgccaccccaccctcctcctccctgtctttctccccccctctctctccccctcttgacaaattttcctccacccattcccttcctcccctcttcttcttctccacccactccaccgatccccctctttctctctgaattctctctcgtcgtgcccacccttccatctgtctgctgcctctctctctcgcaatcagtcactcggctcttgtttcttccgtctgctgggttgattctttctcttcctctccgtggagaaacaggaggagagaggaaagaagagaaatcggaaccagcctgttctttttgcctggattgcggttcttgcgagttgttcagaaactctgggccagtttctggtcctttaaactactggaaagaggaaccatcagagatgccaaggcagccaacaaattgatatctaattgccctactttggatcatcataatgcaaggacagaggaattctatggagcattttgctgatgtctttggattcgacgttgcatcgagttcaggcaaccctgtgatggatcagcagtcatattggaataatgttcttggatcagtagaatcacataatcttcaaggttatcagatggctcacagtgatgccgccatgccatatggaaatgaaccacagcaagatggtacatttcttggtttctgggaatcaggcgaagcaagttcaagtgccagtgcactaaactatggcagctctaataatgtcaaaacagagcatcttaacattggtggtggaggtggactgaggattggtgaaagccgactggtagctgacaatggcatttctctggatgtggatatcaaccttaacgccaacgttaacgatctttgtggtcaaagttcaaatgttaactgtgcctctcaaggtcctgagcagtattgtggcagtgatcgtaatgctataaattctcagccgactgacctgggattacacccattcaggacattcctactagatgcacagcaagcagaatcttttactttgaatcctagtgaaaaccctttgggtgatttttcatcaatgcaagaaagcattgaacaaagaccaggtggttccctggatggtcgccggctagcgtgcaagagaaaaaatattgaaggagccaatggccagagttcagcaggtgctagtacaagttttccccacaggaacgataatgcattccataacattgcttcttcaagttacaatcctgcacctatcagaaattcatcctctcccaagtgtttgccagttccaagttctattgaagatcaactcccacggtatggaactaatgtagggctctcagccggtacttatgaccttcatggaggggtcaacaatgctgtgaattcacagagaagtttccgagcaagaactaccacatctcaacaggaggttattcctgtggtcagcagcctcaacttgcaataccaacatccaatgaatgttcctggtgtgccacaggctgctaaccgtttcactgaccatggagcttcatcatcgagagctgggagtttggagaacagaattattggtagtgaagaggttcctaggagttaatccaccagcaggattcaatcaccaaaacctcaccagacgccatcctcgaaatttatcagaggagattggtcgtctatctggagcactccgcggccatcaacccccacgcttaaggtcagggtttctgttggagcgtcagggcgatggtgtttggggcgttcctttatcaacaaggggtagagaaggaagaaggttaatggagattcggaatgcacttgaaatgattcaaaggggggaaaatgtaaggctcgagtctatcttctatggcggcctcgacattcatgacagacacagggacatgcgccttgacattgacaatatgtcctatgaggaactattagcacttgaggaaaggatcggaaatgttagcactggcctcagcgaggaagctgtgataaagttgctcaaacaaaggaaattttcatcgtggagactaaaagcatctttggacccagaaccatgctgtatttgccaggaggagtacgttgatggagacgatctcgggaggctggactgcgggcacgacttccatgctggctgcatcaagcaatggctggtggtgaagaacgtgtgccccatctgcaagaacaccgcattgaaggcctgaaaccgaacaaaggcccgtcagagacacacccatgttccgtgtccattcgatcggtcgcaagatcatttacccgattggtttttactatgcgttttttggttgggaaaattttgccatttcacctgggaaagtggtgggggggtgttggaggtggaagagaagatggcggtccctgtaaactgctgctgctgctgctgcagtaaataatccctggaatttgtctccctgcatttaaacaaaatatttatggctgttataatggacgccgtcgtagggttataacttgaaagatagcattgtgtgccaccacccgccat

SEQ ID NO: 23869 - DNA, 2153 bp, Zea Mays
ctcccaccgcgcttgcatcctctcatcgccaccccaccctcctcctccctgtctttctccccccctctctctccccctcttgacaaattttcctccacccattcccttcctcccctcttcttcttctccacccactccaccgatccccctctttctctctgaattctctctcgtcgtgcccacccttccatctgtctgctgcctctctctctcgcaatcagtcactcggctcttgtttcttccgtctgctgggttgattctttctcttcctctccgtggagaaacaggaggagagaggaaagaagagaaatcggaaccagcctgttctttttgcctggattgcggttcttgcgagttgttcagaaactctgggccagtttctggtcctttaaactactggaaagaggaaccatcagagatgccaaggcagccaacaaattgatatctaattgccctactttggatcatcataatgcaaggacagaggaattctatggagcattttgctgatgtctttggattcgacgttgcatcgagttcaggcaaccctgtgatggatcagcagtcatattggaataatgttcttggatcagtagaatcacataatcttcaaggttatcagatggctcacagtgatgccgccatgccatatggaaatgaaccacagcaagatggtacatttcttggtttctgggaatcaggcgaagcaagttcaagtgccagtgcactaaactatggcagctctaataatgtcaaaacagagcatcttaacattggtggtggaggtggactgaggattggtgaaagccgactggtagctgacaatggcatttctctggatgtggatatcaaccttaacgccaacgttaacgatctttgtggtcaaagttcaaatgttaactgtgcctctcaaggtcctgagcagtattgtggcagtgatcgtaatgctataaattctcagccgactgacctgggattacacccattcaggacattcctactagatgcacagcaagcagaatcttttactttgaatcctagtgaaaaccctttgggtgatttttcatcaatgcaagaaagcattgaacaaagaccaggtggttccctggatggtcgccggctagcgtgcaagagaaaaaatattgaaggagccaatggccagagttcagcaggtgctagtacaagttttccccacaggaacgataatgcattccataacattgcttcttcaagttacaatcctgcacctatcagaaattcatcctctcccaagtgtttgccagttccaagttctattgaagatcaactcccacggtatggaactaatgtagggctctcagccggtacttatgaccttcatggaggggtcaacaatgctgtgaattcacagagaagtttccgagcaagaactaccacatctcaacaggttgctccctgtagtgtatggccctcttcaaatgctatcagactttctaattcatggaatcaccagccacctcatttccaaagtgcatttgatgatccccaggaggttattcctgtggtcagcagcctcaacttgcaataccaacatccaatgaatgttcctggtgtgccacaggctgctaaccgtttcactgaccatggagcttcatcatcgagagctgggagtttggagaacagaattattggtagtgaagaggttcctaggaggtatgccgcgcctaccaactactctgatttagttcccccacctgcagtagacctgagacgtttggtgccagaaccatttaattggagttctgatgtccgaggcactgcaatatcaggaagtattattcctcctgtatcaagaactaataacagttcaacagttaatccaccagcaggattcaatcaccaaaacctcaccagacgccatcctcgaaatttatcagaggagattggtcgtctatctggagcactccgcggccatcaacccccacgcttaaggtcagggtttctgttggagcgtcagggcgatggtgtttggggcgttcctttatcaacaaggggtagagaaggaagaaggttaatggagattcggaatgcacttgaaatgattcaaaggggggaaaatgtaaggctcgaggaatcgtactaagataggaaattctttgacgccacgcgcatac

SEQ ID NO: 23870 - DNA, 1107 bp, Zea Mays
ggcgttttggattgtgaggaatgtgcaatgcatgtgagcaaagtcaatacaagaacccttcaaatacttggagacgtccgccagtggaagaggttttatgcaaactggcaacacactatattaacgttcactcaaggcaatgcatagatgaagctgaagtagtagagcaccttgttggcctgacgtctagtcttgcaaaatgcaaattcaggaaaccactgacatggttatctgtgcaagctaacggtgcagttatcccgaaaggttttgttcataaggacctggcgaagaaagacacctggttaaaagctttaatagcgatccctgacatccagccaagatatgcttttgcaatctggaagaagtatccctgcatgagatcccttctaaatgaatatatggatggcagtaaaaccgttgccgagaaggaacttctgcttagcgacttgaagtgggaagatcgactgggtgacgaaggcaaaaggctggggaacaaatgctctagaagggtgtacagaatgctcatggcacagaatggagacctggatgcagatgaccccgaagctggcggtagatcttagtgcctaatcatctggaccttgggccatcaatatatgcatgcccgccctcttgctgaccggtttgtgtacatatcgtccttttgaccatgcttgcactgtcagtgtcatggtgaaagagtcgcgcattagctcgtgcgatgtttggtgccgaaagcatggcctgcaatgctacacacgatggcacatggtgtgtgtgttttatttattaggtacctgtgaaaagcatttggtcgaagtcgaatgctaggaaactgggcattcgttgtgcgtagctagcttactgcctctatagagccccccaacaggctactccaacttttgagaacctataatatattatactagtagttcagaaaggcacgaggaaatgtttgtattgaatccatgctgccgtgctgtgtacggtaacccgcattgatccactgaaagatcccatgtatcgccgtttgtggaggacagctaccagtgaagtgacccttgcgcagctagttttgctcgtccgaatatgctctgtggaatgcatctg

SEQ ID NO: 23871 - DNA, 1423 bp, Zea Mays
caagtgtttcatatgcttatccatggataaggtcctcttctttcaagtttgacagagaatggtctttcctatgaacctaccaagaatagaatcagcggttcaattttatggaagttggatgttcctgatgatattgctcaggcgttttccgaccttaacaatagctgtgatatgaaccaaaatccattgtcacaagtgaaatatgtagcaattgtgcttgaagctgaggaattttgtaaccttataagcaatggatcgttctttgatcatgtccaaagagtttgtgatggatacccaggattcaccatttgctacatcattaataaattgatgaactacatcaacaaatgtgagcaaagtcaatacaagaacccttcaaatacttggagacgtccgccagtggaagaggttttatgcaaactggcaacacactatattaacgttcactcaaggcaatgcatagatgaagctgaagtagtagagcaccttgttggcctgacgtctagtcttgcaaaatgcaaattcaggaaaccactgacatggttatctgtgcaagctaacggtgcagttatcccgaaaggttttgttcataaggacctggcgaagaaagacacctggttaaaagctttaatagcgatccctgacatccagccaagatatgcttttgcaatctggaagaagtatccctgcatgagatcccttctaaatgaatatatggatggcagtaaaaccgttgccgagaaggaacttctgcttagcgacttgaagtgggaagatcgactgggtgacgaaggcaaaaggctggggaacaaatgctctagaagggtgtacagaatgctcatggcacagaatggagacctggatgcagatgaccccgaagctggcggtagatcttagtgcctaatcatctggaccttgggccatcaatatatgcatgcccgccctcttgctgaccggtttgtgtacatatcgtccttttgaccatgcttgcactgtcagtgtcatggtgaaagagtcgcgcattagctcgtgcgatgtttggtgccgaaagcatggcctgcaatgctacacacgatggcacatggtgtgtgtgttttatttattaggtacctgtgaaaagcatttggtcgaagtcgaatgctaggaaactgggcattcgttgtgcgtagctagcttactgcctctatagagccccccaacaggctactccaacttttgagaacctataatatattatactagtagttcagaaaggcacgaggaaatgtttgtattgaatccatgctgccgtgctgtgtacggtaacccgcattgatccactgaaagatcccatgtatcgccgtttgtggaggacagctaccagtgaagtgacccttgcgcagctagttttgctcgtccgaatatgctctgtggaatgcatctg

SEQ ID NO: 23872 - DNA, 1818 bp, Zea Mays
agattttgtggttgaaatcatttgacaacagagaaaacatgaagcgatgatgtgccaaaaggacggtaccgagcaggttcatgagaagcagaaaagacaaccggcagggaagaaactgacgaaggaggagaaagacaagctgatgcaagaaagaaaacaaaaacggcaggaagataaactactgaagcaagccttgaaagatgaactagctaagaagaagaaaatggaaaaagcaattcagaaatgggaatcaggaaaatttgctttagaatgtataactgttgagattgacaacagtgttatccaaaggggctctattggaggtcctcttctttcaagtttgacagagaatggtctttcctatgaacctaccaagaatagaatcagcggttcaattttatggaagttggatgttcctgatgatattgctcaggcgttttccgaccttaacaatagctgtgatatggtgctacatgtttcctttattcctctctaaccttttagcatcatatcttctattttacagtaaccacacagtcctaaaattgtagcatgacatctttctacagaaccaaaatccattgtcacaagtgaaatatgtagcaattgtgcttgaagctgaggaattttgtaaccttataagcaatggatcgttctttgatcatgtccaaagagtttgtgatggatacccaggattcaccatttgctacatcattaataaattgatgaactacatcaacaaatgtgagcaaagtcaatacaagaacccttcaaatacttggagacgtccgccagtggaagaggttttatgcaaactggcaacacactatattaacgttcactcaaggcaatgcatagatgaagctgaagtagtagagcaccttgttggcctgacgtctagtcttgcaaaatgcaaattcaggaaaccactgacatggttatctgtgcaagctaacggtgcagttatcccgaaaggttttgttcataaggacctggcgaagaaagacacctggttaaaagctttaatagcgatccctgacatccagccaagatatgcttttgcaatctggaagaagtatccctgcatgagatcccttctaaatgaatatatggatggcagtaaaaccgttgccgagaaggaacttctgcttagcgacttgaagtgggaagatcgactgggtgacgaaggcaaaaggctggggaacaaatgctctagaagggtgtacagaatgctcatggcacagaatggagacctggatgcagatgaccccgaagctggcggtagatcttagtgcctaatcatctggaccttgggccatcaatatatgcatgcccgccctcttgctgaccggtttgtgtacatatcgtccttttgaccatgcttgcactgtcagtgtcatggtgaaagagtcgcgcattagctcgtgcgatgtttggtgccgaaagcatggcctgcaatgctacacacgatggcacatggtgtgtgtgttttatttattaggtacctgtgaaaagcatttggtcgaagtcgaatgctaggaaactgggcattcgttgtgcgtagctagcttactgcctctatagagccccccaacaggctactccaacttttgagaacctataatatattatactagtagttcagaaaggcacgaggaaatgtttgtattgaatccatgctgccgtgctgtgtacggtaacccgcattgatccactgaaagatcccatgtatcgccgtttgtggaggacagctaccagtgaagtgacccttgcgcagctagttttgctcgtccgaatatgctctgtggaatgcatctg

SEQ ID NO: 23873 - DNA, 2245 bp, Zea Mays
aattccccatctcgcctcggctaggcgaatccgcaaacacagctctgtctatggcgtcctccgttcccgtggtcgacatcctcgacgacgacgacgacgacaacacctgcctcggcatcgcctcccctgcctcgtgcaagcggtccctcggatcctccggaacctcttcccgcgatttcctcgacgcgttctcgccgtccccgcccctgcgaaagcggcctcccctcgcggcggtggcccccatcaacctcgacgacaccccgtctccgcctaagcggcggcgctcctcggtctccatcaacctcgacgacaccccgtcaccgccaaagccgcggctctcctcggtgcccaagcagccggtcggggtggacgacgacgtggcgctctcacccactggtgatgttgttgccgacaggcccgattctatcttttactgggccgctttctccgagtcaccagagacggttgtgcccacttctgacggcctcggcagtcttgctgctgagactccgggcttcgcctccccggactcggttaggccacctgctgcccctgacatgtcaatgtcatctgctccgccggcacaaaaaggatctggagttacctctctgatatcacttgatagtgacaatgagtcagatgatgacatcatgaacatggagcctttgaccaatttgccaaacaataaggaagcgatgatgtgccaaaaggacggtaccgagcaggttcatgagaagcagaaaagacaaccggcagggaagaaactgacgaaggaggagaaagacaagctgatgcaagaaagaaaacaaaaacggcaggaagataaactactgaagcaagccttgaaagatgaactagctaagaagaagaaaatggaaaaagcaattcagaaatgggaatcaggaaaatttgctttagaatgtataactgttgagattgacaacagtgttatccaaaggggctctattggaggtcctcttctttcaagtttgacagagaatggtctttcctatgaacctaccaagaatagaatcagcggttcaattttatggaagttggatgttcctgatgatattgctcaggcgttttccgaccttaacaatagctgtgatatgaaccaaaatccattgtcacaagtgaaatatgtagcaattgtgcttgaagctgaggaattttgtaaccttataagcaatggatcgttctttgatcatgtccaaagagtttgtgatggatacccaggattcaccatttgctacatcattaataaattgatgaactacatcaacaaatgtgagcaaagtcaatacaagaacccttcaaatacttggagacgtccgccagtggaagaggaaaccactgacatggttatctgtgcaagctaacggtgcagttatcccgaaaggttttgttcataaggacctggcgaagaaagacacctggttaaaagctttaatagcgatccctgacatccagccaagatatgcttttgcaatctggaagaagtatccctgcatgagatcccttctaaatgaatatatggatggcagtaaaaccgttgccgagaaggaacttctgcttagcgacttgaagtgggaagatcgactgggtgacgaaggcaaaaggctggggaacaaatgctctagaagggtgtacagaatgctcatggcacagaatggagacctggatgcagatgaccccgaagctggcggtagatcttagtgcctaatcatctggaccttgggccatcaatatatgcatgcccgccctcttgctgaccggtttgtgtacatatcgtccttttgaccatgcttgcactgtcagtgtcatggtgaaagagtcgcgcattagctcgtgcgatgtttggtgccgaaagcatggcctgcaatgctacacacgatggcacatggtgtgtgtgttttatttattaggtacctgtgaaaagcatttggtcgaagtcgaatgctaggaaactgggcattcgttgtgcgtagctagcttactgcctctatagagccccccaacaggctactccaacttttgagaacctataatatattatactagtagttcagaaaggcacgaggaaatgtttgtattgaatccatgctgccgtgctgtgtacggtaacccgcattgatccactgaaagatcccatgtatcgccgtttgtggaggacagctaccagtgaagtgacccttgcgcagctagttttgctcgtccgaatatgctctgtggaatgcatctg

SEQ ID NO: 23874 - DNA, 2364 bp, Zea Mays
tcaaaattccccatctcgcctcggctaggcgaatccgcaaacacagctctgtctatggcgtcctccgttcccgtggtcgacatcctcgacgacgacgacgacgacaacacctgcctcggcatcgcctcccctgcctcgtgcaagcggtccctcggatcctccggaacctcttcccgcgatttcctcgacgcgttctcgccgtccccgcccctgcgaaagcggcctcccctcgcggcggtggcccccatcaacctcgacgacaccccgtctccgcctaagcggcggcgctcctcggtctccatcaacctcgacgacaccccgtcaccgccaaagccgcggctctcctcggtgcccaagcagccggtcggggtggacgacgacgtggcgctctcacccactggtgatgttgttgccgacaggcccgattctatcttttactgggccgctttctccgagtcaccagagacggttgtgcccacttctgacggcctcggcagtcttgctgctgagactccgggcttcgcctccccggactcggttaggccacctgctgcccctgacatgtcaatgtcatctgctccgccggcacaaaaaggatctggagttacctctctgatatcacttgatagtgacaatgagtcagatgatgacatcatgaacatggagcctttgaccaatttgccaaacaataaggaagcgatgatgtgccaaaaggacggtaccgagcaggttcatgagaagcagaaaagacaaccggcagggaagaaactgacgaaggaggagaaagacaagctgatgcaagaaagaaaacaaaaacggaagataaactactgaagcaagccttgaaagatgaactagctaagaagaagaaaatggaaaaagcaattcagaaatgggaatcaggaaaatttgctttagaatgtataactgttgagattgacaacagtgttatccaaaggggctctattggaggtcctcttctttcaagtttgacagagaatggtctttcctatgaacctaccaagaatagaatcagcggttcaattttatggaagttggatgttcctgatgatattgctcaggcgttttccgaccttaacaatagctgtgatatgaaccaaaatccattgtcacaagtgaaatatgtagcaattgtgcttgaagctgaggaattttgtaaccttataagcaatggatcgttctttgatcatgtccaaagagtttgtgatggatacccaggattcaccatttgctacatcattaataaattgatgaactacatcaacaaatgtgagcaaagtcaatacaagaacccttcaaatacttggagacgtccgccagtggaagaggttttatgcaaactggcaacacactatattaacgttcactcaaggcaatgcatagatgaagctgaagtagtagagcaccttgttggcctgacgtctagtcttgcaaaatgcaaattcaggaaaccactgacatggttatctgtgcaagctaacggtgcagttatcccgaaaggttttgttcataaggacctggcgaagaaagacacctggttaaaagctttaatagcgatccctgacatccagccaagatatgcttttgcaatctggaagaagtatccctgcatgagatcccttctaaatgaatatatggatggcagtaaaaccgttgccgagaaggaacttctgcttagcgacttgaagtgggaagatcgactgggtgacgaaggcaaaaggctggggaacaaatgctctagaagggtgtacagaatgctcatggcacagaatggagacctggatgcagatgaccccgaagctggcggtagatcttagtgcctaatcatctggaccttgggccatcaatatatgcatgcccgccctcttgctgaccggtttgtgtacatatcgtccttttgaccatgcttgcactgtcagtgtcatggtgaaagagtcgcgcattagctcgtgcgatgtttggtgccgaaagcatggcctgcaatgctacacacgatggcacatggtgtgtgtgttttatttattaggtacctgtgaaaagcatttggtcgaagtcgaatgctaggaaactgggcattcgttgtgcgtagctagcttactgcctctatagagccccccaacaggctactccaacttttgagaacctataatatattatactagtagttcagaaaggcacgaggaaatgtttgtattgaatccatgctgccgtgctgtgtacggtaacccgcattgatccactgaaagatcccatgtatcgccgtttgtggaggacagctaccagtgaagtgacccttgcgcagctagttttgctcgtccgaatatgctctgtggaatgcatctg

SEQ ID NO: 23875 - DNA, 5813 bp, Zea Mays
cgctctgcaccgcgcgcctccttctctgctgcggcaaccgggaactgcggctgcggcggcggcgacttaaaccctcgagctcgctccaaggccgtcgctggtcgatcgggcggaagaggcagaagccagccagccagccaatggcccccaaggccggccgtggcaagggcaggggcggcaaaggcgacaagaggaagaaggaagagaaagtggtgcccagcgtggtagacgtcacggtggtcacccccgacgagtcccaggtgacactcaaggggatatccacggaccgcgtgctggacgtgcggaagctgctggggtcgaacgtggaaacgtgtcacctgacaaactattcactctcccatgtggcgcgcgggcaccggctggaggacggcgcggaggtggtggcgctcaagccctgcgctctccggatcgtcgaagaggagtacgcgacggcggagcaggcggaggcgcacgtccgccggctgctggacatcctcgcctgcaccaccgcgttcgccaggccccgggacggcgccgccaagcacagggcgtccaggcacggccgccccgcgacaccgccctcctctcccacgcccgcctcgaccggggcccatggcgtcgccagcggcgaggccgcgccgccgatatcggaggcgcacgacatggccgccatccggccgccgcccaagctgggggagttctacgacttcttctccttcgcccatctcaccccgcccgtccactttatcaggaggaaggaggcgaatggcgcttctcaggaaggcgatcacttcgaaatcgaggtgaaggtttgcaacgggaagcttctgcacgttgttgcttcagtaaagggtttctacttgtcagggaagccacacaacgttagccactccctggtggacctgctgcaacagctcagcaatgcgtttgctaatgcatatgaggcgttgatgaaagctttcgtggatcacaacaagtttgggaatttgccttacggattccgtgcaaacacatggcttatccctccaatatatgttgactctgccacaaggtgcccagcactgccagtcgaggatgagaattggggtggaaatgggggtggctgtggacgtgatggaaagtatgatcgcagacggtggtcaaaagagttttctgttttggctagaatgccttgcaaaactgaggaagaacgggtgatcagagaccggaaagcttttcttttacacaatctgtttgtagatacagcaatttttagagctgcgtcaacaataaggcgactcattgatcagtctatgaactcagttggttcacatagtggtacacatggttcaaacgtatttgaggaacgtataggggacatgaatataactgtgaagaaggatggtgctgatgctagtttaaaggtggaggacaaggttgatggtgttgccttctgtcaaacgggtgctatggatattgcacaaaggaatcttctgaaaggtttaacctctgatgaaaatgttgttgctaaggattcttcaacactcggggtggtgattgtcaagcattgtggatatacggcaactgtgaaggtttctggacgtgcaaaggacagtaatgatgttaaacaaacaaatgacatctctggtaaatttgatggaatgctgaccattgatgtacatgaccatccagatggaggttctaatgccttgaatgttaacagtctaaggataccactcccgagagttatccatccagaaactgttgttggtaaccagcaccatagcccaaagtctcatgctagtaatcctgcaaagaaattggcacgtaaaatactcaaggacagcttggtaaagctggatagcatgcctagcataaattctagaattattagatgggaactggggtcctcctggctgcaacaattgcagaaaaaggatactccagcgtctgagaatggtaaggggaatgcgatgaagactgacaaagaaccagctgtcagaggtcttggaaagcattttgaacaattaaggaaacttaaaaagaaagaatgcaacaatgaaggttccagttctgagaaggaagaatgtagcaataactattcatcaatgaatggtacacaagtatcagatatgatagctgctgatgaagcaaataacggggctgatattagcaagttaatgtcagaggatgctttccttagcttaaagagtttgggagctggccttcatgaaaagtccctcgaagagctcacaaagatggcccataatttctatgatgatactgcactcccaaagctggtagctgattttgcgtcccttgagctttctcctgtggatggaagaaccatgacagatttcatgcatgcaaggggacttaatatgtcctctttaggcagggtggtagagctagcagagaagctcccacacatccagtctatatgcattcatgaaatggttattagatcctttaagcacatcatccgagctgttattgctgctgttgatgacatgcaaaatatgtctgcagctatagctgaaactctaaacatattactaggatctcccagacttgaaaatggtgctgacacggatgcccatattgacaataatttgcgactgaaatgggtagagagcttcctttcaaaaagattctgctggaaactgaaagatgaatttgcacatttacggaaatgtatcattctgagagggctttgcagcaaggttggactggagttagctgcaagagattatgatatgaatagccctaacccattcgacaaatctgacattgtcagcattgttcctgtgtgcaagcatgtggtctactcatctattgatggtcgaaacttgcttgaatcatcaaagatggcattggataaaggaaaattagatgatgctgtgagctatggaacaaaggcactgtccaaaattatagctgtttgtggtccataccatcgactggcagctaatgcatacagccttcttgctgtggtgctttatcatactggagattttaatcaggcaactatatatcaacagaaggcacttgatatcaatgaaagggagctgggtcttgatcatccggaaactatgaagagttatggggatttatctgtcttctactaccgccttcaacacattgaaatggctctaaagtatgtcaaccgtgcgctatatctgcttcagttttcatgtgggctttcacacccaaattcagctgccacctacataaacgtagctatgatggaagaaggcatgggaaatgttcatgttgctcttcgatacttgcatgaagccctgaagtgcaataagaggttgctaggagctgatcacatccagactgctgcaagctaccatgctatagccatagccctttcaatgatggatgcgtactccctaagtgtgcaacatgaacaaacaaccatgcagatacttcaggagaaactaggggaagatgacctccgaactcaggatgctgctgcatggctagaatattttgagtcaaaagcattagaacaacaagaggctgcccgaagaggcatgccaaaacctgattcatctattgcaagtaaaggacatcttaggtatgaaactacaaataatctgagcagtttcatttataaaatatttaaatttagattgaaacatctacctttccagtgtatcagatcttcttgacttcataagcccagtccaggaaagaaaagaaagcaatgtgcaaaggaagtgtcggcgtgcaaagaataataccagagctcatcatggtgaatcagttgaagaaaaggagaatttccagcatgactcaggatctcttggagcaagtaaagacggttttgaagaagaaaaacctgatgtgcatcctcctgctgtattagaagaaaattatgctgcccatgaagagcagaagcaatgtgatgttttatcaccagaagaatattctgatgaagggtggcaagcagctaatatgagaggaaggtccgcaaatgtaaggaagaaaagtagtcgcaggaaacccgctcttatgaaattaatggttgatcgtttcgaagatgatcatacaggttctgtgtataggactggtttacagcctcgaacaaaaggggagaaagatgattctgcaactgctcctagccagatttcatttggtagctttttaaaaactgacaagttgaatggggatcccagcattgctgaagataagtctttgaatggtactgctaaaccagaacaatttacaaatccaacaggaattaacaggccaaccagcattgcttccaagtttatatcatacaaagatgtggctgtttcgccccctggcacagtattgaaaccaattttggagaagaaggaagcaaaggagaagggtagtggacatgatatttatctaacactgtcatccgaggaagaagatccacagtttacagaaaatgagaaggaaaagccaagtgaggacagtagcaaagaggttctttcaagtcagcaagacttagagagtcatgtagaaacacctgacagcaacagtgatgaaaacccatctgcacctaagaaggcatctggaagcaaactgtcagcttcagcgcctccattcaatccaggatcactcttatcaatgtcccacccatacagcacggtggcaatatatgatgctagtgctgttattcaggcagtaccaaaccaagcaatggagattctccctcatgccattgacactagagtgcctcgtggccctcggtccaccttgtactatcgtactgggcattccttccaaaggaagcaaggttacacgcacagccagagcactattgtaaggggtagttactcccccacaaccatgaacccccatgctgctgaatttgtgcctggaaaaacttcgcagcaatctgatgtggctgacagagaacccagtcctgctaatcatgtggccaattctgatctggatgttgtatcacagaccacagatgaagtgaaggctgaaacacctgccactgaaaaggcaggtcaagttgagaaagtcgtttcaggtaaaggaaaggaaaacagagggaaagacatcgtgagaaactcatacaaaacagaacttgcaaggcaaattttgctcagtttcattgtgaagtcagtgcatgacagtttaggttccgcccaagctgaaccagagaggaagccaagtggatcagatgaagctagtaataaacagagcagcaacttagtcaagaatgcttctggtcgcaaagattcagataaacaagagaaatccatggaggttcccaagggcctgaaggatacagagggatttacagtcgtttcaaaacgtcgaaggcggccccagccattcatgaaccccataaacggcctctgttctcagccgtctatttgcacctctgtcatttctcaagatgtcgtggggatttatcgttgcaatctgcaaatgctgtcagagcagaagaaactgaatctgctaggcgccaagagtttgttcatgaaggcatgtcttttattgcttctttcccctgtgcccagactgctcagtgtggtcattggatgccttgtcagaggacggagcagcgtttcaccgtgaagcaattgcagctgcagaccagatcaccagaccactgaggccaggcgtgaactgggccggcagttttaaagctgttggcagctacgtatactgtacgagtctaaggagtagcctgcagctaagcgtagctgcagagaccacacaaatgtgaatcaaatcagttcagttccaaactgtcattgctgggagccaacatccgagactgaaaaatatgttgtgcatacgtatttttcttttgcatttaaatttgaaaccgg

SEQ ID NO: 23876 - DNA, 5940 bp, Zea Mays
cgctctgcaccgcgcgcctccttctctgctgcggcaaccgggaactgcggctgcggcggcggcgacttaaaccctcgagctcgctccaaggccgtcgctggtcgatcgggcggaagaggcagaagccagccagccagccaatggcccccaaggccggccgtggcaagggcaggggcggcaaaggcgacaagaggaagaaggaagagaaagtggtgcccagcgtggtagacgtcacggtggtcacccccgacgagtcccaggtgacactcaaggggatatccacggaccgcgtgctggacgtgcggaagctgctggggtcgaacgtggaaacgtgtcacctgacaaactattcactctcccatgtggcgcgcgggcaccggctggaggacggcgcggaggtggtggcgctcaagccctgcgctctccggatcgtcgaagaggagtacgcgacggcggagcaggcggaggcgcacgtccgccggctgctggacatcctcgcctgcaccaccgcgttcgccaggccccgggacggcgccgccaagcacagggcgtccaggcacggccgccccgcgacaccgccctcctctcccacgcccgcctcgaccggggcccatggcgtcgccagcggcgaggccgcgccgccgatatcggaggcgcacgacatggccgccatccggccgccgcccaagctgggggagttctacgacttcttctccttcgcccatctcaccccgcccgtccactttatcaggaggaaggaggcgaatggcgcttctcaggaaggcgatcacttcgaaatcgaggtgaaggtttgcaacgggaagcttctgcacgttgttgcttcagtaaagggtttctacttgtcagggaagccacacaacgttagccactccctggtggacctgctgcaacagctcagcaatgcgtttgctaatgcatatgaggcgttgatgaaagctttcgtggatcacaacaagtttgggaatttgccttacggattccgtgcaaacacatggcttatccctccaatatatgttgactctgccacaaggtgcccagcactgccagtcgaggatgagaattggggtggaaatgggggtggctgtggacgtgatggaaagtatgatcgcagacggtggtcaaaagagttttctgttttggctagaatgccttgcaaaactgaggaagaacgggtgatcagagaccggaaagcttttcttttacacaatctgtttgtagatacagcaatttttagagctgcgtcaacaataaggcgactcattgatcagtctatgaactcagttggttcacatagtggtacacatggttcaaacgtatttgaggaacgtataggggacatgaatataactgtgaagaaggatggtgctgatgctagtttaaaggtggaggacaaggttgatggtgttgccttctgtcaaacgggtgctatggatattgcacaaaggaatcttctgaaaggtttaacctctgatgaaaatgttgttgctaaggattcttcaacactcggggtggtgattgtcaagcattgtggatatacggcaactgtgaaggtttctggacgtgcaaaggacagtaatgatgttaaacaaacaaatgacatctctggtaaatttgatggaatgctgaccattgatgtacatgaccatccagatggaggttctaatgccttgaatgttaacagtctaaggataccactcccgagagttatccatccagaaactgttgttggtaaccagcaccatagcccaaagtctcatgctagtaatcctgcaaagaaattggcacgtaaaatactcaaggacagcttggtaaagctggatagcatgcctagcataaattctagaattattagatgggaactggggtcctcctggctgcaacaattgcagaaaaaggatactccagcgtctgagaatggtaaggggaatgcgatgaagactgacaaagaaccagctgtcagaggtcttggaaagcattttgaacaattaaggaaacttaaaaagaaagaatgcaacaatgaaggttccagttctgagaaggaagaatgtagcaataactattcatcaatgaatggtacacaagtatcagatatgatagctgctgatgaagcaaataacggggctgatattagcaagttaatgtcagaggatgctttccttagcttaaagagtttgggagctggccttcatgaaaagtccctcgaagagctcacaaagatggcccataatttctatgatgatactgcactcccaaagctggtagctgattttgcgtcccttgagctttctcctgtggatggaagaaccatgacagatttcatgcatgcaaggggacttaatatgtcctctttaggcagggtggtagagctagcagagaagctcccacacatccagtctatatgcattcatgaaatggatctcccagacttgaaaatggtgctgacacggatgcccatattgacaataatttgcgactgaaatgggtagagagcttcctttcaaaaagattctgctggaaactgaaagatgaatttgcacatttacggaaatgtatcattctgagagggctttgcagcaaggttggactggagttagctgcaagagattatgatatgaatagccctaacccattcgacaaatctgacattgtcagcattgttcctgtgtgcaagcatgtggtctactcatctattgatggtcgaaacttgcttgaatcatcaaagatggcattggataaaggaaaattagatgatgctgtgagctatggaacaaaggcactgtccaaaattatagctgtttgtggtccataccatcgactggcagctaatgcatacagccttcttgctgtggtgctttatcatactggagattttaatcaggcaactatatatcaacagaaggcacttgatatcaatgaaagggagctgggtcttgatcatccggaaactatgaagagttatggggatttatctgtcttctactaccgccttcaacacattgaaatggctctaaagtatgtcaaccgtgcgctatatctgcttcagttttcatgtgggctttcacacccaaattcagctgccacctacataaacgtagctatgatggaagaaggcatgggaaatgttcatgttgctcttcgatacttgcatgaagccctgaagtgcaataagaggttgctaggagctgatcacatccagactgctgcaagctaccatgctatagccatagccctttcaatgatggatgcgtactccctaagtgtgcaacatgaacaaacaaccatgcagatacttcaggagaaactaggggaagatgacctccgaactcaggatgctgctgcatggctagaatattttgagtcaaaagcattagaacaacaagaggctgcccgaagaggcatgccaaaacctgattcatctattgcaagtaaaggacatcttagatcttcttgacttcataagcccagtccaggaaagaaaagaaagcaatgtgcaaaggaagtgtcggcgtgcaaagaataataccagagctcatcatggtgaatcagttgaagaaaaggagaatttccagcatgactcaggatctcttggagcaagtaaagacggttttgaagaagaaaaacctgatgtgcatcctcctgctgtattagaagaaaattatgctgcccatgaagagcagaagcaatgtgatgttttatcaccagaagaatattctgatgaagggtggcaagcagctaatatgagaggaaggtccgcaaatgtaaggaagaaaagtagtcgcaggaaacccgctcttatgaaattaatggttgatcgtttcgaagatgatcatacaggttctgtgtataggactggtttacagcctcgaacaaaaggggagaaagatgattctgcaactgctcctagccagatttcatttggtagctttttaaaaactgacaagttgaatggggatcccagcattgctgaagataagtctttgaatggtactgctaaaccagaacaatttacaaatccaacaggaattaacaggccaaccagcattgcttccaagtttatatcatacaaagatgtggctgtttcgccccctggcacagtattgaaaccaattttggagaagaaggaagcaaaggagaagggtagtggacatgatatttatctaacactgtcatccgaggaagaagatccacagtttacagaaaatgagaaggaaaagccaagtgaggacagtagcaaagaggttctttcaagtcagcaagacttagagagtcatgtagaaacacctgacagcaacagtgatgaaaacccatctgcacctaagaaggcatctggaagcaaactgtcagcttcagcgcctccattcaatccaggatcactcttatcaatgtcccacccatacagcacggtggcaatatatgatgctagtgctgttattcaggcagtaccaaaccaagcaatggagattctccctcatgccattgacactagagtgcctcgtggccctcggtccaccttgtactatcgtactgggcattccttccaaaggaagcaaggttacacgcacagccagagcactattgtaaggggtagttactcccccacaaccatgaacccccatgctgctgaatttgtgcctggaaaaacttcgcagcaatctgatgtggctgacagagaacccagtcctgctaatcatgtggccaattctgatctggatgttgtatcacagaccacagatgaagtgaaggctgaaacacctgccactgaaaaggcaggtcaagttgagaaagtcgtttcaggtaaaggaaaggaaaacagagggaaagacatcgtgagaaactcatacaaaacagaacttgcaaggcaaattttgctcagtttcattgtgaagtcagtgcatgacagtttaggttccgcccaagctgaaccagagaggaagccaagtggatcagatgaagctagtaataaacagagcagcaacttagtcaagaatgcttctggtcgcaaagattcagataaacaagagaaatccatggaggttcccaagggcctgaaggatacagagggatttacagtcgtttcaaaacgtcgaaggcggccccagccattcatgaaccccataaacggcctctgttctcagccgtctatttgcacctctgtcagttaaggtctcattgcattttcaaagacctgcaatagtttggaagatggaccattgcttttgcttaggggttggtagaagaattttgccgtatccaagcgagcagcgagcatgtagtcaaactgtacaaaattttccaggataccctttgtaataataataaaaaaaaactgctgtaatctgcagtagctgtagcgctgaataaagtattcctttgtatgttagatatgacagaatcagaggaaatagcaagcagatgtttaggttaatccaatatcccagtagtgcttctcttatgccctagtgtttctgcagtttctcaagatgtcgtggggatttatcgttgcaatctgcaaatgctgtcagagcagaagaaactgaatctgctaggcgccaagagtttgttcatgaaggcatgtcttttattgcttctttcccctgtgcccagactgctcagtgtggtcattggatgccttgtcagaggacggagcagcgtttcaccgtgaagcaattgcagctgcagaccagatcaccagaccactgaggccaggcgtgaactgggccggcagttttaaagctgttggcagctacgtatactgtacgagtctaaggagtagcctgcagctaagcgtagctgcagagaccacacaaatgtgaatcaaatcagttcagttccaaactgtcattgctgggagccaacatccgagactgaaaaatatgttgtgcatacgtatttttcttttgcatttaaatttgaaaccgg

SEQ ID NO: 23877 - DNA, 5849 bp, Zea Mays
cgctctgcaccgcgcgcctccttctctgctgcggcaaccgggaactgcggctgcggcggcggcgacttaaaccctcgagctcgctccaaggccgtcgctggtcgatcgggcggaagaggcagaagccagccagccagccaatggcccccaaggccggccgtggcaagggcaggggcggcaaaggcgacaagaggaagaaggaagagaaagtggtgcccagcgtggtagacgtcacggtggtcacccccgacgagtcccaggtgacactcaaggggatatccacggaccgcgtgctggacgtgcggaagctgctggggtcgaacgtggaaacgtgtcacctgacaaactattcactctcccatgtggcgcgcgggcaccggctggaggacggcgcggaggtggtggcgctcaagccctgcgctctccggatcgtcgaagaggagtacgcgacggcggagcaggcggaggcgcacgtccgccggctgctggacatcctcgcctgcaccaccgcgttcgccaggccccgggacggcgccgccaagcacagggcgtccaggcacggccgccccgcgacaccgccctcctctcccacgcccgcctcgaccggggcccatggcgtcgccagcggcgaggccgcgccgccgatatcggaggcgcacgacatggccgccatccggccgccgcccaagctgggggagttctacgacttcttctccttcgcccatctcaccccgcccgtccactttatcaggaggaaggaggcgaatggcgcttctcaggaaggcgatcacttcgaaatcgaggtgaaggtttgcaacgggaagcttctgcacgttgttgcttcagtaaagggtttctacttgtcagggaagccacacaacgttagccactccctggtggacctgctgcaacagctcagcaatgcgtttgctaatgcatatgaggcgttgatgaaagctttcgtggatcacaacaagtttgggaatttgccttacggattccgtgcaaacacatggcttatccctccaatatatgttgactctgccacaaggtgcccagcactgccagtcgaggatgagaattggggtggaaatgggggtggctgtggacgtgatggaaagtatgatcgcagacggtggtcaaaagagttttctgttttggctagaatgccttgcaaaactgaggaagaacgggtgatcagagaccggaaagcttttcttttacacaatctgtttgtagatacagcaatttttagagctgcgtcaacaataaggcgactcattgatcagtctatgaactcagttggttcacatagtggtacacatggttcaaacgtatttgaggaacgtataggggacatgaatataactgtgaagaaggatggtgctgatgctagtttaaaggtggaggacaaggttgatggtgttgccttctgtcaaacgggtgctatggatattgcacaaaggaatcttctgaaaggtttaacctctgatgaaaatgttgttgctaaggattcttcaacactcggggtggtgattgtcaagcattgtggatatacggcaactgtgaaggtttctggacgtgcaaaggacagtaatgatgttaaacaaacaaatgacatctctggtaaatttgatggaatgctgaccattgatgtacatgaccatccagatggaggttctaatgccttgaatgttaacagtctaaggataccactcccgagagttatccatccagaaactgttgttggtaaccagcaccatagcccaaagtctcatgctagtaatcctgcaaagaaattggcacgtaaaatactcaaggacagcttggtaaagctggatagcatgcctagcataaattctagaattattagatgggaactggggtcctcctggctgcaacaattgcagaaaaaggatactccagcgtctgagaatggtaaggggaatgcgatgaagactgacaaagaaccagctgtcagaggtcttggaaagcattttgaacaattaaggaaacttaaaaagaaagaatgcaacaatgaaggttccagttctgagaaggaagaatgtagcaataactattcatcaatgaatggtacacaagtatcagatatgatagctgctgatgaagcaaataacggggctgatattagcaagttaatgtcagaggatgctttccttagcttaaagagtttgggagctggccttcatgaaaagtccctcgaagagctcacaaagatggcccataatttctatgatgatactgcactcccaaagctggtagctgattttgcgtcccttgagctttctcctgtggatggaagaaccatgacagatttcatgcatgcaaggggacttaatatgtcctctttaggcagggtggtagagctagcagagaagctcccacacatccagtctatatgcattcatgaaatgacttgaaaatggtgctgacacggatgcccatattgacaataatttgcgactgaaatgggtagagagcttcctttcaaaaagattctgctggaaactgaaagatgaatttgcacatttacggaaatgtatcattctgagagggctttgcagcaaggttggactggagttagctgcaagagattatgatatgaatagccctaacccattcgacaaatctgacattgtcagcattgttcctgtgtgcaagcatgtggtctactcatctattgatggtcgaaacttgcttgaatcatcaaagatggcattggataaaggaaaattagatgatgctgtgagctatggaacaaaggcactgtccaaaattatagctgtttgtggtccataccatcgactggcagctaatgcatacagccttcttgctgtggtgctttatcatactggagattttaatcaggcaactatatatcaacagaaggcacttgatatcaatgaaagggagctgggtcttgatcatccggaaactatgaagagttatggggatttatctgtcttctactaccgccttcaacacattgaaatggctctaaagtatgtcaaccgtgcgctatatctgcttcagttttcatgtgggctttcacacccaaattcagctgccacctacataaacgtagctatgatggaagaaggcatgggaaatgttcatgttgctcttcgatacttgcatgaagccctgaagtgcaataagaggttgctaggagctgatcacatccagactgctgcaagctaccatgctatagccatagccctttcaatgatggatgcgtactccctaagtgtgcaacatgaacaaacaaccatgcagatacttcaggagaaactaggggaagatgacctccgaactcaggatgctgctgcatggctagaatattttgagtcaaaagcattagaacaacaagaggctgcccgaagaggcatgccaaaacctgattcatctattgcaagtaaaggacatcttagtgtatcagatcttcttgacttcataagcccagtccaggaaagaaaagaaagcaatgtgcaaaggaagtgtcggcgtgcaaagaataataccagagctcatcatggtgaatcagttgaagaaaaggagaatttccagcatgactcaggatctcttggagcaagtaaagacggttttgaagaagaaaaacctgatgtgcatcctcctgctgtattagaagaaaattatgctgcccatgaagagcagaagcaatgtgatgttttatcaccagaagaatattctgatgaagggtggcaagcagctaatatgagaggaaggtccgcaaatgactggtttacagcctcgaacaaaaggggagaaagatgattctgcaactgctcctagccagatttcatttggtagctttttaaaaactgacaagttgaatggggatcccagcattgctgaagataagtctttgaatggtactgctaaaccagaacaatttacaaatccaacaggaattaacaggccaaccagcattgcttccaagtttatatcatacaaagatgtggctgtttcgccccctggcacagtattgaaaccaattttggagaagaaggaagcaaaggagaagggtagtggacatgatatttatctaacactgtcatccgaggaagaagatccacagtttacagaaaatgagaaggaaaagccaagtgaggacagtagcaaagaggttctttcaagtcagcaagacttagagagtcatgtagaaacacctgacagcaacagtgatgaaaacccatctgcacctaagaaggcatctggaagcaaactgtcagcttcagcgcctccattcaatccaggatcactcttatcaatgtcccacccatacagcacggtggcaatatatgatgctagtgctgttattcaggcagtaccaaaccaagcaatggagattctccctcatgccattgacactagagtgcctcgtggccctcggtccaccttgtactatcgtactgggcattccttccaaaggaagcaaggttacacgcacagccagagcactattgtaaggggtagttactcccccacaaccatgaacccccatgctgctgaatttgtgcctggaaaaacttcgcagcaatctgatgtggctgacagagaacccagtcctgctaatcatgtggccaattctgatctggatgttgtatcacagaccacagatgaagtgaaggctgaaacacctgccactgaaaaggcaggtcaagttgagaaagtcgtttcaggtaaaggaaaggaaaacagagggaaagacatcgtgagaaactcatacaaaacagaacttgcaaggcaaattttgctcagtttcattgtgaagtcagtgcatgacagtttaggttccgcccaagctgaaccagagaggaagccaagtggatcagatgaagctagtaataaacagagcagcaacttagtcaagaatgcttctggtcgcaaagattcagataaacaagagaaatccatggaggttcccaagggcctgaaggatacagagggatttacagtcgtttcaaaacgtcgaaggcggccccagccattcatgaaccccataaacggcctctgttctcagccgtctatttgcacctctgtcagttaaggtctcattgcattttcaaagacctgcaatagtttggaagatggaccattgcttttgcttaggggttggtagaagaattttgccgtatccaagcgagcagcgagcatgtagtcaaactgtacaaaattttccaggataccctttgtaataataataaaaaaaaactgctgtaatctgcagtagctgtagcgctgaataaagtattcctttgtatgttagatatgacagaatcagaggaaatagcaagcagatgtttaggttaatccaatatcccagtagtgcttctcttatgccctagtgtttctgcagtttctcaagatgtcgtggggatttatcgttgcaatctgcaaatgctgtcagagcagaagaaactgaatctgctaggcgccaagagtttgttcatgaaggcatgtcttttattgcttctttcccctgtgcccagactgctcagtgtggtcattggatgccttgtcagaggacggagcagcgtttcaccgtgaagcaattgcagctgcagaccagatcaccagaccactgaggccaggcgtgaactgggccggcagttttaaagctgttggcagctacgtatactgtacgagtctaaggagtagcctgcagctaagcgtagctgcagagaccacacaaatgtgaatcaaatcagttcagttccaaactgtcattgctgggagccaacatccgagactgaaaaatatgttgtgcatacgtatttttcttttgcatttaaatttgaaaccgg

SEQ ID NO: 23878 - DNA, 2856 bp, Zea Mays
cgctctgcaccgcgcgcctccttctctgctgcggcaaccgggaactgcggctgcggcggcggcgacttaaaccctcgagctcgctccaaggccgtcgctggtcgatcgggcggaagaggcagaagccagccagccagccaatggcccccaaggccggccgtggcaagggcaggggcggcaaaggcgacaagaggaagaaggaagagaaagtggtgcccagcgtggtagacgtcacggtggtcacccccgacgagtcccaggtgacactcaaggggatatccacggaccgcgtgctggacgtgcggaagctgctggggtcgaacgtggaaacgtgtcacctgacaaactattcactctcccatgtggcgcgcgggcaccggctggaggacggcgcggaggtggtggcgctcaagccctgcgctctccggatcgtcgaagaggagtacgcgacggcggagcaggcggaggcgcacgtccgccggctgctggacatcctcgcctgcaccaccgcgttcgccaggccccgggacggcgccgccaagcacagggcgtccaggcacggccgccccgcgacaccgccctcctctcccacgcccgcctcgaccggggcccatggcgtcgccagcggcgaggccgcgccgccgatatcggaggcgcacgacatggccgccatccggccgccgcccaagctgggggagttctacgacttcttctccttcgcccatctcaccccgcccgtccactttatcaggaggaaggaggcgaatggcgcttctcaggaaggcgatcacttcgaaatcgaggtgaaggtttgcaacgggaagcttctgcacgttgttgcttcagtaaagggtttctacttgtcagggaagccacacaacgttagccactccctggtggacctgctgcaacagctcagcaatgcgtttgctaatgcatatgaggcgttgatgaaagctttcgtggatcacaacaagtttgggaatttgccttacggattccgtgcaaacacatggcttatccctccaatatatgttgactctgccacaaggtgcccagcactgccagtcgaggatgagaattggggtggaaatgggggtggctgtggacgtgatggaaagtatgatcgcagacggtggtcaaaagagttttctgttttggctagaatgccttgcaaaactgaggaagaacgggtgatcagagaccggaaagcttttcttttacacaatctgtttgtagatacagcaatttttagagctgcgtcaacaataaggcgactcattgatcagtctatgaactcagttggttcacatagtggtacacatggttcaaacgtatttgaggaacgtataggggacatgaatataactgtgaagaaggatggtgctgatgctagtttaaaggtggaggacaaggttgatggtgttgccttctgtcaaacgggtgctatggatattgcacaaaggaatcttctgaaaggtttaacctctgatgaaaatgttgttgctaaggattcttcaacactcggggtggtgattgtcaagcattgtggatatacggcaactgtgaaggtttctggacgtgcaaaggacagtaatgatgttaaacaaacaaatgacatctctggtaaatttgatggaatgctgaccattgatgtacatgaccatccagatggaggttctaatgccttgaatgttaacagtctaaggataccactcccgagagttatccatccagaaactgttgttggtaaccagcaccatagcccaaagtctcatgctagtaatcctgcaaagaaattggcacgtaaaatactcaaggacagcttggtaaagctggatagcatgcctagcataaattctagaattattagatgggaactggggtcctcctggctgcaacaattgcagaaaaaggatactccagcgtctgagaatggtaaggggaatgcgatgaagactgacaaagaaccagctgtcagaggtcttggaaagcattttgaacaattaaggaaacttaaaaagaaagaatgcaacaatgaaggttccagttctgagaaggaagaatgtagcaataactattcatcaatgaatggtacacaagtatcagatatgatagctgctgatgaagcaaataacggggctgatattagcaagttaatgtcagaggatgctttccttagcttaaagagtttgggagctggccttcatgaaaagtccctcgaagagctcacaaagatggcccataatttctatgatgatactgcactcccaaagctggtagctgattttgcgtcccttgagctttctcctgtggatggaagaaccatgacagatttcatgcatgcaaggggacttaatatgtcctctttaggcagggtagagctagcagagaagctcccacacatccagtctatatgcattcatgaaatgacttgaaaatggtgctgacacggatgcccatattgacaataatttgcgactgaaatgggtagagagcttcctttcaaaaagattctgctggaaactgaaagatgaatttgcacatttacggaaatgtatcattctgagagggctttgcagcaaggttggactggagttagctgcaagagattatgatatgaatagccctaacccattcgacaaatctgacattgtcagcattgttcctgtgtgcaagcatgtggtctactcatctattgatggtcgaaacttgcttgaatcatcaaagatggcattggataaaggaaaattagatgatgctgtgagctatggaacaaagctgtttgtggtccataccatcgactggcagctaatgcatacagccttcttgctgtggtgctttatcatactggag

SEQ ID NO: 23879 - DNA, 2855 bp, Zea Mays
cgctctgcaccgcgcgcctccttctctgctgcggcaaccgggaactgcggctgcggcggcggcgacttaaaccctcgagctcgctccaaggccgtcgctggtcgatcgggcggaagaggcagaagccagccagccagccaatggcccccaaggccggccgtggcaagggcaggggcggcaaaggcgacaagaggaagaaggaagagaaagtggtgcccagcgtggtagacgtcacggtggtcacccccgacgagtcccaggtgacactcaaggggatatccacggaccgcgtgctggacgtgcggaagctgctggggtcgaacgtggaaacgtgtcacctgacaaactattcactctcccatgtggcgcgcgggcaccggctggaggacggcgcggaggtggtggcgctcaagccctgcgctctccggatcgtcgaagaggagtacgcgacggcggagcaggcggaggcgcacgtccgccggctgctggacatcctcgcctgcaccaccgcgttcgccaggccccgggacggcgccgccaagcacagggcgtccaggcacggccgccccgcgacaccgccctcctctcccacgcccgcctcgaccggggcccatggcgtcgccagcggcgaggccgcgccgccgatatcggaggcgcacgacatggccgccatccggccgccgcccaagctgggggagttctacgacttcttctccttcgcccatctcaccccgcccgtccactttatcaggaggaaggaggcgaatggcgcttctcaggaaggcgatcacttcgaaatcgaggtgaaggtttgcaacgggaagcttctgcacgttgttgcttcagtaaagggtttctacttgtcagggaagccacacaacgttagccactccctggtggacctgctgcaacagctcagcaatgcgtttgctaatgcatatgaggcgttgatgaaagctttcgtggatcacaacaagtttgggaatttgccttacggattccgtgcaaacacatggcttatccctccaatatatgttgactctgccacaaggtgcccagcactgccagtcgaggatgagaattggggtggaaatgggggtggctgtggacgtgatggaaagtatgatcgcagacggtggtcaaaagagttttctgttttggctagaatgccttgcaaaactgaggaagaacgggtgatcagagaccggaaagcttttcttttacacaatctgtttgtagatacagcaatttttagagctgcgtcaacaataaggcgactcattgatcagtctatgaactcagttggttcacatagtggtacacatggttcaaacgtatttgaggaacgtataggggacatgaatataactgtgaagaaggatggtgctgatgctagtttaaaggtggaggacaaggttgatggtgttgccttctgtcaaacgggtgctatggatattgcacaaaggaatcttctgaaaggtttaacctctgatgaaaatgttgttgctaaggattcttcaacactcggggtggtgattgtcaagcattgtggatatacggcaactgtgaaggtttctggacgtgcaaaggacagtaatgatgttaaacaaacaaatgacatctctggtaaatttgatggaatgctgaccattgatgtacatgaccatccagatggaggttctaatgccttgaatgttaacagtctaaggataccactcccgagagttatccatccagaaactgttgttggtaaccagcaccatagcccaaagtctcatgctagtaatcctgcaaagaaattggcacgtaaaatactcaaggacagcttggtaaagctggatagcatgcctagcataaattctagaattattagatgggaactggggtcctcctggctgcaacaattgcagaaaaaggatactccagcgtctgagaatggtaaggggaatgcgatgaagactgacaaagaaccagctgtcagaggtcttggaaagcattttgaacaattaaggaaacttaaaaagaaagaatgcaacaatgaaggttccagttctgagaaggaagaatgtagcaataactattcatcaatgaatggtacacaagtatcagatatgatagctgctgatgaagcaaataacggggctgatattagcaagttaatgtcagaggatgctttccttagcttaaagagtttgggagctggccttcatgaaaagtccctcgaagagctcacaaagatggcccataatttctatgatgatactgcactcccaaagctgctgattttgcgtcccttgagctttctcctgtggatggaagaaccatgacagatttcatgcatgcaaggggacttaatatgtcctctttaggcagggtggtagagctagcagagaagctcccacacatccagtctatatgcattcatgaaatgacttgaaaatggtgctgacacggatgcccatattgacaataatttgcgactgaaatgggtagagagcttcctttcaaaaagattctgctggaaactgaaagatgaatttgcacatttacggaaatgtatcattctgagagggctttgcagcaaggttggactggagttagctgcaagagattatgatatgaatagccctaacccattcgacaaatctgacattgtcagcattgttcctgtgtgcaagcatgtggtctactcatctattgatggtcgaaacttgcttgaatcatcaaagatggcattggataaaggaaaattagatgatgctgtgagctatggaacaaagctgtttgtggtccataccatcgactggcagctaatgcatacagccttcttgctgtggtgctttatcatactggag

SEQ ID NO: 23880 - DNA, 2859 bp, Zea Mays
cgctctgcaccgcgcgcctccttctctgctgcggcaaccgggaactgcggctgcggcggcggcgacttaaaccctcgagctcgctccaaggccgtcgctggtcgatcgggcggaagaggcagaagccagccagccagccaatggcccccaaggccggccgtggcaagggcaggggcggcaaaggcgacaagaggaagaaggaagagaaagtggtgcccagcgtggtagacgtcacggtggtcacccccgacgagtcccaggtgacactcaaggggatatccacggaccgcgtgctggacgtgcggaagctgctggggtcgaacgtggaaacgtgtcacctgacaaactattcactctcccatgtggcgcgcgggcaccggctggaggacggcgcggaggtggtggcgctcaagccctgcgctctccggatcgtcgaagaggagtacgcgacggcggagcaggcggaggcgcacgtccgccggctgctggacatcctcgcctgcaccaccgcgttcgccaggccccgggacggcgccgccaagcacagggcgtccaggcacggccgccccgcgacaccgccctcctctcccacgcccgcctcgaccggggcccatggcgtcgccagcggcgaggccgcgccgccgatatcggaggcgcacgacatggccgccatccggccgccgcccaagctgggggagttctacgacttcttctccttcgcccatctcaccccgcccgtccactttatcaggaggaaggaggcgaatggcgcttctcaggaaggcgatcacttcgaaatcgaggtgaaggtttgcaacgggaagcttctgcacgttgttgcttcagtaaagggtttctacttgtcagggaagccacacaacgttagccactccctggtggacctgctgcaacagctcagcaatgcgtttgctaatgcatatgaggcgttgatgaaagctttcgtggatcacaacaagtttgggaatttgccttacggattccgtgcaaacacatggcttatccctccaatatatgttgactctgccacaaggtgcccagcactgccagtcgaggatgagaattggggtggaaatgggggtggctgtggacgtgatggaaagtatgatcgcagacggtggtcaaaagagttttctgttttggctagaatgccttgcaaaactgaggaagaacgggtgatcagagaccggaaagcttttcttttacacaatctgtttgtagatacagcaatttttagagctgcgtcaacaataaggcgactcattgatcagtctatgaactcagttggttcacatagtggtacacatggttcaaacgtatttgaggaacgtataggggacatgaatataactgtgaagaaggatggtgctgatgctagtttaaaggtggaggacaaggttgatggtgttgccttctgtcaaacgggtgctatggatattgcacaaaggaatcttctgaaaggtttaacctctgatgaaaatgttgttgctaaggattcttcaacactcggggtggtgattgtcaagcattgtggatatacggcaactgtgaaggtttctggacgtgcaaaggacagtaatgatgttaaacaaacaaatgacatctctggtaaatttgatggaatgctgaccattgatgtacatgaccatccagatggaggttctaatgccttgaatgttaacagtctaaggataccactcccgagagttatccatccagaaactgttgttggtaaccagcaccatagcccaaagtctcatgctagtaatcctgcaaagaaattggcacgtaaaatactcaaggacagcttggtaaagctggatagcatgcctagcataaattctagaattattagatgggaactggggtcctcctggctgcaacaattgcagaaaaaggatactccagcgtctgagaatggtaaggggaatgcgatgaagactgacaaagaaccagctgtcagaggtcttggaaagcattttgaacaattaaggaaacttaaaaagaaagaatgcaacaatgaaggttccagttctgagaaggaagaatgtagcaataactattcatcaatgaatggtacacaagtatcagatatgatagctgctgatgaagcaaataacggggctgatattagcaagttaatgtcagaggatgctttccttagcttaaagagtttgggagctggccttcatgaaaagtccctcgaagagctcacaaagatggcccataatttctatgatgatactgcactcccaaagctggtagctgattttgcgtcccttgagctttctcctgtggatggaagaaccatgacagatttcatgcatgcaaggggacttaatatgtcctctttaggcagggtggtagagctagcagagaagctcccacacatccagtctatatgcattcatgaaatgacttgaaaatggtgctgacacggatgcccatattgacaataatttgcgactgaaatgggtagagagcttcctttcaaaaagattctgctggaaactgaaagatgaatttgcacatttacggaaatgtatcattctgagagggctttgcagcaaggttggactggagttagctgcaagagattatgatatgaatagccctaacccattcgacaaatctgacattgtcagcattgttcctgtgtgcaagcatgtggtctactcatctattgatggtcgaaacttgcttgaatcatcaaagatggcattggataaaggaaaattagatgatgctgtgagctatggaacaaagctgtttgtggtccataccatcgactggcagctaatgcatacagccttcttgctgtggtgctttatcatactggag

SEQ ID NO: 23881 - DNA, 2400 bp, Zea Mays
cgctctgcaccgcgcgcctccttctctgctgcggcaaccgggaactgcggctgcggcggcggcgacttaaaccctcgagctcgctccaaggccgtcgctggtcgatcgggcggaagaggcagaagccagccagccagccaatggcccccaaggccggccgtggcaagggcaggggcggcaaaggcgacaagaggaagaaggaagagaaagtggtgcccagcgtggtagacgtcacggtggtcacccccgacgagtcccaggtgacactcaaggggatatccacggaccgcgtgctggacgtgcggaagctgctggggtcgaacgtggaaacgtgtcacctgacaaactattcactctcccatgtggcgcgcgggcaccggctggaggacggcgcggaggtggtggcgctcaagccctgcgctctccggatcgtcgaagaggagtacgcgacggcggagcaggcggaggcgcacgtccgccggctgctggacatcctcgcctgcaccaccgcgttcgccaggccccgggacggcgccgccaagcacagggcgtccaggcacggccgccccgcgacaccgccctcctctcccacgcccgcctcgaccggggcccatggcgtcgccagcggcgaggccgcgccgccgatatcggaggcgcacgacatggccgccatccggccgccgcccaagctgggggagttctacgacttcttctccttcgcccatctcaccccgcccgtccactttatcaggaggaaggaggcgaatggcgcttctcaggaaggcgatcacttcgaaatcgaggtgaaggtttgcaacgggaagcttctgcacgttgttgcttcagtaaagggtttctacttgtcagggaagccacacaacgttagccactccctggtggacctgctgcaacagctcagcaatgcgtttgctaatgcatatgaggcgttgatgaaagctttcgtggatcacaacaagtttgggaatttgccttacggattccgtgcaaacacatggcttatccctccaatatatgttgactctgccacaaggtgcccagcactgccagtcgaggatgagaattggggtggaaatgggggtggctgtggacgtgatggaaagtatgatcgcagacggtggtcaaaagagttttctgttttggctagaatgccttgcaaaactgaggaagaacgggtgatcagagaccggaaagcttttcttttacacaatctgtttgtagatacagcaatttttagagctgcgtcaacaataaggcgactcattgatcagtctatgaactcagttggttcacatagtggtacacatggttcaaacgtatttgaggaacgtataggggacatgaatataactgtgaagaaggatggtgctgatgctagtttaaaggtggaggacaaggttgatggtgttgccttctgtcaaacgggtgctatggatattgcacaaaggaatcttctgaaaggtttaacctctgatgaaaatgttgttgctaaggattcttcaacactcggggtggtgattgtcaagcattgtggatatacggcaactgtgaaggtttctggacgtgcaaaggacagtaatgatgttaaacaaacaaatgacatctctggtaaatttgatggaatgctgaccattgatgtacatgaccatccagatggaggttctaatgccttgaatgttaacagtctaaggataccactcccgagagttatccatccagaaactgttgttggtaaccagcaccatagcccaaagtctcatgctagtaatcctgcaaagaaattggcacgtaaaatactcaaggacagcttggtaaagctggatagcatgcctagcataaattctagaattattagatgggaactggggtcctcctggctgcaacaattgcagaaaaaggatactccagcgtctgagaatggtaaggggaatgcgatgaagactgacaaagaaccagctgtcagaggtcttggaaagcattttgaacaattaaggaaacttaaaaagaaagaatgcaacaatgaaggttccagttctgagaaggaagaatgtagcaataactattcatcaatgaatggtacacaagtatcagatatgatagctgctgatgaagcaaataacggggctgatattagcaagttaatgtcagaggatgctttccttagcttaaagagtttgggagctggccttcatgaaaagtccctcgaagagctcacaaagatggcccataatttctatgatgatactgcactcccaaagctggtagctgattttgcgtcccttgagctttctcctgtggatggaagaaccatgacagatttcatgcatgcaaggggacttaatatgtcctctttaggcagggtgagctagcagagaagctccc

SEQ ID NO: 23882 - DNA, 2242 bp, Zea Mays
cgctctgcaccgcgcgcctccttctctgctgcggcaaccgggaactgcggctgcggcggcggcgacttaaaccctcgagctcgctccaaggccgtcgctggtcgatcgggcggaagaggcagaagccagccagccagccaatggcccccaaggccggccgtggcaagggcaggggcggcaaaggcgacaagaggaagaaggaagagaaagtggtgcccagcgtggtagacgtcacggtggtcacccccgacgagtcccaggtgacactcaaggggatatccacggaccgcgtgctggacgtgcggaagctgctggggtcgaacgtggaaacgtgtcacctgacaaactattcactctcccatgtggcgcgcgggcaccggctggaggacggcgcggaggtggtggcgctcaagccctgcgctctccggatcgtcgaagaggagtacgcgacggcggagcaggcggaggcgcacgtccgccggctgctggacatcctcgcctgcaccaccgcgttcgccaggccccgggacggcgccgccaagcacagggcgtccaggcacggccgccccgcgacaccgccctcctctcccacgcccgcctcgaccggggcccatggcgtcgccagcggcgaggccgcgccgccgatatcggaggcgcacgacatggccgccatccggccgccgcccaagctgggggagttctacgacttcttctccttcgcccatctcaccccgcccgtccactttatcaggaggaaggaggcgaatggcgcttctcaggaaggcgatcacttcgaaatcgaggtgaaggtttgcaacgggaagcttctgcacgttgttgcttcagtaaagggtttctacttgtcagggaagccacacaacgttagccactccctggtggacctgctgcaacagctcagcaatgcgtttgctaatgcatatgaggcgttgatgaaagctttcgtggatcacaacaagtttgggaatttgccttacggattccgtgcaaacacatggcttatccctccaatatatgttgactctgccacaaggtgcccagcactgccagtcgaggatgagaattggggtggaaatgggggtggctgtggacgtgatggaaagtatgatcgcagacggtggtcaaaagagttttctgttttggctagaatgccttgcaaaactgaggaagaacgggtgatcagagaccggaaagcttttcttttacacaatctgtttgtagatacagcaatttttagagctgcgtcaacaataaggcgactcattgatcagtctatgaactcagttggttcacatagtggtacacatggttcaaacgtatttgaggaacgtataggggacatgaatataactgtgaagaaggatggtgctgatgctagtttaaaggtggaggacaaggttgatggtgttgccttctgtcaaacgggtgctatggatattgcacaaaggaatcttctgaaaggtttaacctctgatgaaaatgttgttgctaaggattcttcaacactcggggtggtgattgtcaagcattgtggatatacggcaactgtgaaggtttctggacgtgcaaaggacagtaatgatgttaaacaaacaaatgacatctctggtaaatttgatggaatgctgaccattgatgtacatgaccatccagatggaggttctaatgccttgaatgttaacagtctaaggataccactcccgagagttatccatccagaaactgttgttggtaaccagcaccatagcccaaagtctcatgctagtaatcctgcaaagaaattggcacgtaaaatactcaaggacagcttggtaaagctggatagcatgcctagcataaattctagaattattagatgggaactggggtcctcctggctgcaacaattgcagaaaaaggatactccagcgtctgagaatggtaaggggaatgcgatgaagactgacaaagaaccagctgtcagaggtcttggaaagcattttgaacaattaaggaaacttaaaaagaaagaatgcaacaatgaaggttccagttctgagaaggaagaatgtagcaataactattcatcaatgaatggtacacaagtatcagatatgatagctgctgatgaagcaaataacggggctgatattagcaagttaatgtcagaggatgctttccttagcttaaagagtttgggagctggccttcatgaaaagaagtcttctgctaaagtctgatgtag

SEQ ID NO: 23883 - DNA, 600 bp, Zea Mays
tttccgtaggattacatggggcggtgcatcctgaccttgacaaaagttttgctggaggaagagtacaaggaaagcttcaacctggagggagcgaagagcgggaagctgaacttgcatctgaagtggtcgccacagccaatcatgcgtgattcgcgtgaagcgggcagcttaaggtcaagataaggccagtaagtgcgcacgcattggtgtacgtgtaattttttttggctgggtgtctcggcctcgagacctgcttggtcgagggtttgtaaattttgaggtgcattctttttgaaattcaacgcgtatgcggggacggtccaccaaaattttattccgaccaaggactccagttacgtgagctagcagaagtattcaggtgcaaaatgacccgttgcacatgtacatgaggctgttatatttcgatcggttaagctcgaggtatgttaatgtagtcggcgcatcgcaatggtttgtctgtatactccttgtaatatttaaagtatggaaaaaaaatgtgtagatcagaaagctagtgaaacaaattcagcagttggcggcttgacgcgaccacggtcacgggtggttgctcacttgctc

SEQ ID NO: 23884 - DNA, 2076 bp, Zea Mays
atttggttcaggcactgcaacgctggactgcaggctgctaccgttgctagtttctcaagaatgacgattgaagattcacgaaagttactccctgctgacctatacccttcttgggttgttttctcatcgcagcaaaagttaaaatggcttaatcaggagctgacaaagatttggccatttgtaaatgatgcggcgtcagaactgatcaaaacctctgtagagcctgttcttgaacaatataggccaataatcattgcgtccctgaagttctcaaaactcactcttggtactgttgcaccacagtttaccggtatttcgatcattgagaatactaaggaatcaggtattgtcatggagctagagatgaattgggatgccaatccaagtatcatacttgctgtaaaaactagacttggtgtcgcgcttccaatacaggtgaaggacattggctttacaggagttttccgcttaattttcaaaccactaattgaagagctaccttgctttggagctgtttgcttttctctacgacagaagaaaaagctggatttccgactgaaggtcattggcggcgaaatttctgctgtacctggaatttcagatgctcttgaggacactataaaaaatgctattgaggactcaataacatggccagtaaggaaagtcattcctattatacctggggactacagtgatctggaactgaagcctgttggtaccttggaggtcaagcttgtgcaggcaagagatttgacaaacaaagatctgataggaaaatcggatccttttgccattgtatatgtgcgaccattaccagacaaaatgaagagaagtaaaacaattaacaacgatctgaaccctatctggaatgaacactttgagtttactgttgaagatgctgatactcagagtgtaaccgtgaagatttatgatgatgatggcattcaagaatctgaattgattggctgtgctcaagtcaggctgaaggatctacagccaggcaaagtgaaggatgtctggttaaaacttgtaaaagatctggagattcaaagggacaggaaagatcggggtcaggtgcaccttgagctgctatactgtccatttgacatgaaggatgaggctccaaaccctttcagccaacatttttcgatgacttcattggagagaacattgacaaacatggaaaatggatcggggggctctagttttgataggctgtcttcaagaaagaaaagggaaattatcatacgaggagttctttcagtaacagtgatatctggggaggatctgcctgcgatggatatgaatggaaaatctgacccatatgtcatactttctctcaagaagacaaagacaaagtacaagacaagggttgtgaccgaaagcttgaacccagtatggaatcaaacttttgattttgtcgttgaagatggcttacatgacatgcttatgttggaagtatatgatcatgacactttccgtagagattacatggggcggtgcatcctgaccttgacaaaagttttgctggaggaagagtacaaggaaagcttcaacctggagggagcgaagagcgggaagctgaacttgcatctgaagtggtcgccacagccaatcatgcgtgattcgcgtgaagcgggcagcttaaggtcaagataaggccagtaagtgcgcacgcattggtgtacgtgtaattttttttggctgggtgtctcggcctcgagacctgcttggtcgagggtttgtaaattttgaggtgcattctttttgaaattcaacgcgtatgcggggacggtccaccaaaattttattccgaccaaggactccagttacgtgagctagcagaagtattcaggtgcaaaatgacccgttgcacatgtacatgaggctgttatatttcgatcggttaagctcgaggtatgttaatgtagtcggcgcatcgcaatggtttgtctgtatactccttgtaatatttaaagtatggaaaaaaaatgtgtagatcagaaagctagtgaaacaaattcagcagttggcggcttgacgcgaccacggtcacgggtggttgctcacttgctc

SEQ ID NO: 23885 - DNA, 2659 bp, Zea Mays
cacgatttccgcccccttgtctgttctcagcatttccgctccccttctcgtgttttcaaactcccaccacgagacgagcgaaccttccacttgtaatccagccgaccgtacccgctgccgtcgcgcgccggcatttgcccctgcccggcgccagctcgatagctctgctgcttcctcgccatctccgactccgcggcgagccgcgcgcccgtcggctagcggaggcgggagggcggcggtaccggtgaagtgtcgtccggaggaggaggaggaggaggagcgggatggggttctgggtagggctggtgttgggggttgcggcgggcctcgccctcatcgtcggcttcgtccgctgcgagaattctcgctccgcccgtcggcgacaactggctgctaccgttgctagtttctcaagaatgacgattgaagattcacgaaagttactccctgctgacctatacccttcttgggttgttttctcatcgcagcaaaagttaaaatggcttaatcaggagctgacaaagatttggccatttgtaaatgatgcggcgtcagaactgatcaaaacctctgtagagcctgttcttgaacaatataggccaataatcattgcgtccctgaagttctcaaaactcactcttggtactgttgcaccacagtttaccggtatttcgatcattgagaatactaaggaatcaggtattgtcatggagctagagatgaattgggatgccaatccaagtatcatacttgctgtaaaaactagacttggtgtcgcgcttccaatacaggtgaaggacattggctttacaggagttttccgcttaattttcaaaccactaattgaagagctaccttgctttggagctgtttgcttttctctacgacagaagaaaaagctggatttccgactgaaggtcattggcggcgaaatttctgctgtacctggaatttcagatgctcttgaggacactataaaaaatgctattgaggactcaataacatggccagtaaggaaagtcattcctattatacctggggactacagtgatctggaactgaagcctgttggtaccttggaggtcaagcttgtgcaggcaagagatttgacaaacaaagatctgataggaaaatcggatccttttgccattgtatatgtgcgaccattaccagacaaaatgaagagaagtaaaacaattaacaacgatctgaaccctatctggaatgaacactttgagtttactgttgaagatgctgatactcagagtgtaaccgtgaagatttatgatgatgatggcattcaagaatctgaattgattggctgtgctcaagtcaggctgaaggatctacagccaggcaaagtgaaggatgtctggttaaaacttgtaaaagatctggagattcaaagggacaggaaagatcggggtcaggtgcaccttgagctgctatactgtccatttgacatgaaggatgaggctccaaaccctttcagccaacatttttcgatgacttcattggagagaacattgacaaacatggaaaatggatcggggggctctagttttgataggctgtcttcaagaaagaaaagggaaattatcatacgaggagttctttcagtaacagtgatatctggggaggatctgcctgcgatggatatgaatggaaaatctgacccatatgtcatactttctctcaagaagacaaagacaaagtacaagacaagggtaatttcttcatcaaatacaaattacttagtgctgtgtacatatctatgtctaaacatgcttagtcaatttattttatgtactaccaaagttaacatcagtttggttagctacatattgtgtttaattctatttatattcggatcagtagagaaccataataatgctatggtcagaaattgcttgggcaaagtcttcaactgtccctatgatgtgactgaccacaggttgtgaccgaaagcttgaacccagtatggaatcaaacttttgattttgtcgttgaagatggcttacatgacatgcttatgttggaagtatatgatcatgacactttccgtagagattacatggggcggtgcatcctgaccttgacaaaagttttgctggaggaagagtacaaggaaagcttcaacctggagggagcgaagagcgggaagctgaacttgcatctgaagtggtcgccacagccaatcatgcgtgattcgcgtgaagcgggcagcttaaggtcaagataaggccagtaagtgcgcacgcattggtgtacgtgtaattttttttggctgggtgtctcggcctcgagacctgcttggtcgagggtttgtaaattttgaggtgcattctttttgaaattcaacgcgtatgcggggacggtccaccaaaattttattccgaccaaggactccagttacgtgagctagcagaagtattcaggtgcaaaatgacccgttgcacatgtacatgaggctgttatatttcgatcggttaagctcgaggtatgttaatgtagtcggcgcatcgcaatggtttgtctgtatactccttgtaatatttaaagtatggaaaaaaaatgtgtagatcagaaagctagtgaaacaaattcagcagttggcggcttgacgcgaccacggtcacgggtggttgctcacttgctc

SEQ ID NO: 23886 - DNA, 2413 bp, Zea Mays
ctgcttttctcccgacgcgacgcccgctccctcacgatttccgcccccttgtctgttctcagcatttccgctccccttctcgtgttttcaaactcccaccacgagacgagcgaaccttccacttgtaatccagccgaccgtacccgctgccgtcgcgcgccggcatttgcccctgcccggcgccagctcgatagctctgctgcttcctcgccatctccgactccgcggcgagccgcgcgcccgtcggctagcggaggcgggagggcggcggtaccggtgaagtgtcgtccggaggaggaggaggaggaggagcgggatggggttctgggtagggctggtgttgggggttgcggcgggcctcgccctcatcgtcggcttcgtccgctgcgagaattctcgctccgcccgtcggcgacaactggctgctaccgttgctagtttctcaagaatgacgattgaagattcacgaaagttactccctgctgacctatacccttcttgggttgttttctcatcgcagcaaaaggcggcgtcagaactgatcaaaacctctgtagagcctgttcttgaacaatataggccaataatcattgcgtccctgaagttctcaaaactcactcttggtactgttgcaccacagtttaccggtatttcgatcattgagaatactaaggaatcaggtattgtcatggagctagagatgaattgggatgccaatccaagtatcatacttgctgtaaaaactagacttggtgtcgcgcttccaatacaggtgaaggacattggctttacaggagttttccgcttaattttcaaaccactaattgaagagctaccttgctttggagctgtttgcttttctctacgacagaagaaaaagctggatttccgactgaaggtcattggcggcgaaatttctgctgtacctggaatttcagatgctcttgaggacactataaaaaatgctattgaggactcaataacatggccagtaaggaaagtcattcctattatacctggggactacagtgatctggaactgaagcctgttggtaccttggaggtcaagcttgtgcaggcaagagatttgacaaacaaagatctgataggaaaatcggatccttttgccattgtatatgtgcgaccattaccagacaaaatgaagagaagtaaaacaattaacaacgatctgaaccctatctggaatgaacactttgagtttactgttgaagatgctgatactcagagtgtaaccgtgaagatttatgatgatgatggcattcaagaatctgaattgattggctgtgctcaagtcaggctgaaggatctacagccaggcaaagtgaaggatgtctggttaaaacttgtaaaagatctggagattcaaagggacaggaaagatcggggtcaggtgcaccttgagctgctatactgtccatttgacatgaaggatgaggctccaaaccctttcagccaacatttttcgatgacttcattggagagaacattgacaaacatggaaaatggatcggggggctctagttttgataggctgtcttcaagaaagaaaagggaaattatcatacgaggagttctttcagtaacagtgatatctggggaggatctgcctgcgatggatatgaatggaaaatctgacccatatgtcatactttctctcaagaagacaaagacaaagtacaagacaagggttgtgaccgaaagcttgaacccagtatggaatcaaacttttgattttgtcgttgaagatggcttacatgacatgcttatgttggaagtatatgatcatgacactttccgtagagattacatggggcggtgcatcctgaccttgacaaaagttttgctggaggaagagtacaaggaaagcttcaacctggagggagcgaagagcgggaagctgaacttgcatctgaagtggtcgccacagccaatcatgcgtgattcgcgtgaagcgggcagcttaaggtcaagataaggccagtaagtgcgcacgcattggtgtacgtgtaattttttttggctgggtgtctcggcctcgagacctgcttggtcgagggtttgtaaattttgaggtgcattctttttgaaattcaacgcgtatgcggggacggtccaccaaaattttattccgaccaaggactccagttacgtgagctagcagaagtattcaggtgcaaaatgacccgttgcacatgtacatgaggctgttatatttcgatcggttaagctcgaggtatgttaatgtagtcggcgcatcgcaatggtttgtctgtatactccttgtaatatttaaagtatggaaaaaaaatgtgtagatcagaaagctagtgaaacaaattcagcagttggcggcttgacgcgaccacggtcacgggtggttgctcacttgctc

SEQ ID NO: 23887 - DNA, 2646 bp, Zea Mays
ccacaatctctctgtcccgggagtccgtcctttctgctctgtcgttactgaaacccagcgagcaccacttcccatctgctcgtgtcagtcagttcctcggctgtgccgtgagtggcggcggcagggagcggcgcagcgcagcgcagaagcagcggagtggcccaggcgatggcgccgagggaccccaaggaggacggcttcggcgtgggcggcgcggcggatccggaggccgacatcgaggccccgctgctggtttcctccggatcatcgttcctcctggacccggcgctcgaggacggcggcggcggcgacgaggagcagcgccgccgccgccgccggttcctccacggcagccacacgcactccaacaccacctcccaggtcgcgctcgtcggcgccgacgtctgccccatcgagagcctcgactacctgatcgagaacgacgtgttcaagcaggactggagggcgcggggacggggccacatcctgcgctacgtggcgctcaagtgggccctctgcttcctcgtcggtgccctcgcagccgccgccggcttcgtcgccaacctcggcgtcgagaatgtcgccggcgccaagttcgtcgtcacctccgacctcatgttggacggcagacacggctcggcgttcgcggtgttcctggcgtccaactttgcgctcaccatgttagccgcggtgctgacggtgtacgtggcgcctgcggctgccggatccggaatcccggaggtgaaggcctacttgaacggtgttgatgcccccaacatattctcactgaaaactctgatagtgaagattgtgggatgcattgcggcagtatcatcatcactgcatgtgggaaaagctgggccacttgtacacacaggcgcatgcattgcatcaatacttgggcaaggtgggtcacgtaaatatcgtatgacatgtaggtggctcaggtacttcaagaatgatagggatcggagggaccttgttacttgtggttctgctgctggtattgctgctgctttccgggcgccggttggtggagtcctttttgctctggaaacagtatcttcatggtggaggagtgctctactatggcgagcctttttcacaacagcaatggtcgctgttgtgcttagggcattgatagacttctgtcaaagtggcaagtgtggtttgtttgggaaaggtggccttataatgtttgatgtgacagcagattatgtcacctaccatttgattgatttacctccagtaatcactttaggggtttttggaggaatactggggagtttgtacaactttttcctggacaaggttctccgtctctacaaccttatcaacgagaaaggaaaagcttacaaactactactcgctgcaacagtcactgtttgtacatcatgttgtctatttggcttgccatggattgctgcttgcaaaccttgtccaactgacactagagaagcttgtccatcaataggccgttctggtaatttcaagaaattccaatgtgcaacagatgaatacaatgatttggctagcctattcttcaacacaaatgatgacactattagaaacctctacagtgctggcactgatgatgaattccacatttcgtccatccttgtgttctttattgcatcgtattttttgggcatcttcagctatggccttgctttaccatctggcctttttgtgccagttattttaactggtgcagcttacggccgtctggtaggcatgttgattgggtcacagtcaactttagatcatggtctttttgcagttctcggctctgctgctctgttaggtggatcaatgcggatgactgtttcagtttgtgttatcatcctagaactgactaataatctgcgtatgcttcctttggtaatgcttgtccttctcatatcaaaggtggtggcagatgcgttcaatgcaaacgtctatgatttgcttgttagattgaaagggtttccacaccttgaaggttatgctgaaccatacatgaggcaactgtcagtcagtgatgttgtaactggtcctctacagacattcaatggcatagagaaggtcggccatatagttcatgtcttaaagacaactggccacaacggtttccctgtggttgatgagccaccattttcagatacccctacattgtatggtctaattcttcgagaccacctgcttgttctattgaggaagaaggatttcatccgtagttgcacagcgtctacactgaatgctttaaaccatttctcacatgctgagtttgctaaacgtggatcaggaaaacatgacaggattgaggacattgaattatgtccagaagaactggaaatgtttgtagacttgcatccattcacaaacacatctccatatactgtccttgagactatgtctttggctaaggctcttatacttttccgtgaagttggattgagacatcttctggttctaccaaaatcttctaagagggcacctgttgtcggcatactaacaagacatgatttcatgcctgaacatatattgggccttcatcctttcctctttaagagtagatggaagaaggtgcgacttggcaaggtgcagtgcagctgtgcagacaatgtttgccatttcactcaaagttctggcaagaacacagtgttc

SEQ ID NO: 23888 - DNA, 3056 bp, Zea Mays
ccacaatctctctgtcccgggagtccgtcctttctgctctgtcgttactgaaacccagcgagcaccacttcccatctgctcgtgtcagtcagttcctcggctgtgccgtgagtggcggcggcagggagcggcgcagcgcagcgcagaagcagcggagtggcccaggcgatggcgccgagggaccccaaggaggacggcttcggcgtgggcggcgcggcggatccggaggccgacatcgaggccccgctgctggtttcctccggatcatcgttcctcctggacccggcgctcgaggacggcggcggcggcgacgaggagcagcgccgccgccgccgccggttcctccacggcagccacacgcactccaacaccacctcccaggtcgcgctcgtcggcgccgacgtctgccccatcgagagcctcgactacctgatcgagaacgacgtgttcaagcaggactggagggcgcggggacggggccacatcctgcgctacgtggcgctcaagtgggccctctgcttcctcgtcggtgccctcgcagccgccgccggcttcgtcgccaacctcggcgtcgagaatgtcgccggcgccaagttcgtcgtcacctccgacctcatgttggacggcagacacggctcggcgttcgcggtgttcctggcgtccaactttgcgctcaccatgttagccgcggtgctgacggtgtacgtggcgcctgcggctgccggatccggaatcccggaggtgaaggcctacttgaacggtgttgatgcccccaacatattctcactgaaaactctgatagtgaagattgtgggatgcattgcggcagtatcatcatcactgcatgtgggaaaagctgggccacttgtacacacaggcgcatgcattgcatcaatacttgggcaaggtgggtcacgtaaatatcgtatgacatgtaggtggctcaggtacttcaagaatgatagggatcggagggaccttgttacttgtggttctgctgctggtattgctgctgctttccgggcgccggttggtggagtcctttttgctctggaaacagtatcttcatggtggaggagtgctctactatggcgagcctttttcacaacagcaatggtcgctgttgtgcttagggcattgatagacttctgtcaaagtggcaagtgtggtttgtttgggaaaggtggccttataatgtttgatgtgacagcagattatgtcacctaccatttgattgatttacctccagtaatcactttaggggtttttggaggaatactggggagtttgtacaactttttcctggacaaggttctccgtctctacaaccttatcaacgagaaaggaaaagcttacaaactactactcgctgcaacagtcactgtttgtacatcatgttgtctatttggcttgccatggattgctgcttgcaaaccttgtccaactgacactagagaagcttgtccatcaataggccgttctggtaatttcaagaaattccaatgtgcaacagatgaatacaatgatttggctagcctattcttcaacacaaatgatgacactattagaaacctctacagtgctggcactgatgatgaattccacatttcgtccatccttgtgttctttattgcatcgtattttttgggcatcttcagctatggccttgctttaccatctggcctttttgtgccagttattttaactggtgcagcttacggccgtctggtaggcatgttgattgggtcacagtcaactttagatcatggtctttttgcagttctcggctctgctgctctgttaggtggatcaatgcggatgactgtttcagtttgtgttatcatcctagaactgactaataatctgcgtatgcttcctttggtaatgcttgtccttctcatatcaaaggtggtggcagatgcgttcaatgcaaacgtctatgatttgcttgttagattgaaagggtttccacaccttgaaggttatgctgaaccatacatgaggcaactgtcagtcagtgatgttgtaactggtcctctacagacattcaatggcatagagaaggtcggccatatagttcatgtcttaaagacaactggccacaacggtttccctgtggttgatgagccaccattttcagatacccctacattgtatggtctaattcttcgagaccacctgcttgttctattgaggaagaaggatttcatccgtagttgcacagcgtctacactgaatgctttaaaccatttctcacatgctgagtttgctaaacgtggatcaggaaaacatgacaggattgaggacattgaattatgtccagaagaactggaaatgtttgtagacttgcatccattcacaaacacatctccatatactgtccttgagactatgtctttggctaaggctcttatacttttccgtgaagttggattgagacatcttctggttctaccaaaatcttctaagagggcacctgttgtcggcatactaacaagacatgatttcatgcctgaacatatattgggccttcatcctttcctctttaagagtagatggaagaaggtgcgacttggcaaggtaaaagttaccaacatattttgaagcttgctggtgactggtgatttggggaggtcaccgaaggatcatccgaagctgtatacctggtgtcaaatcacgtattttgcagagaataactcaacttgaaaactagtggatcttacttcaagaaaataatttcgttgtaaatgctaagaaggggatggaacatggctgctaagtgctaacaagttattttcccacgaacaagaggaatctcactgtaaatttattatgcatactttagctaacctttgaaaacaaatgctatctgtagtgcctagatgcattccttattaggcccatcagtgcaaaagtaacttcagttccatcctccattcatataggctactcaaaatagctgctcatatcctgcatatggtgtgataaatacaatgtatttcctcagctttgttccatagcttctttttgcaatattcatgtgcttacattgtggt

SEQ ID NO: 23889 - DNA, 3047 bp, Zea Mays
ccacaatctctctgtcccgggagtccgtcctttctgctctgtcgttactgaaacccagcgagcaccacttcccatctgctcgtgtcagtcagttcctcggctgtgccgtgagtggcggcggcagggagcggcgcagcgcagcgcagaagcagcggagtggcccaggcgatggcgccgagggaccccaaggaggacggcttcggcgtgggcggcgcggcggatccggaggccgacatcgaggccccgctgctggtttcctccggatcatcgttcctcctggacccggcgctcgaggacggcggcggcggcgacgaggagcagcgccgccgccgccgccggttcctccacggcagccacacgcactccaacaccacctcccaggtcgcgctcgtcggcgccgacgtctgccccatcgagagcctcgactacctgatcgagaacgacgtgttcaagcaggactggagggcgcggggacggggccacatcctgcgctacgtggcgctcaagtgggccctctgcttcctcgtcggtgccctcgcagccgccgccggcttcgtcgccaacctcggcgtcgagaatgtcgccggcgccaagttcgtcgtcacctccgacctcatgttggacggacacggctcggcgttcgcggtgttcctggcgtccaactttgcgctcaccatgttagccgcggtgctgacggtgtacgtggcgcctgcggctgccggatccggaatcccggaggtgaaggcctacttgaacggtgttgatgcccccaacatattctcactgaaaactctgatagtgaagattgtgggatgcattgcggcagtatcatcatcactgcatgtgggaaaagctgggccacttgtacacacaggcgcatgcattgcatcaatacttgggcaaggtgggtcacgtaaatatcgtatgacatgtaggtggctcaggtacttcaagaatgatagggatcggagggaccttgttacttgtggttctgctgctggtattgctgctgctttccgggcgccggttggtggagtcctttttgctctggaaacagtatcttcatggaggagtgctctactatggcgagcctttttcacaacagcaatggtcgctgttgtgcttagggcattgatagacttctgtcaaagtggcaagtgtggtttgtttgggaaaggtggccttataatgtttgatgtgacagcagattatgtcacctaccatttgattgatttacctccagtaatcactttaggggtttttggaggaatactggggagtttgtacaactttttcctggacaaggttctccgtctctacaaccttatcaacaaaggaaaagcttacaaactactactcgctgcaacagtcactgtttgtacatcatgttgtctatttggcttgccatggattgctgcttgcaaaccttgtccaactgacactagagaagcttgtccatcaataggccgttctggtaatttcaagaaattccaatgtgcaacagatgaatacaatgatttggctagcctattcttcaacacaaatgatgacactattagaaacctctacagtgctggcactgatgatgaattccacatttcgtccatccttgtgttctttattgcatcgtattttttgggcatcttcagctatggccttgctttaccatctggcctttttgtgccagttattttaactggtgcagcttacggccgtctggtaggcatgttgattgggtcacagtcaactttagatcatggtctttttgcagttctcggctctgctgctctgttaggtggatcaatgcggatgactgtttcagtttgtgttatcatcctagaactgactaataatctgcgtatgcttcctttggtaatgcttgtccttctcatatcaaaggtggtggcagatgcgttcaatgcaaacgtctatgatttgcttgttagattgaaagggtttccacaccttgaaggttatgctgaaccatacatgaggcaactgtcagtcagtgatgttgtaactggtcctctacagacattcaatggcatagagaaggtcggccatatagttcatgtcttaaagacaactggccacaacggtttccctgtggttgatgagccaccattttcagatacccctacattgtatggtctaattcttcgagaccacctgcttgttctattgaggaagaaggatttcatccgtagttgcacagcgtctacactgaatgctttaaaccatttctcacatgctgagtttgctaaacgtggatcaggaaaacatgacaggattgaggacattgaattatgtccagaagaactggaaatgtttgtagacttgcatccattcacaaacacatctccatatactgtccttgagactatgtctttggctaaggctcttatacttttccgtgaagttggattgagacatcttctggttctaccaaaatcttctaagagggcacctgttgtcggcatactaacaagacatgatttcatgcctgaacatatattgggccttcatcctttcctctttaagagtagatggaagaaggtgcgacttggcaaggtaaaagttaccaacatattttgaagcttgctggtgactggtgatttggggaggtcaccgaaggatcatccgaagctgtatacctggtgtcaaatcacgtattttgcagagaataactcaacttgaaaactagtggatcttacttcaagaaaataatttcgttgtaaatgctaagaaggggatggaacatggctgctaagtgctaacaagttattttcccacgaacaagaggaatctcactgtaaatttattatgcatactttagctaacctttgaaaacaaatgctatctgtagtgcctagatgcattccttattaggcccatcagtgcaaaagtaacttcagttccatcctccattcatataggctactcaaaatagctgctcatatcctgcatatggtgtgataaatacaatgtatttcctcagctttgttccatagcttctttttgcaatattcatgtgcttacattgtggt

SEQ ID NO: 23890 - DNA, 3053 bp, Zea Mays
ccacaatctctctgtcccgggagtccgtcctttctgctctgtcgttactgaaacccagcgagcaccacttcccatctgctcgtgtcagtcagttcctcggctgtgccgtgagtggcggcggcagggagcggcgcagcgcagcgcagaagcagcggagtggcccaggcgatggcgccgagggaccccaaggaggacggcttcggcgtgggcggcgcggcggatccggaggccgacatcgaggccccgctgctggtttcctccggatcatcgttcctcctggacccggcgctcgaggacggcggcggcggcgacgaggagcagcgccgccgccgccgccggttcctccacggcagccacacgcactccaacaccacctcccaggtcgcgctcgtcggcgccgacgtctgccccatcgagagcctcgactacctgatcgagaacgacgtgttcaagcaggactggagggcgcggggacggggccacatcctgcgctacgtggcgctcaagtgggccctctgcttcctcgtcggtgccctcgcagccgccgccggcttcgtcgccaacctcggcgtcgagaatgtcgccggcgccaagttcgtcgtcacctccgacctcatgttggacggcagacacggctcggcgttcgcggtgttcctggcgtccaactttgcgctcaccatgttagccgcggtgctgacggtgtacgtggcgcctgcggctgccggatccggaatcccggaggtgaaggcctacttgaacggtgttgatgcccccaacatattctcactgaaaactctgatagtgaagattgtgggatgcattgcggcagtatcatcatcactgcatgtgggaaaagctgggccacttgtacacacaggcgcatgcattgcatcaatacttgggcaaggtgggtcacgtaaatatcgtatgacatgtaggtggctcaggtacttcaagaatgatagggatcggagggaccttgttacttgtggttctgctgctggtattgctgctgctttccgggcgccggttggtggagtcctttttgctctggaaacagtatcttcatggtggaggagtgctctactatggcgagcctttttcacaacagcaatggtcgctgttgtgcttagggcattgatagacttctgtcaaagtggcaagtgtggtttgtttgggaaaggtggccttataatgtttgatgtgacagcagattatgtcacctaccatttgattgatttacctccagtaatcactttaggggtttttggaggaatactggggagtttgtacaactttttcctggacaaggttctccgtctctacaaccttatcaacaaaggaaaagcttacaaactactactcgctgcaacagtcactgtttgtacatcatgttgtctatttggcttgccatggattgctgcttgcaaaccttgtccaactgacactagagaagcttgtccatcaataggccgttctggtaatttcaagaaattccaatgtgcaacagatgaatacaatgatttggctagcctattcttcaacacaaatgatgacactattagaaacctctacagtgctggcactgatgatgaattccacatttcgtccatccttgtgttctttattgcatcgtattttttgggcatcttcagctatggccttgctttaccatctggcctttttgtgccagttattttaactggtgcagcttacggccgtctggtaggcatgttgattgggtcacagtcaactttagatcatggtctttttgcagttctcggctctgctgctctgttaggtggatcaatgcggatgactgtttcagtttgtgttatcatcctagaactgactaataatctgcgtatgcttcctttggtaatgcttgtccttctcatatcaaaggtggtggcagatgcgttcaatgcaaacgtctatgatttgcttgttagattgaaagggtttccacaccttgaaggttatgctgaaccatacatgaggcaactgtcagtcagtgatgttgtaactggtcctctacagacattcaatggcatagagaaggtcggccatatagttcatgtcttaaagacaactggccacaacggtttccctgtggttgatgagccaccattttcagatacccctacattgtatggtctaattcttcgagaccacctgcttgttctattgaggaagaaggatttcatccgtagttgcacagcgtctacactgaatgctttaaaccatttctcacatgctgagtttgctaaacgtggatcaggaaaacatgacaggattgaggacattgaattatgtccagaagaactggaaatgtttgtagacttgcatccattcacaaacacatctccatatactgtccttgagactatgtctttggctaaggctcttatacttttccgtgaagttggattgagacatcttctggttctaccaaaatcttctaagagggcacctgttgtcggcatactaacaagacatgatttcatgcctgaacatatattgggccttcatcctttcctctttaagagtagatggaagaaggtgcgacttggcaaggtaaaagttaccaacatattttgaagcttgctggtgactggtgatttggggaggtcaccgaaggatcatccgaagctgtatacctggtgtcaaatcacgtattttgcagagaataactcaacttgaaaactagtggatcttacttcaagaaaataatttcgttgtaaatgctaagaaggggatggaacatggctgctaagtgctaacaagttattttcccacgaacaagaggaatctcactgtaaatttattatgcatactttagctaacctttgaaaacaaatgctatctgtagtgcctagatgcattccttattaggcccatcagtgcaaaagtaacttcagttccatcctccattcatataggctactcaaaatagctgctcatatcctgcatatggtgtgataaatacaatgtatttcctcagctttgttccatagcttctttttgcaatattcatgtgcttacattgtggt

SEQ ID NO: 23891 - DNA, 3053 bp, Zea Mays
ccacaatctctctgtcccgggagtccgtcctttctgctctgtcgttactgaaacccagcgagcaccacttcccatctgctcgtgtcagtcagttcctcggctgtgccgtgagtggcggcggcagggagcggcgcagcgcagcgcagaagcagcggagtggcccaggcgatggcgccgagggaccccaaggaggacggcttcggcgtgggcggcgcggcggatccggaggccgacatcgaggccccgctgctggtttcctccggatcatcgttcctcctggacccggcgctcgaggacggcggcggcggcgacgaggagcagcgccgccgccgccgccggttcctccacggcagccacacgcactccaacaccacctcccaggtcgcgctcgtcggcgccgacgtctgccccatcgagagcctcgactacctgatcgagaacgacgtgttcaagcaggactggagggcgcggggacggggccacatcctgcgctacgtggcgctcaagtgggccctctgcttcctcgtcggtgccctcgcagccgccgccggcttcgtcgccaacctcggcgtcgagaatgtcgccggcgccaagttcgtcgtcacctccgacctcatgttggacggcagacacggctcggcgttcgcggtgttcctggcgtccaactttgcgctcaccatgttagccgcggtgctgacggtgtacgtggcgcctgcggctgccggatccggaatcccggaggtgaaggcctacttgaacggtgttgatgcccccaacatattctcactgaaaactctgatagtgaagattgtgggatgcattgcggcagtatcatcatcactgcatgtgggaaaagctgggccacttgtacacacaggcgcatgcattgcatcaatacttgggcaaggtgggtcacgtaaatatcgtatgacatgtaggtggctcaggtacttcaagaatgatagggatcggagggaccttgttacttgtggttctgctgctggtattgctgctgctttccgggcgccggttggtggagtcctttttgctctggaaacagtatcttcatggaggagtgctctactatggcgagcctttttcacaacagcaatggtcgctgttgtgcttagggcattgatagacttctgtcaaagtggcaagtgtggtttgtttgggaaaggtggccttataatgtttgatgtgacagcagattatgtcacctaccatttgattgatttacctccagtaatcactttaggggtttttggaggaatactggggagtttgtacaactttttcctggacaaggttctccgtctctacaaccttatcaacgagaaaggaaaagcttacaaactactactcgctgcaacagtcactgtttgtacatcatgttgtctatttggcttgccatggattgctgcttgcaaaccttgtccaactgacactagagaagcttgtccatcaataggccgttctggtaatttcaagaaattccaatgtgcaacagatgaatacaatgatttggctagcctattcttcaacacaaatgatgacactattagaaacctctacagtgctggcactgatgatgaattccacatttcgtccatccttgtgttctttattgcatcgtattttttgggcatcttcagctatggccttgctttaccatctggcctttttgtgccagttattttaactggtgcagcttacggccgtctggtaggcatgttgattgggtcacagtcaactttagatcatggtctttttgcagttctcggctctgctgctctgttaggtggatcaatgcggatgactgtttcagtttgtgttatcatcctagaactgactaataatctgcgtatgcttcctttggtaatgcttgtccttctcatatcaaaggtggtggcagatgcgttcaatgcaaacgtctatgatttgcttgttagattgaaagggtttccacaccttgaaggttatgctgaaccatacatgaggcaactgtcagtcagtgatgttgtaactggtcctctacagacattcaatggcatagagaaggtcggccatatagttcatgtcttaaagacaactggccacaacggtttccctgtggttgatgagccaccattttcagatacccctacattgtatggtctaattcttcgagaccacctgcttgttctattgaggaagaaggatttcatccgtagttgcacagcgtctacactgaatgctttaaaccatttctcacatgctgagtttgctaaacgtggatcaggaaaacatgacaggattgaggacattgaattatgtccagaagaactggaaatgtttgtagacttgcatccattcacaaacacatctccatatactgtccttgagactatgtctttggctaaggctcttatacttttccgtgaagttggattgagacatcttctggttctaccaaaatcttctaagagggcacctgttgtcggcatactaacaagacatgatttcatgcctgaacatatattgggccttcatcctttcctctttaagagtagatggaagaaggtgcgacttggcaaggtaaaagttaccaacatattttgaagcttgctggtgactggtgatttggggaggtcaccgaaggatcatccgaagctgtatacctggtgtcaaatcacgtattttgcagagaataactcaacttgaaaactagtggatcttacttcaagaaaataatttcgttgtaaatgctaagaaggggatggaacatggctgctaagtgctaacaagttattttcccacgaacaagaggaatctcactgtaaatttattatgcatactttagctaacctttgaaaacaaatgctatctgtagtgcctagatgcattccttattaggcccatcagtgcaaaagtaacttcagttccatcctccattcatataggctactcaaaatagctgctcatatcctgcatatggtgtgataaatacaatgtatttcctcagctttgttccatagcttctttttgcaatattcatgtgcttacattgtggt

SEQ ID NO: 23892 - DNA, 3056 bp, Zea Mays
ccacaatctctctgtcccgggagtccgtcctttctgctctgtcgttactgaaacccagcgagcaccacttcccatctgctcgtgtcagtcagttcctcggctgtgccgtgagtggcggcggcagggagcggcgcagcgcagcgcagaagcagcggagtggcccaggcgatggcgccgagggaccccaaggaggacggcttcggcgtgggcggcgcggcggatccggaggccgacatcgaggccccgctgctggtttcctccggatcatcgttcctcctggacccggcgctcgaggacggcggcggcggcgacgaggagcagcgccgccgccgccgccggttcctccacggcagccacacgcactccaacaccacctcccaggtcgcgctcgtcggcgccgacgtctgccccatcgagagcctcgactacgagctgatcgagaacgacgtgttcaagcaggactggagggcgcggggacggggccacatcctgcgctacgtggcgctcaagtgggccctctgcttcctcgtcggtgccctcgcagccgccgccggcttcgtcgccaacctcggcgtcgagaatgtcgccggcgccaagttcgtcgtcacctccgacctcatgttggacggcagacacggctcggcgttcgcggtgttcctggcgtccaactttgcgctcaccatgttagccgcggtgctgacggtgtacgtggcgcctgcggctgccggatccggaatcccggaggtgaaggcctacttgaacggtgttgatgcccccaacatattctcactgaaaactctgatagtgaagattgtgggatgcattgcggcagtatcatcatcactgcatgtgggaaaagctgggccacttgtacacacaggcgcatgcattgcatcaatacttgggcaaggtgggtcacgtaaatatcgtatgacatgtaggtggctcaggtacttcaagaatgatagggatcggagggaccttgttacttgtggttctgctgctggtattgctgctgctttccgggcgccggttggtggagtcctttttgctctggaaacagtatcttcatggaggagtgctctactatggcgagcctttttcacaacagcaatggtcgctgttgtgcttagggcattgatagacttctgtcaaagtggcaagtgtggtttgtttgggaaaggtggccttataatgtttgatgtgacagcagattatgtcacctaccatttgattgatttacctccagtaatcactttaggggtttttggaggaatactggggagtttgtacaactttttcctggacaaggttctccgtctctacaaccttatcaacgagaaaggaaaagcttacaaactactactcgctgcaacagtcactgtttgtacatcatgttgtctatttggcttgccatggattgctgcttgcaaaccttgtccaactgacactagagaagcttgtccatcaataggccgttctggtaatttcaagaaattccaatgtgcaacagatgaatacaatgatttggctagcctattcttcaacacaaatgatgacactattagaaacctctacagtgctggcactgatgatgaattccacatttcgtccatccttgtgttctttattgcatcgtattttttgggcatcttcagctatggccttgctttaccatctggcctttttgtgccagttattttaactggtgcagcttacggccgtctggtaggcatgttgattgggtcacagtcaactttagatcatggtctttttgcagttctcggctctgctgctctgttaggtggatcaatgcggatgactgtttcagtttgtgttatcatcctagaactgactaataatctgcgtatgcttcctttggtaatgcttgtccttctcatatcaaaggtggtggcagatgcgttcaatgcaaacgtctatgatttgcttgttagattgaaagggtttccacaccttgaaggttatgctgaaccatacatgaggcaactgtcagtcagtgatgttgtaactggtcctctacagacattcaatggcatagagaaggtcggccatatagttcatgtcttaaagacaactggccacaacggtttccctgtggttgatgagccaccattttcagatacccctacattgtatggtctaattcttcgagaccacctgcttgttctattgaggaagaaggatttcatccgtagttgcacagcgtctacactgaatgctttaaaccatttctcacatgctgagtttgctaaacgtggatcaggaaaacatgacaggattgaggacattgaattatgtccagaagaactggaaatgtttgtagacttgcatccattcacaaacacatctccatatactgtccttgagactatgtctttggctaaggctcttatacttttccgtgaagttggattgagacatcttctggttctaccaaaatcttctaagagggcacctgttgtcggcatactaacaagacatgatttcatgcctgaacatatattgggccttcatcctttcctctttaagagtagatggaagaaggtgcgacttggcaaggtaaaagttaccaacatattttgaagcttgctggtgactggtgatttggggaggtcaccgaaggatcatccgaagctgtatacctggtgtcaaatcacgtattttgcagagaataactcaacttgaaaactagtggatcttacttcaagaaaataatttcgttgtaaatgctaagaaggggatggaacatggctgctaagtgctaacaagttattttcccacgaacaagaggaatctcactgtaaatttattatgcatactttagctaacctttgaaaacaaatgctatctgtagtgcctagatgcattccttattaggcccatcagtgcaaaagtaacttcagttccatcctccattcatataggctactcaaaatagctgctcatatcctgcatatggtgtgataaatacaatgtatttcctcagctttgttccatagcttctttttgcaatattcatgtgcttacattgtggt

SEQ ID NO: 23893 - DNA, 3053 bp, Zea Mays
ccacaatctctctgtcccgggagtccgtcctttctgctctgtcgttactgaaacccagcgagcaccacttcccatctgctcgtgtcagtcagttcctcggctgtgccgtgagtggcggcggcagggagcggcgcagcgcagcgcagaagcagcggagtggcccaggcgatggcgccgagggaccccaaggaggacggcttcggcgtgggcggcgcggcggatccggaggccgacatcgaggccccgctgctggtttcctccggatcatcgttcctcctggacccggcgctcgaggacggcggcggcggcgacgaggagcagcgccgccgccgccgccggttcctccacggcagccacacgcactccaacaccacctcccaggtcgcgctcgtcggcgccgacgtctgccccatcgagagcctcgactacgagctgatcgagaacgacgtgttcaagcaggactggagggcgcggggacggggccacatcctgcgctacgtggcgctcaagtgggccctctgcttcctcgtcggtgccctcgcagccgccgccggcttcgtcgccaacctcggcgtcgagaatgtcgccggcgccaagttcgtcgtcacctccgacctcatgttggacggacacggctcggcgttcgcggtgttcctggcgtccaactttgcgctcaccatgttagccgcggtgctgacggtgtacgtggcgcctgcggctgccggatccggaatcccggaggtgaaggcctacttgaacggtgttgatgcccccaacatattctcactgaaaactctgatagtgaagattgtgggatgcattgcggcagtatcatcatcactgcatgtgggaaaagctgggccacttgtacacacaggcgcatgcattgcatcaatacttgggcaaggtgggtcacgtaaatatcgtatgacatgtaggtggctcaggtacttcaagaatgatagggatcggagggaccttgttacttgtggttctgctgctggtattgctgctgctttccgggcgccggttggtggagtcctttttgctctggaaacagtatcttcatggaggagtgctctactatggcgagcctttttcacaacagcaatggtcgctgttgtgcttagggcattgatagacttctgtcaaagtggcaagtgtggtttgtttgggaaaggtggccttataatgtttgatgtgacagcagattatgtcacctaccatttgattgatttacctccagtaatcactttaggggtttttggaggaatactggggagtttgtacaactttttcctggacaaggttctccgtctctacaaccttatcaacgagaaaggaaaagcttacaaactactactcgctgcaacagtcactgtttgtacatcatgttgtctatttggcttgccatggattgctgcttgcaaaccttgtccaactgacactagagaagcttgtccatcaataggccgttctggtaatttcaagaaattccaatgtgcaacagatgaatacaatgatttggctagcctattcttcaacacaaatgatgacactattagaaacctctacagtgctggcactgatgatgaattccacatttcgtccatccttgtgttctttattgcatcgtattttttgggcatcttcagctatggccttgctttaccatctggcctttttgtgccagttattttaactggtgcagcttacggccgtctggtaggcatgttgattgggtcacagtcaactttagatcatggtctttttgcagttctcggctctgctgctctgttaggtggatcaatgcggatgactgtttcagtttgtgttatcatcctagaactgactaataatctgcgtatgcttcctttggtaatgcttgtccttctcatatcaaaggtggtggcagatgcgttcaatgcaaacgtctatgatttgcttgttagattgaaagggtttccacaccttgaaggttatgctgaaccatacatgaggcaactgtcagtcagtgatgttgtaactggtcctctacagacattcaatggcatagagaaggtcggccatatagttcatgtcttaaagacaactggccacaacggtttccctgtggttgatgagccaccattttcagatacccctacattgtatggtctaattcttcgagaccacctgcttgttctattgaggaagaaggatttcatccgtagttgcacagcgtctacactgaatgctttaaaccatttctcacatgctgagtttgctaaacgtggatcaggaaaacatgacaggattgaggacattgaattatgtccagaagaactggaaatgtttgtagacttgcatccattcacaaacacatctccatatactgtccttgagactatgtctttggctaaggctcttatacttttccgtgaagttggattgagacatcttctggttctaccaaaatcttctaagagggcacctgttgtcggcatactaacaagacatgatttcatgcctgaacatatattgggccttcatcctttcctctttaagagtagatggaagaaggtgcgacttggcaaggtaaaagttaccaacatattttgaagcttgctggtgactggtgatttggggaggtcaccgaaggatcatccgaagctgtatacctggtgtcaaatcacgtattttgcagagaataactcaacttgaaaactagtggatcttacttcaagaaaataatttcgttgtaaatgctaagaaggggatggaacatggctgctaagtgctaacaagttattttcccacgaacaagaggaatctcactgtaaatttattatgcatactttagctaacctttgaaaacaaatgctatctgtagtgcctagatgcattccttattaggcccatcagtgcaaaagtaacttcagttccatcctccattcatataggctactcaaaatagctgctcatatcctgcatatggtgtgataaatacaatgtatttcctcagctttgttccatagcttctttttgcaatattcatgtgcttacattgtggt

SEQ ID NO: 23894 - DNA, 1918 bp, Zea Mays
ctcattaacaaagccacggaaaaaccatccacgcacccaacagtcgacccaagctccaactccgactccgatcataccgatggcgtcagaaggggctcccacgccggcggcggagcgaattagggtggtcggcaagtgggccggcgccttggaggtggacctaggctcttggacggtgtcgatgctgcgggcggaggtggcgcggcgggttggggacggcgtggagcccgagtgtgttggcctcatcttcggcggccgcgtgctcaaggatgatccacccgcctcgttgcgggaggctggacttaaggccaacgccaaggtgctatcctccctcacctcccctgatcgcgctaaagaaatcgatgctcaggccgccaaagcgaaggctgaagaggagcacgctgcaaagcttgtcagactgtgggaagctgcaaaagcgttgtctcaaaggcacacggatggctcctaccttgcggaagaagactacaacttagatcttgaggatcaaagtggccaaaaagtgatgtttggatctgtagatgataaaaaggctttgacgatggctctaatgcttcaccaaaaagctaaaacccagatgaagaagggaatgtataaggaagcactagatgtgttaataatggctgaggaagctttctctctttgtgacccaaagcttattgagaaagttgataatgtgccaatgctccaattagatatagtatggtgttattttgtgcttcgtgatgtatcgtgcttagaggtcgcaggggcccgcctagaaaaagcacggttaggttttgagcgttctcatgggaaagattccacccgcttcagaatactccaggctggccggcaagctgatcttgctatttatgtaaggctggagcttttggaaggagtggtggcataccataatggtcatgttgaaaaggcgcgtgaatctctcacttctgcccatgctaaatacctgcagctccaagtgccagacgaagctatatcaatgttaatggatatgggctatgaagcacggtctgcaaaaagggcattgaagatgactggctatgatattcaatcatcagtcgaactgttatgtgaggagcgtgaaaagaaacttcgtagaagagaggaggatcgagtgagacaaagagagattttgaaacaaatggcatatggtaaaactcccatgaacaaggcagttgacatgcagaagctgaaaggcttgactgctatcggatttgagaagtatcttgctgcagaagcactgcgcataaatgaaaatgatgctgacaaagcattagaccttttgacaaatcctgaacaaaactgtatcctacaagcaaggagaagccgggcatcttgtgggtttggtgcaggatcctcgcgttccagggcagctgttgccagggctgctccagcaatcaacaattctcagactcttgataatgctcctccacatcctgctgatggagatgcccctccacatgctgccgatggaggtgctcctccacatgctgcagatggagatgctcctccaatgaacaatgaagaaattgcaaaccaagatgaaattatgattggtgaagtagctgtagatgatgaagatgaagacgcaaactctcatccagttccagccagggatgcgtcgatggaaagtgagcttgccaatgaactgaagggggatgccttggatgactacgatattgatgtcagtaacgaaggacaggctatcgcagagtacttgagcttactggaggctgctcctagcagttcttagattgcaaagatctacagtgctcgataggtatctccgactttagaaggataaaatacaggtggtttcaatcgatttgtacataaataatgctacccttatggattatatatatgatgcttagaaatttcttaacgttgtgtcgaa

SEQ ID NO: 23895 - DNA, 1907 bp, Zea Mays
ctcattaacaaagccacggaaaaaccatccacgcacccaacagtcgacccaagctccaactccgactccgatcataccgatggcgtcagaaggggctcccacgccggcggcggagcgaattagggtggtcggcaagtgggccggcgccttggaggtggacctaggctcttggacggtgtcgatgctgcgggcggaggtggcgcggcgggttggggacggcgtggagcccgagtgtgttggcctcatcttcggcggccgcgtgctcaaggatgatccacccgcctcgttgcgggaggctggacttaaggccaacgccaaggtgctatcctccctcacctcccctgatcgcgctaaagaaatcgatgctcaggccgccaaagcgaaggctgaagaggagcacgctgcaaagcttgtcagactgtgggaagctgcaaaagcgttgtctcaaaggcacacggatggctcctaccttgcggaagaagactacaacttagatcttgaggatcaaagtggccaaaaagtgatgtttggatctgtagatgataaaaaggctttgacgatggctctaatgcttcaccaaaaagctaaaacccagatgaagaagggaatgtataaggaagcactagatgtgttaataatggctgaggaagctttctctctttgtgacccaaagcttattgagaaagttgataatgtgccaatgctccaattagatatagtatggtgttattttgtgcttcgtgatgtatcgtgcttagaggtcgcaggggcccgcctagaaaaagcacggttaggttttgagcgttctcatgggaaagattccacccgcttcagaatactccaggctggccggcaagctgatcttgctatttatgtaaggctggagcttttggaaggagtggtggcataccataatggtcatgttgaaaaggcgcgtgaatctctcacttctgcccatgctaaatacctgcagctccaagtgccagacgaagctatatcaatgttaatggatatgggctatgaagcacggtctgcaaaaagggcattgaagatgactggctatgatattcaatcatcagtcgaactgttatgtgaggagcgtgaaaagaaacttcgtagaagagaggaggatcgagtgagacaaagagagattttgaaacaaatggcatatggtaaaactcccatgaacaaggcagttgacatgcagaagctgaaaggcttgactgctatcggaagcactgcgcataaatgaaaatgatgctgacaaagcattagaccttttgacaaatcctgaacaaaactgtatcctacaaagtaaaattcaggcaaggagaagccgggcatcttgtgggtttggtgcaggatcctcgcgttccagggcagctgttgccagggctgctccagcaatcaacaattctcagactcttgataatgctcctccacatcctgctgatggagatgcccctccacatgctgccgatggaggtgctcctccacatgctgcagatggagatgctcctccaatgaacaatgaagaaattgcaaaccaagatgaaattatgattggtgaagtagctgtagatgatgaagatgaagacgcaaactctcatccagttccagccagggatgcgtcgatggaaagtgagcttgccaatgaactgaagggggatgccttggatgactacgatattgatgtcagtaacgaaggacaggctatcgcagagtacttgagcttactggaggctgctcctagcagttcttagattgcaaagatctacagtgctcgataggtatctccgactttagaaggataaaatacaggtggtttcaatcgatttgtacataaataatgctacccttatggattatatatatgatgcttagaaatttcttaacgttgtgtcgaa

SEQ ID NO: 23896 - DNA, 820 bp, Zea Mays
cttaagctgctgcccttagttagggagagtgtgcgtgagacatgtcagctagtactgctccatcgatcacactgcagtggccaaggccgggggagaccactgaggcactgacggtgtgtgagtgagtgagtatatatatacaggcgagtaggcgacgaccgaggtcacacttcgcctctcaagcctcttgccgattgctcccattccattccatcccaccgctcgatccagctactactactgtacttcgcattcagcagctagcactagcaggacagaccaccgcatctggttcttcgaccgacgaccgagttgtttgttggatcagcacagagccacacaggacgagatgaagatgaggactcctgctgtggccttcgctgctcttctgctgctgctgcttcagattacgacaagagcacatggaatcaggatggacaggcagttacacgaagcaatcaacagcaaaaagaagatgatggccgatcccaagagcggcggcggtggggaagcagcatccattgctgccgccggcgactcggtgaggaagcactgcgctcccgatgggcggcggcgttgctcaggaaaggtgaaaaaggcagcggcgcacgctgatgcagcagcgggagccaagcagcagcagagcaatgtctcgacgggtaacgtccagagcagcacaacggtggacggcgagggccgccgcggcgcaggcgcagcatgggcgccaccaaaacgaggcggcggaggcggcgacgacgtccgcggcttcttcttcttcttcttccccgggcgcgggcgtggcgtactacccggacatcat

SEQ ID NO: 23897 - DNA, 528 bp, Zea Mays
cttcgcctctcaagcctcttgccgattgctcccattccattccatcccaccgctcgatccagctactactactgtacttcgcattcagcagctagcactagcaggacagaccaccgcatctggttcttcgaccgacgaccgagttgtttgttggatcagcacagagccacacaggacgagatgaagatgaggactcctgctgtggccttcgctgctcttctgctgctgctgcttcagattacgacaagagcacatggaatcaggatggacaggcagttacacgaagcaatcaacagcaaaaagaagatgatggccgatcccaagagcggcggcggtggggaagcagcatccattgctgccgccggcgactcggtgaggaagcactgcgctcccgatgggcggcggcgttgctcaggaaaggtgaaaaaggcagcggcgcacgctgatgcagcagcgggagccaagcagcagcaggctatatagctaactttcagccgccaccttctgaacattcgcacggtgtcgaca

SEQ ID NO: 23898 - DNA, 3607 bp, Zea Mays
ttctggtacaaccgaacaggcccttagtcgttgaccgtctcgctcgcctccccgtccgctccgctcccgtgctttcccctttgctcgctcgcggacctccgtcccggactccgactcccggcggcgctctcgcgccagcaagctcgaatctgcacgccgccgccgccgccgccgccgccccacgcccacggcgcctagaaccagggtctttctggtgtgcaggggtgggcgcttggcttctgagaacatgtaacgggtgttgatacgaaaataggttcctggaatagcgggttcattagcagtttggcacaactttgaagctgcaggggatttcaaatgccctttgtcatcaggtccacggttccactgagccagaggattttttattgtattttcaacttccctgaggatgtttgacagtactcaaaaagctcaatacatggatgggcacagagagaggtttattaggctggatgagtcaagtcctaggtcatctgtaccttctgaagtgggaggcaggagtacattgaggtccagcatgcctgggtttggttatggtccatttaatgcactaaggtctttcttgtctgggggctctggaagactgaagtcacttagacagtcacttacttctggtgctcctaagacagcttttgcggaagatcttaaatcatataagagaactatatttgatccccaggacaaacttcttttccgaatgaactgggttttcttctcgtcttgtctttttgctgttgcagtggacccactattcttcttcctacccatcatcaacgattcaaactgcattggtattgataaaaagttggcagtgacatcaacaataatacgtacggttattgattttgtctaccttatacgcgtgtgtcttcaattccgcactgcttatgttgctccatcttcacgcgtgtttgggactggtgagcttgtgattgatccgatgctaattgcaaagcgatacattaaaagttactttgcaatggactttgttgcattgctaccacttccacagattgttgtatggagatacctccatattccagatggcccagatgtactgactacgaaaactgcactggtttgggttgttttgatccaatacattccaaggttgcttcgaatattccctgtgatcacagatttgaaaaggacagctggtgtttttattgaaactgcttgggctggtgctgcttattatcttctatggtttatgctggctgggcataatgttggtactttatggtactttttaaccatagaacgtgaagatgattgctggcatctatactgtgacgatcccaactttggcttgggatgtaatagcagctacttgtattgcaataatcatcatcatggcagctatgatagttggcttacgaataatagtgcccaagtattcaacatgtgcaatggcggtcaagacaatcctttcaactttggcatttatgagcaagcactggtctctaaaatacttagtccaggaaatttcatctcaaaattatgttattgcttctggtggggattgcaaaatctaagtacacttggtcaagggcttttgacaagcacataccctggagaagtcctgttctctatagcaatatgtgtccttggactaattctttttgctctcctcattggtaacatgcagagctacctacaatctgttgctatacgccttgaagagatgagagttaagaaacgcgatgctgagcagtggatgcatcaccgttcactgccactggacatcagacatagggtgaggaagtatgaacgttatcggtggttggaaaccaggggagtagacgaagaaactttggttcaaactcttccaaaagatcttaggagggatatcaagcggcatctttgtttgggcttagtgaaaagggtgcctttgtttgaaaatatggatgaacgattgttggatgcaatatgtgagcggttaagacctgcactctacacagaaaatgagttcattttgagggaaggtgacccggtggatgagatgcactttattcttcatggttgtttggagagtgtaaccactgatggtggacggagtgggttctttaacaaggttcagctaaaggaagggtcgttctgtggcgatgagttgctcacttgggcattggatcccaagtcagctgctaattttccagtttcgagcaggactgtccaggcactcaccgaggttgaggcgtttgccctatgtgcagaagagctgaaattcgtggccagtcagttcaggaggctgcacagcaggcaagtgcaacacacattccgattctattcccagcagtggaggacttgggcagcctgcttcatccaagcagcatggcgccgctactacaagaggaagatggcagagcagcggcgcaaagaagaagaggcggcaagccggccaagtagtagccaccctagccttggggcgactatctatgcatctcgtttcgctgccaacgccatgcgaggggttcacaggctaagaagcaaggctgtccctaccattgtcaggctaccgaaacccccagaaccagattttggtgtcgatgatgctgactaacgagacaatcacactgtactcgcttgtaattgtactttacctcatctgtagattctgtacaagattcaacgacagctgaagaagatagtgtctgtaaaggtttgtaaccacgcacagacagaccataacggaggtatatcctgcttgacgtctatggaaatgcaaatctacttccttaaaacctgaagtgttttggagccacctccgcgcttccggggtacgggcgtacggcatcagtgtcacctgcggacgagtggcgggatcggatctaaaaaatttatccactggagttgtgggagatgtcgtgtctggtgccctctccctccgtcccgtgctgcactgcgctttcttctttgtgattgcttcgctcgcctcctccaccaccagacaccagcccaaactacctcgccagctccctctgcctccccctccctcctcccgtcgccgcagcacgcagctccgccggttttcacggcttggagcagatctgccacgccaccgccgcgtagaccaacttggtggagggatcccgtccgaatctgattcctattctccagctcgaccgctgtagcgagaggagagagagaaaggagcagtggcgacgaggtctatggcatcgatggcagcgtacctggcctggctcggcgggcggcgcagaagaagtgggtgcacctgctttaccacacggcgctcaacttccaccgccacctcttctaccaggaaatcagttcccccaatcctcccctcttcgcctcccttttgatctcgatctgccttcctgctcgcggacgggactggccttgtgttgtctctcccgcgcaggcgtcagatctcctcgacaagtttgagaccaactgccacgtgcacggtgtgaagggagttgcaactaatatggttattgtaacccaattaaggtgcaagaagtccggttcgatcctttggccgattttggacgagatcagcccggcagtgcgaatgatttggagtttctgtgcacttaggaggaagatttaaattggaaatatg

SEQ ID NO: 23899 - DNA, 3813 bp, Zea Mays
caaagacctcgttaggccctgttcggttgttccagattggacccccggattaattcctagccggattacttctctaatttatatagattttgatgagctaaaatgaatcctagctcattctggtacaaccgaacaggcccttagtcgttgaccgtctcgctcgcctccccgtccgctccgctcccgtgctttcccctttgctcgctcgcggacctccgtcccggactccgactcccggcggcgctctcgcgccagcaagctcgaatctgcacgccgccgccgccgccgccgccgccccacgcccacggcgcctagaaccagggtctttctggtgtgcaggggtgggcgcttggcttctgagaacatgtaacgggtgttgatacgaaaataggttcctggaatagcgggttcattagcagtttggcacaactttgaagctgcaggggatttcaaatgccctttgtcatcaggtccacggttccactgagccagaggattttttattgtattttcaacttccctgaggatgtttgacagtactcaaaaagctcaatacatggatgggcacagagagaggtttattaggctggatgagtcaagtcctaggtcatctgtaccttctgaagtgggaggcaggagtacattgaggtccagcatgcctgggtttggttatggtccatttaatgcactaaggtctttcttgtctgggggctctggaagactgaagtcacttagacagtcacttacttctggtgctcctaagacagcttttgcggaagatcttaaatcatataagagaactatatttgatccccaggacaaacttcttttccgaatgaactgggttttcttctcgtcttgtctttttgctgttgcagtggacccactattcttcttcctacccatcatcaacgattcaaactgcattggtattgataaaaagttggcagtgacatcaacaataatacgtacggttattgattttgtctaccttatacgcgtgtgtcttcaattccgcactgcttatgttgctccatcttcacgcgtgtttgggactggtgagcttgtgattgatccgatgctaattgcaaagcgatacattaaaagttactttgcaatggactttgttgcattgctaccacttccacagattgttgtatggagatacctccatattccagatggcccagatgtactgactacgaaaactgcactggtttgggttgttttgatccaatacattccaaggttgcttcgaatattccctgtgatcacagatttgaaaaggacagctggtgtttttattgaaactgcttgggctggtgctgcttattatcttctatggtttatgctggctgggcataatgttggtactttatggtactttttaaccatagaacgtgaagatgattgctggcatctatactgtgacgatcccaactttggcttgggatgtaatagcagctacttgtattgcaataatcatcatcatggcagctatgatagttggcttacgaataatagtgcccaagtattcaacatgtgcaatggcggtcaagacaatcctttcaactttggcatttatgagcaagcactggtctctaaaatacttagtccaggaaatttcatctcaaaattatgttattgcttctggtggggattgcaaaatctaagtacacttggtcaagggcttttgacaagcacataccctggagaagtcctgttctctatagcaatatgtgtccttggactaattctttttgctctcctcattggtaacatgcagagctacctacaatctgttgctatacgccttgaagagatgagagttaagaaacgcgatgctgagcagtggatgcatcaccgttcactgccactggacatcagacatagggtgaggaagtatgaacgttatcggtggttggaaaccaggggagtagacgaagaaactttggttcaaactcttccaaaagatcttaggagggatatcaagcggcatctttgtttgggcttagtgaaaagggtgcctttgtttgaaaatatggatgaacgattgttggatgcaatatgtgagcggttaagacctgcactctacacagaaaatgagttcattttgagggaaggtgacccggtggatgagatgcactttattcttcatggttgtttggagagtgtaaccactgatggtggacggagtgggttctttaacaaggttcagctaaaggaagggtcgttctgtggcgatgagttgctcacttgggcattggatcccaagtcagctgctaattttccagtttcgagcaggactgtccaggcactcaccgaggttgaggcgtttgccctatgtgcagaagagctgaaattcgtggccagtcagttcaggaggctgcacagcaggcaagtgcaacacacattccgattctattcccagcagtggaggacttgggcagcctgcttcatccaagcagcatggcgccgctactacaagaggaagatggcagagcagcggcgcaaagaagaagaggcggcaagccggccaagtagtagccaccctagccttggggcgactatctatgcatctcgtttcgctgccaacgccatgcgaggggttcacaggctaagaagcaaggctgtccctaccattgtcaggctaccgaaacccccagaaccagattttggtgtcgatgatgctgactaacgagacaatcacactgtactcgcttgtaattgtactttacctcatctgtagattctgtacaagattcaacgacagctgaagaagatagtgtctgtaaaggtttgtaaccacgcacagacagaccataacggaggtatatcctgcttgacgtctatggaaatgcaaatctacttccttaaaacctgaagtgttttggagccacctccgcgcttccggggtacgggcgtacggcatcagtgtcacctgcggacgagtggcgggatcggatctaaaaaatttatccactggagttgtgggagatgtcgtgtctggtgccctctccctccgtcccgtgctgcactgcgctttcttctttgtgattgcttcgctcgcctcctccaccaccagacaccagcccaaactacctcgccagctccctctgcctccccctccctcctcccgtcgccgcagcacgcagctccgccggttttcacggcttggagcagatctgccacgccaccgccgcgtagaccaacttggtggagggatcccgtccgaatctgattcctattctccagctcgaccgctgtagcgagaggagagagagaaaggagcagtggcgacgaggtctatggcatcgatggcagcgtacctggcctggctcggcgggcggcgcagaagaagtgggtgcacctgctttaccacacggcgctcaacttccaccgccacctcttctaccaggaaatcagttcccccaatcctcccctcttcgcctcccttttgatctcgatctgccttcctgctcgcggacgggactggccttgtgttgtctctcccgcgcaggcgtcagatctcctcgacaagtttgagaccaactgccacgtggtttctttaggggtattcactgaaggcgacagctgatcgtcattcatagattgcaagcaataggggaaagtcacttcatccaaataatgcacggtgtgaagggagttgcaactaatatggttattgtaacccaattaaggtgcaagaagtccggttcgatcctttggccgattttggacgagatcagcccggcagtgcgaatgatttggagtttctgtgcacttaggaggaagatttaaattggaaatatg

SEQ ID NO: 23900 - DNA, 2812 bp, Zea Mays
ccggccagaggcaggccgagtcgcaagcgccgttgccatctctaacacgcggcactgtaggaatcggctacctccggctgctctgctttgtgagatgctcttcctcgtccggcggcaccgccgcctcgctctccccttctccagtctgcacgcacccgcgcccgcgcccgctcccacactgccctcctctctcgacgcctcggcggtgctcaagacgctgtccctctacgccaacgattggcgccgggcgctcgacttcttccactggtccgcctcccccgccggcgccaacttgcccccgaccgccgccaccctcgcccgagcggtcgacatactcggcaaacacttcgagttcccgctcgccacctccctcctcctttcccaccacgatcctggggaccccaccttcctccgccccgcgctccgcgccctcctcaaccgcctcgccgccgccaacctcatcgacgacgccctccacgcgttcgaatccaccgctgcctccatcggactctgcgatgaggtctccttccacatcctcgtcgacgcgctctgcgaccaccgccgcgtcgacgaggccgaccacctatgcttcggcaaggacccgccgccgttcccaccgggcacgaagacccacaacctgctcctccgtgggtgggctaaggcccacgcctgggcgcgtctccgccagctgtggttcgacatggaccgccgcggcgttgccaaggacctccattcctactcgatatacatggatgcccttgctaagtcaggcaagccgtggaaggctttcaaagttttcaaggagatgaagcagagaggcattcgaatcgatactgttgcttacaacactgcgatccatgctgttgggatggcacagggcgtcgactctgctgtaaggttgtacagacagatggttgatgccggttgcaaaccaaatattgccacttacaatgcgattatcaagttattctgcaaggagggtaggttcaaggaagggtatgcgtttgttcagcagatgcgcaagactggctgcaagcccgacgtgctcacataccattgctttttccagtatttgagccgtccacaagaggtcctcggactgtttgagaaaatgcttgagaggggttgccagccaaggatggacacatatgtcatgcttattaagaggtttggacgctgggggttccttcggccggtgttcattgtgtggaaggcaatggaagagcagggtcttagcccggatgcatttgcatacaatgcacttattgatgcattactgcaaaagggtatggtggatttggctaggaagtatgatgagaaaatgcttgcgaagggactctcacctaagcccaggaaagagctggggactaagttgccagaagcagaatctgatagtgataacacattagatggtgtgctttgatttctgtgagctagacagggatgtacattatcatgttctactacccattgttatcatcgaaacaattgtttgaatatgctcatgttcccaaatataggctgttttcattcaaggagatctaatatgatttcatggattttatatggaattcaaagcagacaatcatattgcattgccatcagttatcattaggttattatctgataaatctgtggaagaggtgggcctccagagcattatgtgttcctggaatcataggtggacatggtcacatgtgtaggaaaaagaattatcatatgctcatgggtctggtgccagttgacataagaagtggatgaaagaaccaagacgaatcagcaatgaagcaaaggccatgtagtttgtaaggtccctagtaagtcagcttcaacttgctaaacagctcatgacgagacctggagcaggaatactggtaagtcagcttcagcttgctaaacagtttcatggcgagacttggagcatgaatacttcaagtacttatcatgtcatatcagactcattttttggctcatttattactgaattaaattgggatgaaagtcgaaatgcaaaacttttagatggaatgcagatcttctgatcttcatgtggttgctccttaagtgaagccatcacatcagacaaactacttggcaggggatagatggcaatcatggcattcaaactcaacttgttagctctcctgtgagcagcatgaactgggttctcctttgattatcaactggcttctgttcgtaacagatttggcatgcagtggcaacttggtcaggcatagattctcttgagtccaaacccagtaggaatcaaatcaagatgcttcacaaaatatgagaaactggtgacacaagcacgttgatggaagtaccatgcaggcccatgaggagaaaattcagaatagatatgtttgaatgccacgtactgagcagcttggaggacattgacaattggcatgccacatactgtgttgtcaaaagcgcaacaggacttctcgtaggaagtctgaatctatggcttcgcttagtcttgggggagaggctttctgacagaaagcctaaattgatgaaatgaacgttcaaatgattttcaggttaataatgccaatcaaggaaggcccctttttgaaaagcctcgaaacatatgaaccaagctaaagatgaatgaagccgaaggtacggaagccaaagctttagcgtcgtcggaaaatcttgtagatacagctctggatactctatatttatcaatttttgtgggttgtacatgccctatcaaagaaactgcatgatacaatcataagcttctgaatcataaatgaagttaaaatacaatacgtatggaaaatcttgtagagac

SEQ ID NO: 23901 - DNA, 3709 bp, Zea Mays
ttctggtacaaccgaacaggcccttagtcgttgaccgtctcgctcgcctccccgtccgctccgctcccgtgctttcccctttgctcgctcgcggacctccgtcccggactccgactcccggcggcgctctcgcgccagcaagctcgaatctgcacgccgccgccgccgccgccgccgccccacgcccacggcgcctagaaccagggtctttctggtgtgcaggggtgggcgcttggcttctgagaacatgtaacgggtgttgatacgaaaataggttcctggaatagcgggttcattagcagtttggcacaactttgaagctgcaggggatttcaaatgccctttgtcatcaggtccacggttccactgagccagaggattttttattgtattttcaacttccctgaggatgtttgacagtactcaaaaagctcaatacatggatgggcacagagagaggtttattaggctggatgagtcaagtcctaggtcatctgtaccttctgaagtgggaggcaggagtacattgaggtccagcatgcctgggtttggttatggtccatttaatgcactaaggtctttcttgtctgggggctctggaagactgaagtcacttagacagtcacttacttctggtgctcctaagacagcttttgcggaagatcttaaatcatataagagaactatatttgatccccaggacaaacttcttttccgaatgaactgggttttcttctcgtcttgtctttttgctgttgcagtggacccactattcttcttcctacccatcatcaacgattcaaactgcattggtattgataaaaagttggcagtgacatcaacaataatacgtacggttattgattttgtctaccttatacgcgtgtgtcttcaattccgcactgcttatgttgctccatcttcacgcgtgtttgggactggtgagcttgtgattgatccgatgctaattgcaaagcgatacattaaaagttactttgcaatggactttgttgcattgctaccacttccacagattgttgtatggagatacctccatattccagatggcccagatgtactgactacgaaaactgcactggtttgggttgttttgatccaatacattccaaggttgcttcgaatattccctgtgatcacagatttgaaaaggacagctggtgtttttattgaaactgcttgggctggtgctgcttattatcttctatggtttatgctggctgggcataatgttggtactttatggtactttttaaccatagaacgtgaagatgattgctggcatctatactgtgacgatcccaactttggcttgggatgtaatagcagctacttgtattgcaataatcatcatcatggcagctatgatagttggcttacgaataatagtgcccaagtattcaacatgtgcaatggcggtcaagacaatcctttcaactttggcatttatgagcaagcactggtctctaaaatacttagtccaggaaatttcatctcaaaattatgttattgcttctggtggggattgcaaaatctaagtacacttggtcaagggcttttgacaagcacataccctggagaagtcctgttctctatagcaatatgtgtccttggactaattctttttgctctcctcattggtaacatgcagagctacctacaatctgttgctatacgccttgaagagatgagagttaagaaacgcgatgctgagcagtggatgcatcaccgttcactgccactggacatcagacatagggtgaggaagtatgaacgttatcggtggttggaaaccaggggagtagacgaagaaactttggttcaaactcttccaaaagatcttaggagggatatcaagcggcatctttgtttgggcttagtgaaaagggtgcctttgtttgaaaatatggatgaacgattgttggatgcaatatgtgagcggttaagacctgcactctacacagaaaatgagttcattttgagggaaggtgacccggtggatgagatgcactttattcttcatggttgtttggagagtgtaaccactgatggtggacggagtgggttctttaacaaggttcagctaaaggaagggtcgttctgtggcgatgagttgctcacttgggcattggatcccaagtcagctgctaattttccagtttcgagcaggactgtccaggcactcaccgaggttgaggcgtttgccctatgtgcagaagagctgaaattcgtggccagtcagttcaggaggctgcacagcaggcaagtgcaacacacattccgattctattcccagcagtggaggacttgggcagcctgcttcatccaagcagcatggcgccgctactacaagaggaagatggcagagcagcggcgcaaagaagaagaggcggcaagccggccaagtagtagccaccctagccttggggcgactatctatgcatctcgtttcgctgccaacgccatgcgaggggttcacaggctaagaagcaaggctgtccctaccattgtcaggctaccgaaacccccagaaccagattttggtgtcgatgatgctgactaacgagacaatcacactgtactcgcttgtaattgtactttacctcatctgtagattctgtacaagattcaacgacagctgaagaagatagtgtctgtaaaggtttgtaaccacgcacagacagaccataacggaggtatatcctgcttgacgtctatggaaatgcaaatctacttccttaaaacctgaagtgttttggagccacctccgcgcttccggggtacgggcgtacggcatcagtgtcacctgcggacgagtggcgggatcggatctaaaaaatttatccactggagttgtgggagatgtcgtgtctggtgccctctccctccgtcccgtgctgcactgcgctttcttctttgtgattgcttcgctcgcctcctccaccaccagacaccagcccaaactacctcgccagctccctctgcctccccctccctcctcccgtcgccgcagcacgcagctccgccggttttcacggcttggagcagatctgccacgccaccgccgcgtagaccaacttggtggagggatcccgtccgaatctgattcctattctccagctcgaccgctgtagcgagaggagagagagaaaggagcagtggcgacgaggtctatggcatcgatggcagcgtacctggcctggctcggcgggcggcgcagaagaagtgggtgcacctgctttaccacacggcgctcaacttccaccgccacctcttctaccaggaaatcagttcccccaatcctcccctcttcgcctcccttttgatctcgatctgccttcctgctcgcggacgggactggccttgtgttgtctctcccgcgcaggcgtcagatctcctcgacaagtttgagaccaactgccacgtggggtattcactgaaggcgacagctgatcgtcattcatagattgcaagcaataggggaaagtcacttcatccaaataatggtcattgccttttcttcagaatgctctatttacctatttgtaattactcccctctcatctgacatgtagagtatttgacatattcgttgtattagagagtttgacatgttcgttgtataatatgattttatcgatcttgatatatatttgaatggttgagcgcccgatagggcgctttctattct

SEQ ID NO: 23902 - DNA, 2320 bp, Zea Mays
gtcaatctgggttagaaccagaaactgatgggtttgcagctccacttcttagtacacttggtcaagggcttttgacaagcacataccctggagaagtcctgttctctatagcaatatgtgtccttggactaattctttttgctctcctcattggtaacatgcagagctacctacaatctgttgctatacgccttgaagagatgagagttaagaaacgcgatgctgagcagtggatgcatcaccgttcactgccactggacatcagacatagggtgaggaagtatgaacgttatcggtggttggaaaccaggggagtagacgaagaaactttggttcaaactcttccaaaagatcttaggagggatatcaagcggcatctttgtttgggcttagtgaaaagggtgcctttgtttgaaaatatggatgaacgattgttggatgcaatatgtgagcggttaagacctgcactctacacagaaaatgagttcattttgagggaaggtgacccggtggatgagatgcactttattcttcatggttgtttggagagtgtaaccactgatggtggacggagtgggttctttaacaaggttcagctaaaggaagggtcgttctgtggcgatgagttgctcacttgggcattggatcccaagtcagctgctaattttccagtttcgagcaggactgtccaggcactcaccgaggttgaggcgtttgccctatgtgcagaagagctgaaattcgtggccagtcagttcaggaggctgcacagcaggcaagtgcaacacacattccgattctattcccagcagtggaggacttgggcagcctgcttcatccaagcagcatggcgccgctactacaagaggaagatggcagagcagcggcgcaaagaagaagaggcggcaagccggccaagtagtagccaccctagccttggggcgactatctatgcatctcgtttcgctgccaacgccatgcgaggggttcacaggctaagaagcaaggctgtccctaccattgtcaggctaccgaaacccccagaaccagattttggtgtcgatgatgctgactaacgagacaatcacactgtactcgcttgtaattgtactttacctcatctgtagattctgtacaagattcaacgacagctgaagaagatagtgtctgtaaaggtttgtaaccacgcacagacagaccataacggaggtatatcctgcttgacgtctatggaaatgcaaatctacttccttaaaacctgaagtgttttggagccacctccgcgcttccggggtacgggcgtacggcatcagtgtcacctgcggacgagtggcgggatcggatctaaaaaatttatccactggagttgtgggagatgtcgtgtctggtgccctctccctccgtcccgtgctgcactgcgctttcttctttgtgattgcttcgctcgcctcctccaccaccagacaccagcccaaactacctcgccagctccctctgcctccccctccctcctcccgtcgccgcagcacgcagctccgccggttttcacggcttggagcagatctgccacgccaccgccgcgtagaccaacttggtggagggatcccgtccgaatctgattcctattctccagctcgaccgctgtagcgagaggagagagagaaaggagcagtggcgacgaggtctatggcatcgatggcagcgtacctggcctggctcggcgggcggcgcagaagaagtgggtgcacctgctttaccacacggcgctcaacttccaccgccacctcttctaccaggaaatcagttcccccaatcctcccctcttcgcctcccttttgatctcgatctgccttcctgctcgcggacgggactggccttgtgttgtctctcccgcgcaggcgtcagatctcctcgacaagtttgagaccaactgccacgtggtaaggcctcctcctgctgatcccttttcgcacacctcctcttcccatttgtctgttagtggggagtgaattcatgagttacatttggtgatgatggtctctatgtggtgccgtgattgtgagctagaacaagttttttctatcatgtttaattgttaaaatgcctccgttgagacgccaagactcagcaccgttgtggtgtcgtcacatccatctctagcctcccgagtcaccagcgctgcccaagttagctgagctccgtctgttctgctttcgcgccgcacaacaccattgagctcctccccgacgccacgtcccgaggtctgccgagcggccggctctgccacgctgagatgtgccctgtcccctgcctaggtcga

SEQ ID NO: 23903 - DNA, 2864 bp, Zea Mays
gaagtggatgttggcagtaatggcagatgttcagcaaccaaagctctatcctgttttccagaatcagtagaaattgttgtatggagatacctccatattccagatggcccagatgtactgactacgaaaactgcactggtttgggttgttttgatccaatacattccaaggttgcttcgaatattccctgtgatcacagatttgaaaaggacagctggtgtttttattgaaactgcttgggctggtgctgcttattatcttctatggtttatgctggctgggcataatgttggtactttatggtactttttaaccatagaacgtgaagatgattgctggcatctatactgtgacgatcccaactttggcttgggatgtaatagcagctacttgtattgcaataatcatcatcatggcagctatgatagttggcttacgaataatagtgcccaagtattcaacatgtgcaatggcggtcaagacaatcctttcaactttggcatttatgagcaagcactggtctctaaaatacttagtccaggaaatttcatctcaaaattatgttattgcttctggtggggattgcaaaatctaagtacacttggtcaagggcttttgacaagcacataccctggagaagtcctgttctctatagcaatatgtgtccttggactaattctttttgctctcctcattggtaacatgcagagctacctacaatctgttgctatacgccttgaagagatgagagttaagaaacgcgatgctgagcagtggatgcatcaccgttcactgccactggacatcagacatagggtgaggaagtatgaacgttatcggtggttggaaaccaggggagtagacgaagaaactttggttcaaactcttccaaaagatcttaggagggatatcaagcggcatctttgtttgggcttagtgaaaagggtgcctttgtttgaaaatatggatgaacgattgttggatgcaatatgtgagcggttaagacctgcactctacacagaaaatgagttcattttgagggaaggtgacccggtggatgagatgcactttattcttcatggttgtttggagagtgtaaccactgatggtggacggagtgggttctttaacaaggttcagctaaaggaagggtcgttctgtggcgatgagttgctcacttgggcattggatcccaagtcagctgctaattttccagtttcgagcaggactgtccaggcactcaccgaggttgaggcgtttgccctatgtgcagaagagctgaaattcgtggccagtcagttcaggaggctgcacagcaggcaagtgcaacacacattccgattctattcccagcagtggaggacttgggcagcctgcttcatccaagcagcatggcgccgctactacaagaggaagatggcagagcagcggcgcaaagaagaagaggcggcaagccggccaagtagtagccaccctagccttggggcgactatctatgcatctcgtttcgctgccaacgccatgcgaggggttcacaggctaagaagcaaggctgtccctaccattgtcaggctaccgaaacccccagaaccagattttggtgtcgatgatgctgactaacgagacaatcacactgtactcgcttgtaattgtactttacctcatctgtagattctgtacaagattcaacgacagctgaagaagatagtgtctgtaaaggtttgtaaccacgcacagacagaccataacggaggtatatcctgcttgacgtctatggaaatgcaaatctacttccttaaaacctgaagtgttttggagccacctccgcgcttccggggtacgggcgtacggcatcagtgtcacctgcggacgagtggcgggatcggatctaaaaaatttatccactggagttgtgggagatgtcgtgtctggtgccctctccctccgtcccgtgctgcactgcgctttcttctttgtgattgcttcgctcgcctcctccaccaccagacaccagcccaaactacctcgccagctccctctgcctccccctccctcctcccgtcgccgcagcacgcagctccgccggttttcacggcttggagcagatctgccacgccaccgccgcgtagaccaacttggtggagggatcccgtccgaatctgattcctattctccagctcgaccgctgtagcgagaggagagagagaaaggagcagtggcgacgaggtctatggcatcgatggcagcgtacctggcctggctcggcgggcggcgcagaagaagtgggtgcacctgctttaccacacggcgctcaacttccaccgccacctcttctaccaggaaatcagttcccccaatcctcccctcttcgcctcccttttgatctcgatctgccttcctgctcgcggacgggactggccttgtgttgtctctcccgcgcaggcgtcagatctcctcgacaagtttgagaccaactgccacgtggtaaggcctcctcctgctgatcccttttcgcacacctcctcttcccatttgtctgttagtggggagtgaattcatgagttacatttggtgatgatggtctctatgtggtgccgtgattgtgagctagaacaagttttttctatcatgtttaattgttaaaatgcctccgttgagacgccaagactcagcaccgttgtggtgtcgtcacatccatctctagcctcccgagtcaccagcgctgcccaagttagctgagctccgtctgttctgctttcgcgccgcacaacaccattgagctcctccccgacgccacgtcccgaggtctgccgagcggccggctctgccacgctgagatgtgccctgtcccctgcctaggtcga

SEQ ID NO: 23904 - DNA, 3595 bp, Zea Mays
ttctggtacaaccgaacaggcccttagtcgttgaccgtctcgctcgcctccccgtccgctccgctcccgtgctttcccctttgctcgctcgcggacctccgtcccggactccgactcccggcggcgctctcgcgccagcaagctcgaatctgcacgccgccgccgccgccgccgccgccccacgcccacggcgcctagaaccagggtctttctggtgtgcaggggtgggcgcttggcttctgagaacatgtaacgggtgttgatacgaaaataggttcctggaatagcgggttcattagcagtttggcacaactttgaagctgcaggggatttcaaatgccctttgtcatcaggtccacggttccactgagccagaggattttttattgtattttcaacttccctgaggatgtttgacagtactcaaaaagctcaatacatggatgggcacagagagaggtttattaggctggatgagtcaagtcctaggtcatctgtaccttctgaagtgggaggcaggagtacattgagtggacccactattcttcttcctacccatcatcaacgattcaaactgcattggtattgataaaaagttggcagtgacatcaacaataatacgtacggttattgattttgtctaccttatacgcgtgtgtcttcaattccgcactgcttatgttgctccatcttcacgcgtgtttgggactggtgagcttgtgattgatccgatgctaattgcaaagcgatacattaaaagttactttgcaatggactttgttgcattgctaccacttccacagattgttgtatggagatacctccatattccagatggcccagatgtactgactacgaaaactgcactggtttgggttgttttgatccaatacattccaaggttgcttcgaatattccctgtgatcacagatttgaaaaggacagctggtgtttttattgaaactgcttgggctggtgctgcttattatcttctatggtttatgctggctgggcataatgttggtactttatggtactttttaaccatagaacgtgaagatgattgctggcatctatactgtgacgatcccaactttggcttgggatgtaatagcagctacttgtattgcaataatcatcatcatggcagctatgatagttggcttacgaataatagtgcccaagtattcaacatgtgcaatggcggtcaagacaatcctttcaactttggcatttatgagcaagcactggtctctaaaatacttagtccaggaaatttcatctcaaaattatgttattgcttctggtggggattgcaaaatctaagtacacttggtcaagggcttttgacaagcacataccctggagaagtcctgttctctatagcaatatgtgtccttggactaattctttttgctctcctcattggtaacatgcagagctacctacaatctgttgctatacgccttgaagagatgagagttaagaaacgcgatgctgagcagtggatgcatcaccgttcactgccactggacatcagacatagggtgaggaagtatgaacgttatcggtggttggaaaccaggggagtagacgaagaaactttggttcaaactcttccaaaagatcttaggagggatatcaagcggcatctttgtttgggcttagtgaaaagggtgcctttgtttgaaaatatggatgaacgattgttggatgcaatatgtgagcggttaagacctgcactctacacagaaaatgagttcattttgagggaaggtgacccggtggatgagatgcactttattcttcatggttgtttggagagtgtaaccactgatggtggacggagtgggttctttaacaaggttcagctaaaggaagggtcgttctgtggcgatgagttgctcacttgggcattggatcccaagtcagctgctaattttccagtttcgagcaggactgtccaggcactcaccgaggttgaggcgtttgccctatgtgcagaagagctgaaattcgtggccagtcagttcaggaggctgcacagcaggcaagtgcaacacacattccgattctattcccagcagtggaggacttgggcagcctgcttcatccaagcagcatggcgccgctactacaagaggaagatggcagagcagcggcgcaaagaagaagaggcggcaagccggccaagtagtagccaccctagccttggggcgactatctatgcatctcgtttcgctgccaacgccatgcgaggggttcacaggctaagaagcaaggctgtccctaccattgtcaggctaccgaaacccccagaaccagattttggtgtcgatgatgctgactaacgagacaatcacactgtactcgcttgtaattgtactttacctcatctgtagattctgtacaagattcaacgacagctgaagaagatagtgtctgtaaaggtttgtaaccacgcacagacagaccataacggaggtatatcctgcttgacgtctatggaaatgcaaatctacttccttaaaacctgaagtgttttggagccacctccgcgcttccggggtacgggcgtacggcatcagtgtcacctgcggacgagtggcgggatcggatctaaaaaatttatccactggagttgtgggagatgtcgtgtctggtgccctctccctccgtcccgtgctgcactgcgctttcttctttgtgattgcttcgctcgcctcctccaccaccagacaccagcccaaactacctcgccagctccctctgcctccccctccctcctcccgtcgccgcagcacgcagctccgccggttttcacggcttggagcagatctgccacgccaccgccgcgtagaccaacttggtggagggatcccgtccgaatctgattcctattctccagctcgaccgctgtagcgagaggagagagagaaaggagcagtggcgacgaggtctatggcatcgatggcagcgtacctggcctggctcggcgggcggcgcagaagaagtgggtgcacctgctttaccacacggcgctcaacttccaccgccacctcttctaccaggaaatcagttcccccaatcctcccctcttcgcctcccttttgatctcgatctgccttcctgctcgcggacgggactggccttgtgttgtctctcccgcgcaggcgtcagatctcctcgacaagtttgagaccaactgccacgtggtaaggcctcctcctgctgatcccttttcgcacacctcctcttcccatttgtctgttagtggggagtgaattcatgagttacatttggtgatgatggtctctatgtggtgccgtgattgtgagctagaacaagttttttctatcatgtttaattgttaaaatgcctccgttgagacgccaagactcagcaccgttgtggtgtcgtcacatccatctctagcctcccgagtcaccagcgctgcccaagttagctgagctccgtctgttctgctttcgcgccgcacaacaccattgagctcctccccgacgccacgtcccgaggtctgccgagcggccggctctgccacgctgagatgtgccctgtcccctgcctaggtcga

SEQ ID NO: 23905 - DNA, 1572 bp, Zea Mays
gtttcagttggaacaaaaaaaaaaaaagctcggccggagatgaaacattgcggggactctcgatacaagcagctcaaagggcacttgagatggccggagtaaaagctgaagatgtcgacctcgttcttctttgtacatctactccagatgatctgtttggaggtgctgctcaggtgctgtccgaagtggggtgcacaaaagcttttggatttgatattacagctgcttgtagtgggtttttagtcggcttaatcacagctactcgctttatcaaaggcggaggttttcagaatgtcttagtaattggtgcagatgctctttcaaaatacgtggattggacagacagaggtacatgcattctttttggtgatgctgctggtgctgtgttggtacaggcatgcagtgctgatgaagatggcatgcttggtttttgtgttcaaagtgatggcaatggacaaaagcacctaagtgccatagcggctaatgacgagtctatcttgtccaataccaatggtgttccaggatttccgccaaagaaggcaacctactcatgcattcaaatgaacggaaaggaagtttttcgctttgctgtccgatgcgtgccacagtccattgagaaggcactccaagaagctggtttgcctgcctccagtatcgactggttgttgttacatcaagctaatcagcgtattattgatgctgctgccagtagattagatatcccatccgacaaggttatttcaaatcttgctaattacggcaataccagtgcggcatccatcccattagcattggatgaggctgttcgcagtggcaaggtgaagactggtgatattattgccgcatcaggttttggcgctggacttacctggggttcagctattgtcaaatggggctaattattctacgtgagccataacaacatcaatgagatcttcataggccttggggacctacatctatttggtctctccccccttccacccattttctgtgcaacatttttctatcgcatgtgtcggtcttccttgcacatgaaaatctagtgccattttaccgtattcctttggctcattacacaactgagagtagattggtggatgaaaatggttgaattttgcatcgaggatgattgtggtggtactaaagatgagattacactgtaaagttaatgagcctttttgtcagggaattttactgaataagcatgtacaaggagaggtgggccgtggacatatgctgtaggacaattcttagtaattttgttctgcttttattatacacctattgttagtatattttgttctattatgcacctaccgtgaaaaaaagtaaccttggtttgcgcgctgttagatgttttgtattttagctatctgatcgatcaggttggcacatgaaaaatggtattgcaagaatgtagttaacaaaaagtaaccatgtttttctttctgctgaataggctcgttgagcgttcaacctggcgatagcatatatttttcgtactggaagtggcaaatttgattggtgatgtatttgttcataggtccaccttaaattgcaacgttgttt

SEQ ID NO: 23906 - DNA, 1121 bp, Zea Mays
taatatgtcgagcaccaaaccttgtctcagtcaatgcagcagggaatctgtggaccctcttcaatatgtgaggattggcctgctggtggacaaggaggcccccgccctggtcctggtgctgctgctacagctccagcaccagcaccggttgctgctcgcccataggctttagcttttcgaccgtgttgaaagtcttctgcccacgcagtttcggagttgtcgcctatgggtgaaaaacaagaagatggaaaatacaagcactctgtggatctcccgaaaacaacatttgagctgagagcgaattctgtacagcgggagctagagctccaaaaattatgggacgataatcaggttctgaaaagggtttctgaggaacactgggtgatcttcacatgggccatgcgctcaataaaatcctcaaggattttataaatcgctacaagctgcttcagaatcataaagtgtcctttgttcctggttgggattgccacggccttctaatagaactaaaaggcaagttcatttgtacaaaggtggcttgtgcgaacgaggcgtggcaatcgatgagcagtggcaaacccaaaaatcttcaaaagcctaggcaaaagtagtaactaaagatacatcaccttgtccagtttttctgcttttacttcgactatatgtcattgtgccacaaaaaacttgtttcatcgacttatgatgagtcttctcaattgtttcttgaatatgcttttttagaaccaaattgaattttacaaggtgcaatattgattagaaaaaggtgtgatgctgactgggaaagcgctactcccttgtatgaattagctggtcgatgattttgtttcccatcctttttaatttcttgacatccgtttgttcattggggagcacatatgtagaatgatgattaatgtttttaaatattaatagattttatcataatatattgccgccgtaacaacgtacgggcatacaactagtcattgaagaagtcaaaaagatgagagaagcacggtaagagacagagagacaccatgagaagttctttgagttcgaaaagtgtaagcttgagatggaacagactaaacttgaattggagcgagattggcaggacaaag

SEQ ID NO: 23907 - DNA, 1143 bp, Zea Mays
agaatcgtggtgggatcagagcagcatattttgtttccagattaatatgtcgagcaccaaaccttgtctcagtcaatgcagcagggaatctgtggaccctcttcaatatgtgaggattggcctgctggtggacaaggaggcccccgccctggtcctggtgctgctgctacagctccagcaccagcaccggttgctgctcgcccataggctttagcttttcgaccgtgttgaaagtcttctgcccacgcagtttcggagttgtcgcctatgggtgaaaaacaagaagatggaaaatacaagcactctgtggatctcccgaaaacaacatttgagctgagagcgaattctgtacagcgggagctagagctccaaaaattatgggacgataatcaggttctgaaaagggtttctgaggaacactgggtgatcttcacatgggccatgcgctcaataaaatcctcaaggattttataaatcgctacaagctgcttcagaatcataaagtgtcctttgttcctggttgggattgccacggccttctaatagaactaaaaggtggcttgtgcgaacgaggcgtggcaatcgatgagcagtggcaaacccaaaaatcttcaaaagcctaggcaaaagtagtaactaaagatacatcaccttgtccagtttttctgcttttacttcgactatatgtcattgtgccacaaaaaacttgtttcatcgacttatgatgagtcttctcaattgtttcttgaatatgcttttttagaaccaaattgaattttacaaggtgcaatattgattagaaaaaggtgtgatgctgactgggaaagcgctactcccttgtatgaattagctggtcgatgattttgtttcccatcctttttaatttcttgacatccgtttgttcattggggagcacatatgtagaatgatgattaatgtttttaaatattaatagattttatcataatatattgccgccgtaacaacgtacgggcatacaactagtcattgaagaagtcaaaaagatgagagaagcacggtaagagacagagagacaccatgagaagttctttgagttcgaaaagtgtaagcttgagatggaacagactaaacttgaattggagcgagattggcaggacaaag

SEQ ID NO: 23908 - DNA, 1393 bp, Zea Mays
catcagtattctacaatgatcaatacagatcattgatccctttcatgtcatggtctattcaaaaggaaaatccacttctgagattaacagttgagaactgtgagttgtccagtattggtgtgattatacttctggactgcctcacaaatgcgaagcaactccttgatgtgctatctattgcagacaatcatctagggagtcctgtggcagctgcattggccagattcttgggttcacatgtacgagctttaaatgctacagatatcggcttgggaacagtaggcttccaaatacttgaggaaacattgccaacagaagtagctctttcccacatcaacatcaggaggattggcctgctggtggacaaggaggcccccgccctggtcctggtgctgctgctacagctccagcaccagcaccggttgctgctcgcccataggctttagcttttcgaccgtgttgaaagtcttctgcccacgcagtttcggagttgtcgcctatgggtgaaaaacaagaagatggaaaatacaagcactctgtggatctcccgaaaacaacatttgagctgagagcgaattctgtacagcgggagctagagctccaaaaattatgggacgataatcaggttctgaaaagggtttctgaggaacactggggtgagttgatatattcaatgatcttcacatgggccatgcgctcaataaaatcctcaaggattttataaatcgctacaagctgcttcagaatcataaagtgtcctttgttcctggttgggattgccacggccttctaatagaactaaaaggtggcttgtgcgaacgaggcgtggcaatcgatgagcagtggcaaacccaaaaatcttcaaaagcctaggcaaaagtagtaactaaagatacatcaccttgtccagtttttctgcttttacttcgactatatgtcattgtgccacaaaaaacttgtttcatcgacttatgatgagtcttctcaattgtttcttgaatatgcttttttagaaccaaattgaattttacaaggtgcaatattgattagaaaaaggtgtgatgctgactgggaaagcgctactcccttgtatgaattagctggtcgatgattttgtttcccatcctttttaatttcttgacatccgtttgttcattggggagcacatatgtagaatgatgattaatgtttttaaatattaatagattttatcataatatattgccgccgtaacaacgtacgggcatacaactagtcattgaagaagtcaaaaagatgagagaagcacggtaagagacagagagacaccatgagaagttctttgagttcgaaaagtgtaagcttgagatggaacagactaaacttgaattggagcgagattggcaggacaaag

SEQ ID NO: 23909 - DNA, 1585 bp, Zea Mays
atacggtactagctgacttaacagaatatccatcagtattctacaatgatcaatacagatcattgatccctttcatgtcatggtctattcaaaaggaaaatccacttctgagattaacagttgagaactgtgagttgtccagtattggtgtgattatacttctggactgcctcacaaatgcgaagcaactccttgatgtgctatctattgcagacaatcatctagggagtcctgtggcagctgcattggccagattcttgggttcacatgtacgagctttaaatgctacagatatcggcttgggaacagtaggcttccaaatacttgaggaaacattgccaacagaagtagctctttcccacatcaacatcaggaggattggcctgctggtggacaaggaggcccccgccctggtcctggtgctgctgctacagctccagcaccagcaccggttgctgctcgcccataggctttagcttttcgaccgtgttgaaagtcttctgcccacgcagtttcggagttgtcgcctatgggtgaaaaacaagaagatggaaaatacaagcactctgtggatctcccgaaaacaacatttgagctgagagcgaattctgtacagcgggagctagagctccaaaaattatgggacgataatcaggttctgaaaagggtttctgaggaacactgggtgatcttcacatgggccatgcgctcaataaaatcctcaaggattttataaatcgctacaagctgcttcagaatcataaagtgtcctttgttcctggttgggattgccacggccttctaatagaactaaaaggcaagttcatttgtacaaaggtctatattctatttgttgcccaagtcttatctgcattactaaatgctattcacgtttgctattttaaaaattgaattttgagaatcttcatgtatttagaggttgtatttgtatatgatgctaatctccttattgtcgcacatgttcacgctggagaaggtggcttgtgcgaacgaggcgtggcaatcgatgagcagtggcaaacccaaaaatcttcaaaagcctaggcaaaagtagtaactaaagatacatcaccttgtccagtttttctgcttttacttcgactatatgtcattgtgccacaaaaaacttgtttcatcgacttatgatgagtcttctcaattgtttcttgaatatgcttttttagaaccaaattgaattttacaaggtgcaatattgattagaaaaaggtgtgatgctgactgggaaagcgctactcccttgtatgaattagctggtcgatgattttgtttcccatcctttttaatttcttgacatccgtttgttcattggggagcacatatgtagaatgatgattaatgtttttaaatattaatagattttatcataatatattgccgccgtaacaacgtacgggcatacaactagtcattgaagaagtcaaaaagatgagagaagcacggtaagagacagagagacaccatgagaagttctttgagttcgaaaagtgtaagcttgagatggaacagactaaacttgaattggagcgagattggcaggacaaag

SEQ ID NO: 23910 - DNA, 1509 bp, Zea Mays
agaagctccgtccaggataaacgatgctccataaattatgaagcagatgcccccgccacctaaggatttggagattgctatagtatcattgatccctttcatgtcatggtctattcaaaaggaaaatccacttctgagattaacagttgagaactgtgagttgtccagtattggtgtgattatacttctggactgcctcacaaatgcgaagcaactccttgatgtgctatctattgcagacaatcatctagggagtcctgtggcagctgcattggccagattcttgggttcacatgtacgagctttaaatgctacagatatcggcttgggaacagtaggcttccaaatacttgaggaaacattgccaacagaagtagctctttcccacatcaacatcaggaggattggcctgctggtggacaaggaggcccccgccctggtcctggtgctgctgctacagctccagcaccagcaccggttgctgctcgcccataggctttagcttttcgaccgtgttgaaagtcttctgcccacgcagtttcggagttgtcgcctatgggtgaaaaacaagaagatggaaaatacaagcactctgtggatctcccgaaaacaacatttgagctgagagcgaattctgtacagcgggagctagagctccaaaaattatgggacgataatcaggttctgaaaagggtttctgaggaacactgggtgatcttcacatgggccatgcgctcaataaaatcctcaaggattttataaatcgctacaagctgcttcagaatcataaagtgtcctttgttcctggttgggattgccacggccttctaatagaactaaaaggcaagttcatttgtacaaaggttgtatttgtatatgatgctaatctccttattgtcgcacatgttcacgctggagaaggtggcttgtgcgaacgaggcgtggcaatcgatgagcagtggcaaacccaaaaatcttcaaaagcctaggcaaaagtagtaactaaagatacatcaccttgtccagtttttctgcttttacttcgactatatgtcattgtgccacaaaaaacttgtttcatcgacttatgatgagtcttctcaattgtttcttgaatatgcttttttagaaccaaattgaattttacaaggtgcaatattgattagaaaaaggtgtgatgctgactgggaaagcgctactcccttgtatgaattagctggtcgatgattttgtttcccatcctttttaatttcttgacatccgtttgttcattggggagcacatatgtagaatgatgattaatgtttttaaatattaatagattttatcataatatattgccgccgtaacaacgtacgggcatacaactagtcattgaagaagtcaaaaagatgagagaagcacggtaagagacagagagacaccatgagaagttctttgagttcgaaaagtgtaagcttgagatggaacagactaaacttgaattggagcgagattggcaggacaaag

SEQ ID NO: 23911 - DNA, 1687 bp, Zea Mays
tggatgctgtttttggctgagttagaagccccgtgcaggtccgctcaggcttcttatgtttcagattctcctgcaaccgtttggtgttgttttggctgagttagaagctccgtccaggataaacgatgctccataaattatgaagcagatgcccccgccacctaaggatttggagattgctatagttcggagctcgagctgcccttcgatcgaaccaagaacaaccctgctgccctcacaacatcaaagtttggtatcagcaagatggagcttctcaaggcatgcttttgtagggagtgactgctgatgtagaggaactcatggatgaagatcattgatccctttcatgtcatggtctattcaaaaggaaaatccacttctgagattaacagttgagaactgtgagttgtccagtattggtgtgattatacttctggactgcctcacaaatgcgaagcaactccttgatgtgctatctattgcagacaatcatctagggagtcctgtggcagctgcattggccagattcttgggttcacatgtacgagctttaaatgctacagatatcggcttgggaacagtaggcttccaaatacttgaggaaacattgccaacagaagtagctctttcccacatcaacatcaggaggattggcctgctggtggacaaggaggcccccgccctggtcctggtgctgctgctacagctccagcaccagcaccggttgctgctcgcccataggctttagcttttcgaccgtgttgaaagtcttctgcccacgcagtttcggagttgtcgcctatgggtgaaaaacaagaagatggaaaatacaagcactctgtggatctcccgaaaacaacatttgagctgagagcgaattctgtacagcgggagctagagctccaaaaattatgggacgataatcagactgcttttgttctccacgatgtccctccctatgctaatagtgatcttcacatgggccatgcgctcaataaaatcctcaaggattttataaatcgctacaagctgcttcagaatcataaagtgtcctttgttcctggttgggattgccacggccttctaatagaactaaaaggtggcttgtgcgaacgaggcgtggcaatcgatgagcagtggcaaacccaaaaatcttcaaaagcctaggcaaaagtagtaactaaagatacatcaccttgtccagtttttctgcttttacttcgactatatgtcattgtgccacaaaaaacttgtttcatcgacttatgatgagtcttctcaattgtttcttgaatatgcttttttagaaccaaattgaattttacaaggtgcaatattgattagaaaaaggtgtgatgctgactgggaaagcgctactcccttgtatgaattagctggtcgatgattttgtttcccatcctttttaatttcttgacatccgtttgttcattggggagcacatatgtagaatgatgattaatgtttttaaatattaatagattttatcataatatattgccgccgtaacaacgtacgggcatacaactagtcattgaagaagtcaaaaagatgagagaagcacggtaagagacagagagacaccatgagaagttctttgagttcgaaaagtgtaagcttgagatggaacagactaaacttgaattggagcgagattggcaggacaaag

SEQ ID NO: 23912 - DNA, 1773 bp, Zea Mays
tggatgctgtttttggctgagttagaagccccgtgcaggtccgctcaggcttcttatgtttcagattctcctgcaaccgtttggtgttgttttggctgagttagaagctccgtccaggataaacgatgctccataaattatgaagcagatgcccccgccacctaaggatttggagattgctatagttcggagctcgagctgcccttcgatcgaaccaagaacaaccctgctgccctcacaacatcaaagtttggtatcagcaagatggagcttctcaaggcatgcttttgtagggagtgactgctgatgtagaggaactcatggatgaagatcattgatccctttcatgtcatggtctattcaaaaggaaaatccacttctgagattaacagttgagaactgtgagttgtccagtattggtgtgattatacttctggactgcctcacaaatgcgaagcaactccttgatgtgctatctattgcagacaatcatctagggagtcctgtggcagctgcattggccagattcttgggttcacatgtacgagctttaaatgctacagatatcggcttgggaacagtaggcttccaaatacttgaggaaacattgccaacagaagtagctctttcccacatcaacatcaggaggattggcctgctggtggacaaggaggcccccgccctggtcctggtgctgctgctacagctccagcaccagcaccggttgctgctcgcccataggctttagcttttcgaccgtgttgaaagtcttctgcccacgcagtttcggagttgtcgcctatgggtgaaaaacaagaagatggaaaatacaagcactctgtggatctcccgaaaacaacatttgagctgagagcgaattctgtacagcgggagctagagctccaaaaattatgggacgataatcaggttctgaaaagggtttctgaggaacactggggtgagttgatatattcaatgatcttcacatgggccatgcgctcaataaaatcctcaaggattttataaatcgctacaagctgcttcagaatcataaagtgtcctttgttcctggttgggattgccacggccttctaatagaactaaaaggcaagttcatttgtacaaaggttgtatttgtatatgatgctaatctccttattgtcgcacatgttcacgctggagaaggtggcttgtgcgaacgaggcgtggcaatcgatgagcagtggcaaacccaaaaatcttcaaaagcctaggcaaaagtagtaactaaagatacatcaccttgtccagtttttctgcttttacttcgactatatgtcattgtgccacaaaaaacttgtttcatcgacttatgatgagtcttctcaattgtttcttgaatatgcttttttagaaccaaattgaattttacaaggtgcaatattgattagaaaaaggtgtgatgctgactgggaaagcgctactcccttgtatgaattagctggtcgatgattttgtttcccatcctttttaatttcttgacatccgtttgttcattggggagcacatatgtagaatgatgattaatgtttttaaatattaatagattttatcataatatattgccgccgtaacaacgtacgggcatacaactagtcattgaagaagtcaaaaagatgagagaagcacggtaagagacagagagacaccatgagaagttctttgagttcgaaaagtgtaagcttgagatggaacagactaaacttgaattggagcgagattggcaggacaaag

SEQ ID NO: 23913 - DNA, 2910 bp, Zea Mays
gagcaactaaataacattaaatatagggcattatatggtataactataaccaaattgactcaggtaacatgctaacaaaggcaaaggctacctgtgaccaatcaacccttccatccttagtagcaggaatatctttgagtagagaaccaccttcagcgctatttgaaagctatattatagaagtggacaaaaatattaaacgtattcaaaccagaatgcaacaagaaaaaccaaggagcaagaaggcaaaatggatggctacataaaggaaaagttgcggaaagaccgatgccacaagtaatcatgaacttagttatattcttatacatatatgcattaaaacacatatggataatgactgaaagattctgatatgactgttatagtatagtttcaatgattacatttacaattctcctgcttgcaacctgatgatgataaattgatacttctatgacttccatacatcagaatatcagatacctgataggcacaactttgaggaagttctataaggctataagcaatattggtaaaaaaaattgcaacatgtccactccaaaaatgatacagctgtattgagaagcttatcaggttgtatggtttctaattcagagaatacactctgatcgaaatatttgggtaaacacagagatgggcatagattcagtttaacatagatgaacagaacattttctatgcagcaaccaaattctaatagtgtaagtagtctatctaaagaaacatattgaagaaaaactaaccaaagtagtcacgtaaaactgctccccagctccttcacaatctgaggcagtaataattgggctcgaaacccaaacaaatccattgtcttgaaaagaatttatgagttgcgtatgccagagtatttctcactcttgcaacctaaatagcacacatatccagttccagtaagcaaatccacaagagaagcttgcataattactgaacaagaaaacttaggataaaacaataataatgttctgcttaccacagcagcagcagcgaagtattttattgtaagcaagctggggtattttattttattgtttttcaagaataaatcttagatatatccttcttcttttattgcttatttccgtatcaacttcagttttatcttcatctttttctattgttatcacgccttaaaatcctactatgcttcttcagcttggctcagtctgcttatatttcagattatcttgcaataattggatgctgtttttggctgagttagaagccccgtgcaggtccgctcaggcttcttatgtttcagattctcctgcaaccgtttggtgttgttttggctgagttagaagctccgtccaggataaacgatgctccataaattatgaagcagatgcccccgccacctaaggatttggagattgctatagttcggagctcgagctgcccttcgatcgaaccaagaacaaccctgctgccctcacaacatcaaagtttggtatcagcaagatggagcttctcaaggcatgcttttgtagggagtgactgctgatgtagaggaactcatggatgaagatcattgatccctttcatgtcatggtctattcaaaaggaaaatccacttctgagattaacagttgagaactgtgagttgtccagtattggtgtgattatacttctggactgcctcacaaatgcgaagcaactccttgatgtgctatctattgcagacaatcatctagggagtcctgtggcagctgcattggccagattcttgggttcacatgtacgagctttaaatgctacagatatcggcttgggaacagtaggcttccaaatacttgaggaaacattgccaacagaagtagctctttcccacatcaacatcaggaggattggcctgctggtggacaaggaggcccccgccctggtcctggtgctgctgctacagctccagcaccagcaccggttgctgctcgcccataggctttagcttttcgaccgtgttgaaagtcttctgcccacgcagtttcggagttgtcgcctatgggtgaaaaacaagaagatggaaaatacaagcactctgtggatctcccgaaaacaacatttgagctgagagcgaattctgtacagcgggagctagagctccaaaaattatgggacgataatcaggttctgaaaagggtttctgaggaacactgggtgatcttcacatgggccatgcgctcaataaaatcctcaaggattttataaatcgctacaagctgcttcagaatcataaagtgtcctttgttcctggttgggattgccacggccttctaatagaactaaaaggtggcttgtgcgaacgaggcgtggcaatcgatgagcagtggcaaacccaaaaatcttcaaaagcctaggcaaaagtagtaactaaagatacatcaccttgtccagtttttctgcttttacttcgactatatgtcattgtgccacaaaaaacttgtttcatcgacttatgatgagtcttctcaattgtttcttgaatatgcttttttagaaccaaattgaattttacaaggtgcaatattgattagaaaaaggtgtgatgctgactgggaaagcgctactcccttgtatgaattagctggtcgatgattttgtttcccatcctttttaatttcttgacatccgtttgttcattggggagcacatatgtagaatgatgattaatgtttttaaatattaatagattttatcataatatattgccgccgtaacaacgtacgggcatacaactagtcattgaagaagtcaaaaagatgagagaagcacggtaagagacagagagacaccatgagaagttctttgagttcgaaaagtgtaagcttgagatggaacagactaaacttgaattggagcgagattggcaggacaaag

SEQ ID NO: 23914 - DNA, 2988 bp, Zea Mays
gagcaactaaataacattaaatatagggcattatatggtataactataaccaaattgactcaggtaacatgctaacaaaggcaaaggctacctgtgaccaatcaacccttccatccttagtagcaggaatatctttgagtagagaaccaccttcagcgctatttgaaagctatattatagaagtggacaaaaatattaaacgtattcaaaccagaatgcaacaagaaaaaccaaggagcaagaaggcaaaatggatggctacataaaggaaaagttgcggaaagaccgatgccacaagtaatcatgaacttagttatattcttatacatatatgcattaaaacacatatggataatgactgaaagattctgatatgactgttatagtatagtttcaatgattacatttacaattctcctgcttgcaacctgatgatgataaattgatacttctatgacttccatacatcagaatatcagatacctgataggcacaactttgaggaagttctataaggctataagcaatattggtaaaaaaaattgcaacatgtccactccaaaaatgatacagctgtattgagaagcttatcaggttgtatggtttctaattcagagaatacactctgatcgaaatatttgggtaaacacagagatgggcatagattcagtttaacatagatgaacagaacattttctatgcagcaaccaaattctaatagtgtaagtagtctatctaaagaaacatattgaagaaaaactaaccaaagtagtcacgtaaaactgctccccagctccttcacaatctgaggcagtaataattgggctcgaaacccaaacaaatccattgtcttgaaaagaatttatgagttgcgtatgccagagtatttctcactcttgcaacctaaatagcacacatatccagttccagtaagcaaatccacaagagaagcttgcataattactgaacaagaaaacttaggataaaacaataataatgttctgcttaccacagcagcagcagcgaagtattttattgtaagcaagctggggtattttattttattgtttttcaagaataaatcttagatatatccttcttcttttattgcttatttccgtatcaacttcagttttatcttcatctttttctattgttatcacgccttaaaatcctactatgcttcttcagcttggctcagtctgcttatatttcagattatcttgcaataattggatgctgtttttggctgagttagaagccccgtgcaggtccgctcaggcttcttatgtttcagattctcctgcaaccgtttggtgttgttttggctgagttagaagctccgtccaggataaacgatgctccataaattatgaagcagatgcccccgccacctaaggatttggagattgctatagttcggagctcgagctgcccttcgatcgaaccaagaacaaccctgctgccctcacaacatcaaagtttggtatcagcaagatggagcttctcaaggcatgcttttgtagggagtgactgctgatgtagaggaactcatggatgaagatcattgatccctttcatgtcatggtctattcaaaaggaaaatccacttctgagattaacagttgagaactgtgagttgtccagtattggtgtgattatacttctggactgcctcacaaatgcgaagcaactccttgatgtgctatctattgcagacaatcatctagggagtcctgtggcagctgcattggccagattcttgggttcacatgtacgagctttaaatgctacagatatcggcttgggaacagtaggcttccaaatacttgaggaaacattgccaacagaagtagctctttcccacatcaacatcaggaggattggcctgctggtggacaaggaggcccccgccctggtcctggtgctgctgctacagctccagcaccagcaccggttgctgctcgcccataggctttagcttttcgaccgtgttgaaagtcttctgcccacgcagtttcggagttgtcgcctatgggtgaaaaacaagaagatggaaaatacaagcactctgtggatctcccgaaaacaacatttgagctgagagcgaattctgtacagcgggagctagagctccaaaaattatgggacgataatcaggttctgaaaagggtttctgaggaacactgggtgatcttcacatgggccatgcgctcaataaaatcctcaaggattttataaatcgctacaagctgcttcagaatcataaagtgtcctttgttcctggttgggattgccacggccttctaatagaactaaaaggcaagttcatttgtacaaaggttgtatttgtatatgatgctaatctccttattgtcgcacatgttcacgctggagaaggtggcttgtgcgaacgaggcgtggcaatcgatgagcagtggcaaacccaaaaatcttcaaaagcctaggcaaaagtagtaactaaagatacatcaccttgtccagtttttctgcttttacttcgactatatgtcattgtgccacaaaaaacttgtttcatcgacttatgatgagtcttctcaattgtttcttgaatatgcttttttagaaccaaattgaattttacaaggtgcaatattgattagaaaaaggtgtgatgctgactgggaaagcgctactcccttgtatgaattagctggtcgatgattttgtttcccatcctttttaatttcttgacatccgtttgttcattggggagcacatatgtagaatgatgattaatgtttttaaatattaatagattttatcataatatattgccgccgtaacaacgtacgggcatacaactagtcattgaagaagtcaaaaagatgagagaagcacggtaagagacagagagacaccatgagaagttctttgagttcgaaaagtgtaagcttgagatggaacagactaaacttgaattggagcgagattggcaggacaaag

SEQ ID NO: 23915 - DNA, 2831 bp, Zea Mays
gagcaactaaataacattaaatatagggcattatatggtataactataaccaaattgactcaggtaacatgctaacaaaggcaaaggctacctgtgaccaatcaacccttccatccttagtagcaggaatatctttgagtagagaaccaccttcagcgctatttgaaagctatattatagaagtggacaaaaatattaaacgtattcaaaccagaatgcaacaagaaaaaccaaggagcaagaaggcaaaatggatggctacataaaggaaaagttgcggaaagaccgatgccacaagtaatcatgaacttagttatattcttatacatatatgcattaaaacacatatggataatgactgaaagattctgatatgactgttatagtatagtttcaatgattacatttacaattctcctgcttgcaacctgatgatgataaattgatacttctatgacttccatacatcagaatatcagatacctgataggcacaactttgaggaagttctataaggctataagcaatattggtaaaaaaaattgcaacatgtccactccaaaaatgatacagctgtattgagaagcttatcaggttgtatggtttctaattcagagaatacactctgatcgaaatatttgggtaaacacagagatgggcatagattcagtttaacatagatgaacagaacattttctatgcagcaaccaaattctaatagtgtaagtagtctatctaaagaaacatattgaagaaaaactaaccaaagtagtcacgtaaaactgctccccagctccttcacaatctgaggcagtaataattgggctcgaaacccaaacaaatccattgtcttgaaaagaatttatgagttgcgtatgccagagtatttctcactcttgcaacctaaatagcacacatatccagttccagtaagcaaatccacaagagaagcttgcataattactgaacaagaaaacttaggataaaacaataataatgttctgcttaccacagcagcagcagcgaagtattttattgtaagcaagctggggtattttattttattgtttttcaagaataaatcttagatatatccttcttcttttattgcttatttccgtatcaacttcagttttatcttcatctttttctattgttatcacgccttaaaatcctactatgcttcttcagcttggctcagtctgcttatatttcagattatcttgcaataattggatgctgtttttggctgagttagaagccccgtgcaggataaacgatgctccataaattatgaagcagatgcccccgccacctaaggatttggagattgctatagttcggagctcgagctgcccttcgatcgaaccaagaacaaccctgctgccctcacaacatcaaagtttggtatcagcaagatggagcttctcaaggcatgcttttgtagggagtgactgctgatgtagaggaactcatggatgaagatcattgatccctttcatgtcatggtctattcaaaaggaaaatccacttctgagattaacagttgagaactgtgagttgtccagtattggtgtgattatacttctggactgcctcacaaatgcgaagcaactccttgatgtgctatctattgcagacaatcatctagggagtcctgtggcagctgcattggccagattcttgggttcacatgtacgagctttaaatgctacagatatcggcttgggaacagtaggcttccaaatacttgaggaaacattgccaacagaagtagctctttcccacatcaacatcaggaggattggcctgctggtggacaaggaggcccccgccctggtcctggtgctgctgctacagctccagcaccagcaccggttgctgctcgcccataggctttagcttttcgaccgtgttgaaagtcttctgcccacgcagtttcggagttgtcgcctatgggtgaaaaacaagaagatggaaaatacaagcactctgtggatctcccgaaaacaacatttgagctgagagcgaattctgtacagcgggagctagagctccaaaaattatgggacgataatcaggttctgaaaagggtttctgaggaacactgggtgatcttcacatgggccatgcgctcaataaaatcctcaaggattttataaatcgctacaagctgcttcagaatcataaagtgtcctttgttcctggttgggattgccacggccttctaatagaactaaaaggtggcttgtgcgaacgaggcgtggcaatcgatgagcagtggcaaacccaaaaatcttcaaaagcctaggcaaaagtagtaactaaagatacatcaccttgtccagtttttctgcttttacttcgactatatgtcattgtgccacaaaaaacttgtttcatcgacttatgatgagtcttctcaattgtttcttgaatatgcttttttagaaccaaattgaattttacaaggtgcaatattgattagaaaaaggtgtgatgctgactgggaaagcgctactcccttgtatgaattagctggtcgatgattttgtttcccatcctttttaatttcttgacatccgtttgttcattggggagcacatatgtagaatgatgattaatgtttttaaatattaatagattttatcataatatattgccgccgtaacaacgtacgggcatacaactagtcattgaagaagtcaaaaagatgagagaagcacggtaagagacagagagacaccatgagaagttctttgagttcgaaaagtgtaagcttgagatggaacagactaaacttgaattggagcgagattggcaggacaaag

SEQ ID NO: 23916 - DNA, 1263 bp, Zea Mays
cccgtccgtccgcggttcctctccccattccccaacgttcctcgctccagagcgtttcaaacggtaaggaagccacccccgctgtgaggttacttaaggcacggtgacccgacgcgagcaaagctccaagacccgcacgcgaacgccctccctgccgctccgccgtttcgcgtgggagtcgtttcgaaaaagtctgtttcgcgagcggtgaggactgaggagtgtggaggcctaaaaccatggcggcgagcatcgggatcatggacggcgcctacttcgtcggcaggggcgagatcctgcactggatcaatgcgaccctccagctctccctcgccaaggtcgaggaggtcaatttcgatgcgaagacagaatatgacatgatccagaactacaaggttcttcaggacgtgttcaacaagctgcggataggcaagaatattgaggtcaacaagcttgttaaaggacggccattggacaacttggagttccttcagtggttgaaaagatattgtgattctgtgaatggtggaattatgaacgaaaactacaaccctgtagaaaggaggtcaaagggatgcaaagaacgtgtctcaaagggttccaataagccatctaaatcattgcaagccaataggctttctggtgctgatccaacagatggaggccatggagttgggaaagtatgtaacactttttctgaagagcattacatagaacagattcagaagttgtctgaaaagattgcagacctgaaagtttctgtcgatagtactgaaaaagaaagagacttctacttctcgaagttgcgtgatattgagatactgtgtcaacggcctgagttagagcatctaccgatgactaaggcggtccggaagatactttatgcagctgatgcaaaggattcaccgctacctgaggcgaatgatataatcacaaagtcaccaagcttgttctcaaatgaaaccgagtgagatgtgcggctacatgagctaattttggtgcttattttccatcattgatcgtcttagttttgagtctgtaaatgcgtaaaataacatttgacacaagtctttttgctgtcaaaaacagttttcctgtaagaacttgagtggggttaattagttattacgcattcatgcttgatgtgactgtccctgtatggttcctctggagaatatagggtctgttcacttgactaatctgtaccggcgtctactacttttacagtgtttttgtctcaatggattgcagttgcaacagtct

SEQ ID NO: 23917 - DNA, 4669 bp, Zea Mays
gaacaatgaagatctgctgatgatggtattcattgctcaagagcaaagatgtctaaggaggctttggattagtgaccgaccttgctggactatctcttttatgtctgaaatcaagcgtagacgtatatatattaaactagttgaatctacaaggagtgaagatttcagtgagagcaaaatcattaccatttcctttttgtatgcgacaatgccagtttggttgttgttctttgcacttggaatatcatcagataaggaagtgtttgatatgatagatatgcaagattgtgatgcttctgttatcaacacgatatctgcaactatcaaagaatctgataaactgtgtgaagacttccgtaaatcagataaagctcgtcaatatgttgatgagttggtaaaaagttcgagatttcctccagcggagtcctttgatgactatattgctaggtttctctttcctgatattagtggaaatagaaacaaagcacttttcttagggtacatggttaaatgtctgctaatggcttttactgggaagcgtaaatgtgataataaggatgatttcaggaacaaaaggctggacctacctggtgaattgcttggaagggaacttagggcacagcttaggctggcagagaaacgcatggttaaggccatccaaagagatttgaatagtgaccagctgaacgatgctcaggaattgttgcgactctaaggagaactaatcctcttcaaatgatgtctgacttgaggaaaacccggcagcgggttgcttacgctgggaaagctggtgatgcaagatatccgaatccatcctattggggaaagctatgctttatgtccactccggatggtgaaaactgtggacttgtaaaaaatctagctgttactgctattgttagctcaagggtgatgcagcccttgattgagagcttcatttcttgtggaatgagtaagctgaatgacattcctactgaacacattcaaagaatggataagatctttttgaatggcaattgggtgggatcttgtgaaaattcagcttcatttgtatttcgattgaggtgcatgagacgcagcagtctgattgatcctcaggttgaaattaaaagggacaagcaccacaatgaggttcgcgtgtttactgatgcagggcgaatcctcagaccccttcttgtggttgagaatctgaataaaatcagaaaacctaaggggcgctcattctctttccatgaattaatgcaacaagaaataattgagttcattggtgttgaagaggaggaagatatacaatgtgcgtggggaatcaggcatttgtttgagagtgaaggtgcgatatctagttatactcactgtgaactggatccttcctttcttctgggattaagctgtggtatcattccttttgcaaaccacaattttgctcggagggtattgtaccaatctgaaaaacactcgcaacaagctattgggtactcaacgacaaatccacacatcagagttgatactctttctcatcaactatattatcctcagaggcctcttttcaaaacagttatagccgactgtcttggcagatcagattatgcttcttttggaagaaaaaatgatttcgcgagaccagaatattttaatggacaaaatgcaattgtagcagtcaatgttcatcaggggtttaaccaagaggattccctggttatgaatagggcttctcttgaacgaggtatgtttaggactgaacacctcaggagctataaggcagatgtagaaaacaaggatggaaccaaacgactgaaattgaaggaaaaaatagactttggaaaaacagaaagcaaaagaggacgtgttgacaatcttgatgatgatggcttaccttacgttggtgcaagtcttcagaccaatgacattgttattggcaaagtctcagaatctggagaagaccacagtattaagctgaagcatacagaaaagggaatggttcagaaagtattgctttcagcaaatgatgaagggaagaattttgctgtggttactctaagacaggttcggacaccttgccttggagataagttttccagcatgcatggccaaaaaggtgttgttggttttctagaatctcaagagaacttcccatttactcacgaaggtatagtcccggatattgtgataaatccacatgccttcccaacacgtcaaactcccggacagctgcttgaagctgctctggggaagggaatagcttgcaaaggtacaatgagatatgcaacaccattcaccacagcatcagttgacgttattgcagaacagttgcacaggtaagtgtttcttctaacggatgaatagctgcttgccttaattcagtaacccaccccttgcacatgaaacgaagatctgagaccctttcaaagggttgggcattttttagcctcttctaggtgaactttgtaattgttaagcttattaatacatcttataagaaccttggacgtcattaatgcaccctatgctctcaagtcttaactctgttagtactttactgcttattacacatacagaagaagaaaagggaaaggtagggaaacaatgtacacagagagagagaacagaatggctggtggccatcctcatattttgtatatgagtaaacatgtatcagtaatttcacatgtatctttttgtcatattttgcaccaaaatggtggaaacacacgagtttccttcccgtttcccttttacttgtattactatcagttgctgcttatctaacggagacatccatattggtaccgctaaatataaaactgagtgcactcacacactactatgttctcagtgaggatcttacttcagataatcaagtgatgtatctgattttttttgtgtgtgtttagacttgttttcgtctgtgacttgtttagttaattttcaagattttatgtatcttgttgcattgcagggctggttattcacgatggggatctgagaacgttctaaatgggcgaacaggtgaaagagtgcaatccttggttttcatgggccctaccttttaccagaggctgattcatatgtccgaagataaggtgaaattccgtaacactgggccggtgcaccccctcacgaggcagcctgttgccgacaggaaaaggtttggtggagttaagtttggagaaatggagcgtgactgcctcctcgcccatgggtcagctgccaacctgcatgaacgcctcttcctgcttagtgacttctcccagatgcacatctgccagacatgcgagcgcgtggctaatgttgtcatgaggtctgtccccggaggcaagaagatccgtggcccctactgcggcttctgcaagtcttcggagaacatagtgagaatcaatgtgccctatggcgcgaagctgctctaccaggaactcttcagcatggggatctgcctcaagtttgagacccaagtctgctagaacttgtagacctgcttgcatccagttattacatatgtacatacagctagcctatgaggatctccaagctggtgtgccggtgtgtgatgctggcatagtaaggatgggcgagctagaaaccctgttgtgtttatgtgctgttttctccctgctcatgtggtaaactatgctaaagtgaatgaacactcgtttcctgttccctctttgaatgcgctgtgttagcatgcccttttgtttgaagattgcgtcttttgtggagcaccttgtattgctccgtagggatcacaccccttaccgccggcgatggccgacgatttgagataagatataatatttctggtcgtccttgttaaagagttcatgcatatacagtacacaagaaatgtcgatcgaatatagctagtaaaacaacttcaagaaacatgtacatgcggttggatggatcctttctcatcgatgatttgtctgcattgattcatccaaatcaagatacaagaggcagcatgagatgatctgtctgtgtctgcattgatccaaatcaagacacaatagagggacagcatgaggacgaacagagacaaatccatcgccccgtgcttgagtttctccacgagctagtaagagatcagcaagatcctctctagctaactacctgagggaaacgaacagcaggggaggaccaagaagtgatgagtgggggaactccatgcgagccctctggcctctcctcccacaggctacatcttgaggacgaagaagaacagtcctcgatgcgtcttcacctagctgctgcttaatttacgagtgatgctcttcgatccaaaggtacttatactacaaatacccctccccctctctctctctgtctccatcgccccaatgcaaagccggtctttctatagctcatagctgctggaatttggacctggctttgaaacatgtcgtgcactcgcgttgggtttgaaagagatgacttgcgttgcagcgagcgagcgacacaggtcaggtcacactgcaggggggaagcgaagcacgagtgtacatgcattgaacctggacgccctctttagcttttgcgtttgggcatacagtatttttattttggccttctgggatttgggaatacgagtcatcgattccctcagtgtcgtcccgtcacagctttttttttccgttgcctttatgctgcatgcccattcagcagtcacgca

SEQ ID NO: 23918 - DNA, 4398 bp, Zea Mays
gtgatacttgataggctataagctgctagtgcttgtggaatggaagagccacagaaggacagtgggcaaccatcaaaaagttctgattctgagctagaagctatggtattggatgataatggagcgggaaaatcccatagtatggaggaaaacagggattctcctatagatgtcgatggtgggcagtcatctatggatgtggatatcaagggaaaatcatccctcagtgatgatgttaatggaaagtcttcttccgagccatattccaatgctccaattgacatgagtgtcgaaagcctagagaagttttgcaaagaagcgtcaaggtccttctttgatgaagttggtctgattagccatcagataaattcctacaatgagtttgtctcgcatgggctccaggagctttttgattcgcttggggaagtgattgttgaacctggctatgatccttcgaagaaaggatcaggtggctggaagcatgccatcatcaagtttgggagagtgaagcttgaaaagcctgtgttttggactggcaaggatgaaggttctgttgattttaaaccttggcatgctcgtctccagaatatgacatatgcttcaagacttatagtagaagtgactattcaggtttattctttggagaaaagtgacaaatctaaaacagggaatgatggttttgttcaaaaaaggaacttcatgaatgaaactcattggatatttattggcctccttccggttatggtcaaatcaaacttatgtttgctgcatagcctcaacgaaagtgagtgcctgttcgacgcaggtggatactttttggtcaagggaatggagaaggaacaaaaggctggacctacctggtgaattgcttggaagggaacttagggcacagcttaggctggcagagaaacgcatggttaaggccatccaaagagatttgaatagtgaccgtgagttacaagatcttgaacgttatatagatgcatcaattgttactaatggtctaaatcgtgccttttccactggttcttggtgccatccgtacaaaagagctgaacgatgctcaggaattgttgcgactctaaggagaactaatcctcttcaaatgatgtctgacttgaggaaaacccggcagcgggttgcttacgctgggaaagctggtgatgcaagatatccgaatccatcctattggggaaagctatgctttatgtccactccggatggtgaaaactgtggacttgtaaaaaatctagctgttactgctattgttagctcaagggtgatgcagcccttgattgagagcttcatttcttgtggaatgagtaagctgaatgacattcctactgaacacattcaaagaatggataagatctttttgaatggcaattgggtgggatcttgtgaaaattcagcttcatttgtatttcgattgaggtgcatgagacgcagcagtctgattgatcctcaggttgaaattaaaagggacaagcaccacaatgaggttcgcgtgtttactgatgcagggcgaatcctcagaccccttcttgtggttgagaatctgaataaaatcagaaaacctaaggggcgctcattctctttccatgaattaatgcaacaagaaataattgagttcattggtgttgaagaggaggaagatatacaatgtgcgtggggaatcaggcatttgtttgagagtgaaggtgcgatatctagttatactcactgtgaactggatccttcctttcttctgggattaagctgtggtatcattccttttgcaaaccacaattttgctcggagggtattgtaccaatctgaaaaacactcgcaacaagctattgggtactcaacgacaaatccacacatcagagttgatactctttctcatcaactatattatcctcagaggcctcttttcaaaacagttatagccgactgtcttggcagatcagattatgcttcttttggaagaaaaaatgatttcgcgagaccagaatattttaatggacaaaatgcaattgtagcagtcaatgttcatcaggggtttaaccaagaggattccctggttatgaatagggcttctcttgaacgaggtatgtttaggactgaacacctcaggagctataaggcagatgtagaaaacaaggatggaaccaaacgactgaaattgaaggaaaaaatagactttggaaaaacagaaagcaaaagaggacgtgttgacaatcttgatgatgatggcttaccttacgttggtgcaagtcttcagaccaatgacattgttattggcaaagtctcagaatctggagaagaccacagtattaagctgaagcatacagaaaagggaatggttcagaaagtattgctttcagcaaatgatgaagggaagaattttgctgtggttactctaagacaggttcggacaccttgccttggagataagttttccagcatgcatggccaaaaaggtgttgttggttttctagaatctcaagagaacttcccatttactcacgaaggtatagtcccggatattgtgataaatccacatgccttcccaacacgtcaaactcccggacagctgcttgaagctgctctggggaagggaatagcttgcaaaggtacaatgagatatgcaacaccattcaccacagcatcagttgacgttattgcagaacagttgcacagggctggttattcacgatggggatctgagaacgttctaaatgggcgaacaggtgaaagagtgcaatccttggttttcatgggccctaccttttaccagaggctgattcatatgtccgaagataaggtgaaattccgtaacactgggccggtgcaccccctcacgaggcagcctgttgccgacaggaaaaggtttggtggagttaagtttggagaaatggagcgtgactgcctcctcgcccatgggtcagctgccaacctgcatgaacgcctcttcctgcttagtgacttctcccagatgcacatctgccagacatgcgagcgcgtggctaatgttgtcatgaggtctgtccccggaggcaagaagatccgtggcccctactgcggcttctgcaagtcttcggagaacatagtgagaatcaatgtgccctatggcgcgaagctgctctaccaggaactcttcagcatggggatctgcctcaagtttgagacccaagtctgctagaacttgtagacctgcttgcatccagttattacatatgtacatacagctagcctatgaggatctccaagctggtgtgccggtgtgtgatgctggcatagtaaggatgggcgagctagaaaccctgttgtgtttatgtgctgttttctccctgctcatgtggtaaactatgctaaagtgaatgaacactcgtttcctgttccctctttgaatgcgctgtgttagcatgcccttttgtttgaagattgcgtcttttgtggagcaccttgtattgctccgtagggatcacaccccttaccgccggcgatggccgacgatttgagataagatataatatttctggtcgtccttgttaaagagttcatgcatatacagtacacaagaaatgtcgatcgaatatagctagtaaaacaacttcaagaaacatgtacatgcggttggatggatcctttctcatcgatgatttgtctgcattgattcatccaaatcaagatacaagaggcagcatgagatgatctgtctgtgtctgcattgatccaaatcaagacacaatagagggacagcatgaggacgaacagagacaaatccatcgccccgtgcttgagtttctccacgagctagtaagagatcagcaagatcctctctagctaactacctgagggaaacgaacagcaggggaggaccaagaagtgatgagtgggggaactccatgcgagccctctggcctctcctcccacaggctacatcttgaggacgaagaagaacagtcctcgatgcgtcttcacctagctgctgcttaatttacgagtgatgctcttcgatccaaaggtacttatactacaaatacccctccccctctctctctctgtctccatcgccccaatgcaaagccggtctttctatagctcatagctgctggaatttggacctggctttgaaacatgtcgtgcactcgcgttgggtttgaaagagatgacttgcgttgcagcgagcgagcgacacaggtcaggtcacactgcaggggggaagcgaagcacgagtgtacatgcattgaacctggacgccctctttagcttttgcgtttgggcatacagtatttttattttggccttctgggatttgggaatacgagtcatcgattccctcagtgtcgtcccgtcacagctttttttttccgttgcctttatgctgcatgcccattcagcagtcacgca

SEQ ID NO: 23919 - DNA, 4838 bp, Zea Mays
cacccgccagaggctataagctgctagtgcttgtggaatggaagagccacagaaggacagtgggcaaccatcaaaaagttctgattctgagctagaagctatggtattggatgataatggagcgggaaaatcccatagtatggaggaaaacagggattctcctatagatgtcgatggtgggcagtcatctatggatgtggatatcaagggaaaatcatccctcagtgatgatgttaatggaaagtcttcttccgagccatattccaatgctccaattgacatgagtgtcgaaagcctagagaagttttgcaaagaagcgtcaaggtccttctttgatgaagttggtctgattagccatcagataaattcctacaatgagtttgtctcgcatgggctccaggagctttttgattcgcttggggaagtgattgttgaacctggctatgatccttcgaagaaaggatcaggtggctggaagcatgccatcatcaagtttgggagagtgaagcttgaaaagcctgtgttttggactggcaaggatgaaggttctgttgattttaaaccttggcatgctcgtctccagaatatgacatatgcttcaagacttatagtagaagtgactattcaggtttattctttggagaaaagtgacaaatctaaaacagggaatgatggttttgttcaaaaaaggaacttcatgaatgaaactcattggatatttattggcctccttccggttatggtcaaatcaaacttatgtttgctgcatagcctcaacgaaagtgagtgcctgttcgacgcaggtggatactttttggtcaagggaatggagaaggtattcattgctcaagagcaaagatgtctaaggaggctttggattagtgaccgaccttgctggactatctcttttatgtctgaaatcaagcgtagacgtatatatattaaactagttgaatctacaaggagtgaagatttcagtgagagcaaaatcattaccatttcctttttgtatgcgacaatgccagtttggttgttgttctttgcacttggaatatcatcagataaggaagtgtttgatatgatagatatgcaagattgtgatgcttctgttatcaacacgatatctgcaactatcaaagaatctgataaactgtgtgaagacttccgtaaatcagataaagctcgtcaatatgttgatgagttggtaaaaagttcgagatttcctccagcggagtcctttgatgactatattgctaggtttctctttcctgatattagtggaaatagaaacaaagcacttttcttagggtacatggttaaatgtctgctaatggcttttactgggaagcgtaaatgtgataataaggatgatttcaggaacaaaaggctggacctacctggtgaattgcttggaagggaacttagggcacagcttaggctggcagagaaacgcatggttaaggccatccaaagagatttgaatagtgaccagctgaacgatgctcaggaattgttgcgactctaaggagaactaatcctcttcaaatgatgtctgacttgaggaaaacccggcagcgggttgcttacgctgggaaagctggtgatgcaagatatccgaatccatcctattggggaaagctatgctttatgtccactccggatggtgaaaactgtggacttgtaaaaaatctagctgttactgctattgttagctcaagggtgatgcagcccttgattgagagcttcatttcttgtggaatgagtaagctgaatgacattcctactgaacacattcaaagaatggataagatctttttgaatggcaattgggtgggatcttgtgaaaattcagcttcatttgtatttcgattgaggtgcatgagacgcagcagtctgattgatcctcaggttgaaattaaaagggacaagcaccacaatgaggttcgcgtgtttactgatgcagggcgaatcctcagaccccttcttgtggttgagaatctgaataaaatcagaaaacctaaggggcgctcattctctttccatgaattaatgcaacaagaaataattgagttcattggtgttgaagaggaggaagatatacaatgtgcgtggggaatcaggcatttgtttgagagtgaaggtgcgatatctagttatactcactgtgaactggatccttcctttcttctgggattaagctgtggtatcattccttttgcaaaccacaattttgctcggagggtattgtaccaatctgaaaaacactcgcaacaagctattgggtactcaacgacaaatccacacatcagagttgatactctttctcatcaactatattatcctcagaggcctcttttcaaaacagttatagccgactgtcttggcagatcagattatgcttcttttggaagaaaaaatgatttcgcgagaccagaatattttaatggacaaaatgcaattgtagcagtcaatgttcatcaggggtttaaccaagaggattccctggttatgaatagggcttctcttgaacgaggtatgtttaggactgaacacctcaggagctataaggcagatgtagaaaacaaggatggaaccaaacgactgaaattgaaggaaaaaatagactttggaaaaacagaaagcaaaagaggacgtgttgacaatcttgatgatgatggcttaccttacgttggtgcaagtcttcagaccaatgacattgttattggcaaagtctcagaatctggagaagaccacagtattaagctgaagcatacagaaaagggaatggttcagaaagtattgctttcagcaaatgatgaagggaagaattttgctgtggttactctaagacaggttcggacaccttgccttggagataagttttccagcatgcatggccaaaaaggtgttgttggttttctagaatctcaagagaacttcccatttactcacgaaggtatagtcccggatattgtgataaatccacatgccttcccaacacgtcaaactcccggacagctgcttgaagctgctctggggaagggaatagcttgcaaaggtacaatgagatatgcaacaccattcaccacagcatcagttgacgttattgcagaacagttgcacagggctggttattcacgatggggatctgagaacgttctaaatgggcgaacaggtgaaagagtgcaatccttggttttcatgggccctaccttttaccagaggctgattcatatgtccgaagataaggtgaaattccgtaacactgggccggtgcaccccctcacgaggcagcctgttgccgacaggaaaaggtttggtggagttaagtttggagaaatggagcgtgactgcctcctcgcccatgggtcagctgccaacctgcatgaacgcctcttcctgcttagtgacttctcccagatgcacatctgccagacatgcgagcgcgtggctaatgttgtcatgaggtctgtccccggaggcaagaagatccgtggcccctactgcggcttctgcaagtcttcggagaacatagtgagaatcaatgtgccctatggcgcgaagctgctctaccaggaactcttcagcatggggatctgcctcaagtttgagacccaagtctgctagaacttgtagacctgcttgcatccagttattacatatgtacatacagctagcctatgaggatctccaagctggtgtgccggtgtgtgatgctggcatagtaaggatgggcgagctagaaaccctgttgtgtttatgtgctgttttctccctgctcatgtggtaaactatgctaaagtgaatgaacactcgtttcctgttccctctttgaatgcgctgtgttagcatgcccttttgtttgaagattgcgtcttttgtggagcaccttgtattgctccgtagggatcacaccccttaccgccggcgatggccgacgatttgagataagatataatatttctggtcgtccttgttaaagagttcatgcatatacagtacacaagaaatgtcgatcgaatatagctagtaaaacaacttcaagaaacatgtacatgcggttggatggatcctttctcatcgatgatttgtctgcattgattcatccaaatcaagatacaagaggcagcatgagatgatctgtctgtgtctgcattgatccaaatcaagacacaatagagggacagcatgaggacgaacagagacaaatccatcgccccgtgcttgagtttctccacgagctagtaagagatcagcaagatcctctctagctaactacctgagggaaacgaacagcaggggaggaccaagaagtgatgagtgggggaactccatgcgagccctctggcctctcctcccacaggctacatcttgaggacgaagaagaacagtcctcgatgcgtcttcacctagctgctgcttaatttacgagtgatgctcttcgatccaaaggtacttatactacaaatacccctccccctctctctctctgtctccatcgccccaatgcaaagccggtctttctatagctcatagctgctggaatttggacctggctttgaaacatgtcgtgcactcgcgttgggtttgaaagagatgacttgcgttgcagcgagcgagcgacacaggtcaggtcacactgcaggggggaagcgaagcacgagtgtacatgcattgaacctggacgccctctttagcttttgcgtttgggcatacagtatttttattttggccttctgggatttgggaatacgagtcatcgattccctcagtgtcgtcccgtcacagctttttttttccgttgcctttatgctgcatgcccattcagcagtcacgca

SEQ ID NO: 23920 - DNA, 4630 bp, Zea Mays
ctcctgtccgccaaccccgccctcccatccccgtacgcgtccggcctgccgcagcttccccttcacccgccaggctataagctgctagtgcttgtggaatggaagagccacagaaggacagtgggcaaccatcaaaaagttctgattctgagctagaagctatggtattggatgataatggagcgggaaaatcccatagtatggaggaaaacagggattctcctatagatgtcgatggtgggcagtcatctatggatgtggatatcaagggaaaatcatccctcagtgatgatgttaatggaaagtcttcttccgagccatattccaatgctccaattgacatgagtgtcgaaagcctagagaagttttgcaaagaagcgtcaaggtccttctttgatgaagttggtctgattagccatcagataaattcctacaatgagtttgtctcgcatgggctccaggagctttttgattcgcttggggaagtgattgttgaacctggctatgatccttcgaagaaaggatcaggtggctggaagcatgccatcatcaagtttgggagagtgaagcttgaaaagcctgtgttttggactggcaaggatgaaggttctgttgattttaaaccttggcatgctcgtctccagaatatgacatatgcttcaagacttatagtagaagtgactattcaggtttattctttggagaaaagtgacaaatctaaaacagggaatgatggttttgttcaaaaaaggaacttcatgaatgaaactcattggatatttattggcctccttccggttatggtcaaatcaaacttatgtttgctgcatagcctcaacgaaagtgagtgcctgttcgacgcaggtggatactttttggtcaagggaatggagaaggtattcattgctcaagagcaaagatgtctaaggaggctttggattagtgaccgaccttgctggactatctcttttatgtctgaaatcaagcgtagacgtatatatattaaactagttgaatctacaaggagtgaagatttcagtgagagcaaaatcattaccatttcctttttgaacaaaaggctggacctacctggtgaattgcttggaagggaacttagggcacagcttaggctggcagagaaacgcatggttaaggccatccaaagagatttgaatagtgaccgtgagttacaagatcttgaacgttatatagatgcatcaattgttactaatggtctaaatcgtgccttttccactggttcttggtgccatccgtacaaaagagctgaacgatgctcaggaattgttgcgactctaaggagaactaatcctcttcaaatgatgtctgacttgaggaaaacccggcagcgggttgcttacgctgggaaagctggtgatgcaagatatccgaatccatcctattggggaaagctatgctttatgtccactccggatggtgaaaactgtggacttgtaaaaaatctagctgttactgctattgttagctcaagggtgatgcagcccttgattgagagcttcatttcttgtggaatgagtaagctgaatgacattcctactgaacacattcaaagaatggataagatctttttgaatggcaattgggtgggatcttgtgaaaattcagcttcatttgtatttcgattgaggtgcatgagacgcagcagtctgattgatcctcaggttgaaattaaaagggacaagcaccacaatgaggttcgcgtgtttactgatgcagggcgaatcctcagaccccttcttgtggttgagaatctgaataaaatcagaaaacctaaggggcgctcattctctttccatgaattaatgcaacaagaaataattgagttcattggtgttgaagaggaggaagatatacaatgtgcgtggggaatcaggcatttgtttgagagtgaaggtgcgatatctagttatactcactgtgaactggatccttcctttcttctgggattaagctgtggtatcattccttttgcaaaccacaattttgctcggagggtattgtaccaatctgaaaaacactcgcaacaagctattgggtactcaacgacaaatccacacatcagagttgatactctttctcatcaactatattatcctcagaggcctcttttcaaaacagttatagccgactgtcttggcagatcagattatgcttcttttggaagaaaaaatgatttcgcgagaccagaatattttaatggacaaaatgcaattgtagcagtcaatgttcatcaggggtttaaccaagaggattccctggttatgaatagggcttctcttgaacgaggtatgtttaggactgaacacctcaggagctataaggcagatgtagaaaacaaggatggaaccaaacgactgaaattgaaggaaaaaatagactttggaaaaacagaaagcaaaagaggacgtgttgacaatcttgatgatgatggcttaccttacgttggtgcaagtcttcagaccaatgacattgttattggcaaagtctcagaatctggagaagaccacagtattaagctgaagcatacagaaaagggaatggttcagaaagtattgctttcagcaaatgatgaagggaagaattttgctgtggttactctaagacaggttcggacaccttgccttggagataagttttccagcatgcatggccaaaaaggtgttgttggttttctagaatctcaagagaacttcccatttactcacgaaggtatagtcccggatattgtgataaatccacatgccttcccaacacgtcaaactcccggacagctgcttgaagctgctctggggaagggaatagcttgcaaaggtacaatgagatatgcaacaccattcaccacagcatcagttgacgttattgcagaacagttgcacagggctggttattcacgatggggatctgagaacgttctaaatgggcgaacaggtgaaagagtgcaatccttggttttcatgggccctaccttttaccagaggctgattcatatgtccgaagataaggtgaaattccgtaacactgggccggtgcaccccctcacgaggcagcctgttgccgacaggaaaaggtttggtggagttaagtttggagaaatggagcgtgactgcctcctcgcccatgggtcagctgccaacctgcatgaacgcctcttcctgcttagtgacttctcccagatgcacatctgccagacatgcgagcgcgtggctaatgttgtcatgaggtctgtccccggaggcaagaagatccgtggcccctactgcggcttctgcaagtcttcggagaacatagtgagaatcaatgtgccctatggcgcgaagctgctctaccaggaactcttcagcatggggatctgcctcaagtttgagacccaagtctgctagaacttgtagacctgcttgcatccagttattacatatgtacatacagctagcctatgaggatctccaagctggtgtgccggtgtgtgatgctggcatagtaaggatgggcgagctagaaaccctgttgtgtttatgtgctgttttctccctgctcatgtggtaaactatgctaaagtgaatgaacactcgtttcctgttccctctttgaatgcgctgtgttagcatgcccttttgtttgaagattgcgtcttttgtggagcaccttgtattgctccgtagggatcacaccccttaccgccggcgatggccgacgatttgagataagatataatatttctggtcgtccttgttaaagagttcatgcatatacagtacacaagaaatgtcgatcgaatatagctagtaaaacaacttcaagaaacatgtacatgcggttggatggatcctttctcatcgatgatttgtctgcattgattcatccaaatcaagatacaagaggcagcatgagatgatctgtctgtgtctgcattgatccaaatcaagacacaatagagggacagcatgaggacgaacagagacaaatccatcgccccgtgcttgagtttctccacgagctagtaagagatcagcaagatcctctctagctaactacctgagggaaacgaacagcaggggaggaccaagaagtgatgagtgggggaactccatgcgagccctctggcctctcctcccacaggctacatcttgaggacgaagaagaacagtcctcgatgcgtcttcacctagctgctgcttaatttacgagtgatgctcttcgatccaaaggtacttatactacaaatacccctccccctctctctctctgtctccatcgccccaatgcaaagccggtctttctatagctcatagctgctggaatttggacctggctttgaaacatgtcgtgcactcgcgttgggtttgaaagagatgacttgcgttgcagcgagcgagcgacacaggtcaggtcacactgcaggggggaagcgaagcacgagtgtacatgcattgaacctggacgccctctttagcttttgcgtttgggcatacagtatttttattttggccttctgggatttgggaatacgagtcatcgattccctcagtgtcgtcccgtcacagctttttttttccgttgcctttatgctgcatgcccattcagcagtcacgca

SEQ ID NO: 23921 - DNA, 4906 bp, Zea Mays
gcaccgcctcctgtccgccaaccccgccctcccatccccgtacgcgtccggcctgccgcagcttccccttcacccgccaggctataagctgctagtgcttgtggaatggaagagccacagaaggacagtgggcaaccatcaaaaagttctgattctgagctagaagctatggtattggatgataatggagcgggaaaatcccatagtatggaggaaaacagggattctcctatagatgtcgatggtgggcagtcatctatggatgtggatatcaagggaaaatcatccctcagtgatgatgttaatggaaagtcttcttccgagccatattccaatgctccaattgacatgagtgtcgaaagcctagagaagttttgcaaagaagcgtcaaggtccttctttgatgaagttggtctgattagccatcagataaattcctacaatgagtttgtctcgcatgggctccaggagctttttgattcgcttggggaagtgattgttgaacctggctatgatccttcgaagaaaggatcaggtggctggaagcatgccatcatcaagtttgggagagtgaagcttgaaaagcctgtgttttggactggcaaggatgaaggttctgttgattttaaaccttggcatgctcgtctccagaatatgacatatgcttcaagacttatagtagaagtgactattcaggtttattctttggagaaaagtgacaaatctaaaacagggaatgatggttttgttcaaaaaaggaacttcatgaatgaaactcattggatatttattggcctccttccggttatggtcaaatcaaacttatgtttgctgcatagcctcaacgaaagtgagtgcctgttcgacgcaggtggatactttttggtcaagggaatggagaaggtattcattgctcaagagcaaagatgtctaaggaggctttggattagtgaccgaccttgctggactatctcttttatgtctgaaatcaagcgtagacgtatatatattaaactagttgaatctacaaggagtgaagatttcagtgagagcaaaatcattaccatttcctttttgtatgcgacaatgccagtttggttgttgttctttgcacttggaatatcatcagataaggaagtgtttgatatgatagatatgcaagattgtgatgcttctgttatcaacacgatatctgcaactatcaaagaatctgataaactgtgtgaagacttccgtaaatcagataaagctcgtcaatatgttgatgagttggtaaaaagttcgagatttcctccagcggagtcctttgatgactatattgctaggtttctctttcctgatattagtggaaatagaaacaaagcacttttcttagggtacatggttaaatgtctgctaatggcttttactgggaagcgtaaatgtgataataaggatgatttcaggaacaaaaggctggacctacctggtgaattgcttggaagggaacttagggcacagcttaggctggcagagaaacgcatggttaaggccatccaaagagatttgaatagtgaccagctgaacgatgctcaggaattgttgcgactctaaggagaactaatcctcttcaaatgatgtctgacttgaggaaaacccggcagcgggttgcttacgctgggaaagctggtgatgcaagatatccgaatccatcctattggggaaagctatgctttatgtccactccggatggtgaaaactgtggacttgtaaaaaatctagctgttactgctattgttagctcaagggtgatgcagcccttgattgagagcttcatttcttgtggaatgagtaagctgaatgacattcctactgaacacattcaaagaatggataagatctttttgaatggcaattgggtgggatcttgtgaaaattcagcttcatttgtatttcgattgaggtgcatgagacgcagcagtctgattgatcctcaggttgaaattaaaagggacaagcaccacaatgaggttcgcgtgtttactgatgcagggcgaatcctcagaccccttcttgtggttgagaatctgaataaaatcagaaaacctaaggggcgctcattctctttccatgaattaatgcaacaagaaataattgagttcattggtgttgaagaggaggaagatatacaatgtgcgtggggaatcaggcatttgtttgagagtgaaggtgcgatatctagttatactcactgtgaactggatccttcctttcttctgggattaagctgtggtatcattccttttgcaaaccacaattttgctcggagggtattgtaccaatctgaaaaacactcgcaacaagctattgggtactcaacgacaaatccacacatcagagttgatactctttctcatcaactatattatcctcagaggcctcttttcaaaacagttatagccgactgtcttggcagatcagattatgcttcttttggaagaaaaaatgatttcgcgagaccagaatattttaatggacaaaatgcaattgtagcagtcaatgttcatcaggggtttaaccaagaggattccctggttatgaatagggcttctcttgaacgaggtatgtttaggactgaacacctcaggagctataaggcagatgtagaaaacaaggatggaaccaaacgactgaaattgaaggaaaaaatagactttggaaaaacagaaagcaaaagaggacgtgttgacaatcttgatgatgatggcttaccttacgttggtgcaagtcttcagaccaatgacattgttattggcaaagtctcagaatctggagaagaccacagtattaagctgaagcatacagaaaagggaatggttcagaaagtattgctttcagcaaatgatgaagggaagaattttgctgtggttactctaagacaggttcggacaccttgccttggagataagttttccagcatgcatggccaaaaaggtgttgttggttttctagaatctcaagagaacttcccatttactcacgaaggtatagtcccggatattgtgataaatccacatgccttcccaacacgtcaaactcccggacagctgcttgaagctgctctggggaagggaatagcttgcaaaggtacaatgagatatgcaacaccattcaccacagcatcagttgacgttattgcagaacagttgcacagggctggttattcacgatggggatctgagaacgttctaaatgggcgaacaggtgaaagagtgcaatccttggttttcatgggccctaccttttaccagaggctgattcatatgtccgaagataaggtgaaattccgtaacactgggccggtgcaccccctcacgaggcagcctgttgccgacaggaaaaggtttggtggagttaagtttggagaaatggagcgtgactgcctcctcgcccatgggtcagctgccaacctgcatgaacgcctcttcctgcttagtgacttctcccagatgcacatctgccagacatgcgagcgcgtggctaatgttgtcatgaggtctgtccccggaggcaagaagatccgtggcccctactgcggcttctgcaagtcttcggagaacatagtgagaatcaatgtgccctatggcgcgaagctgctctaccaggaactcttcagcatggggatctgcctcaagtttgagacccaagtctgctagaacttgtagacctgcttgcatccagttattacatatgtacatacagctagcctatgaggatctccaagctggtgtgccggtgtgtgatgctggcatagtaaggatgggcgagctagaaaccctgttgtgtttatgtgctgttttctccctgctcatgtggtaaactatgctaaagtgaatgaacactcgtttcctgttccctctttgaatgcgctgtgttagcatgcccttttgtttgaagattgcgtcttttgtggagcaccttgtattgctccgtagggatcacaccccttaccgccggcgatggccgacgatttgagataagatataatatttctggtcgtccttgttaaagagttcatgcatatacagtacacaagaaatgtcgatcgaatatagctagtaaaacaacttcaagaaacatgtacatgcggttggatggatcctttctcatcgatgatttgtctgcattgattcatccaaatcaagatacaagaggcagcatgagatgatctgtctgtgtctgcattgatccaaatcaagacacaatagagggacagcatgaggacgaacagagacaaatccatcgccccgtgcttgagtttctccacgagctagtaagagatcagcaagatcctctctagctaactacctgagggaaacgaacagcaggggaggaccaagaagtgatgagtgggggaactccatgcgagccctctggcctctcctcccacaggctacatcttgaggacgaagaagaacagtcctcgatgcgtcttcacctagctgctgcttaatttacgagtgatgctcttcgatccaaaggtacttatactacaaatacccctccccctctctctctctgtctccatcgccccaatgcaaagccggtctttctatagctcatagctgctggaatttggacctggctttgaaacatgtcgtgcactcgcgttgggtttgaaagagatgacttgcgttgcagcgagcgagcgacacaggtcaggtcacactgcaggggggaagcgaagcacgagtgtacatgcattgaacctggacgccctctttagcttttgcgtttgggcatacagtatttttattttggccttctgggatttgggaatacgagtcatcgattccctcagtgtcgtcccgtcacagctttttttttccgttgcctttatgctgcatgcccattcagcagtcacgca

SEQ ID NO: 23922 - DNA, 5901 bp, Zea Mays
gtcgccctcctccctgagaccgggacccgcacagcactttctgaccgctggcccgcctgtcagaaccgccgggcatcgtcgacgccgccgcttgcccccattaaacccccggtctcgaggcgattctcccgcagcgctacatcgccactagaaccctccccactctacgaagcacgaagttaacgcgcgacggcggtcacaccgccgccgccgcccaccaccgctcacggccggcggcgacgcgctgcatctccgcaccgcctcctgtccgccaaccccgccctcccatccccgtacgcgtccggcctgccgcagcttccccttcacccgccaggctataagctgctagtgcttgtggaatggaagagccacagaaggacagtgggcaaccatcaaaaagttctgattctgagctagaagctatggtattggatgataatggagcgggaaaatcccatagtatggaggaaaacagggattctcctatagatgtcgatggtgggcagtcatctatggatgtggatatcaagggaaaatcatccctcagtgatgatgttaatggaaagtcttcttccgagccatattccaatgctccaattgacatgagtgtcgaaagcctagagaagttttgcaaagaagcgtcaaggtccttctttgatgaagttggtctgattagccatcagataaattcctacaatgagtttgtctcgcatgggctccaggagctttttgattcgcttggggaagtgattgttgaacctggctatgatccttcgaagaaaggatcaggtggctggaagcatgccatcatcaagtttgggagagtgaagcttgaaaagcctgtgttttggactggcaaggatgaaggttctgttgattttaaaccttggcatgctcgtctccagaatatgacatatgcttcaagacttatagtagaagtgactattcaggtttattctttggagaaaagtgacaaatctaaaacagggaatgatggttttgttcaaaaaaggaacttcatgaatgaaactcattggatatttattggcctccttccggttatggtcaaatcaaacttatgtttgctgcatagcctcaacgaaagtgagtgcctgttcgacgcaggtggatactttttggtcaagggaatggagaaggtattcattgctcaagagcaaagatgtctaaggaggctttggattagtgaccgaccttgctggactatctcttttatgtctgaaatcaagcgtagacgtatatatattaaactagttgaatctacaaggagtgaagatttcagtgagagcaaaatcattaccatttcctttttgtatgcgacaatgccagtttggttgttgttctttgcacttggaatatcatcagataaggaagtgtttgatatgatagatatgcaagattgtgatgcttctgttatcaacacgatatctgcaactatcaaagaatctgataaactgtgtgaagacttccgtaaatcagataaagctcgtcaatatgttgatgagttggtaaaaagttcgagatttcctccagcggagtcctttgatgactatattgctaggtttctctttcctgatattagtggaaatagaaacaaagcacttttcttagggtacatggttaaatgtctgctaatggcttttactgggaagcgtaaatgtgataataaggatgatttcaggaacaaaaggctggacctacctggtgaattgcttggaagggaacttagggcacagcttaggctggcagagaaacgcatggttaaggccatccaaagagatttgaatagtgaccgtgagttacaagatcttgaacgttatatagatgcatcaattgttactaatggtctaaatcgtgccttttccactggttcttggtgccatccgtacaaaagagctgaacgatgctcaggaattgttgcgactctaaggagaactaatcctcttcaaatgatgtctgacttgaggaaaacccggcagcgggttgcttacgctgggaaagctggtgatgcaagatatccgaatccatcctattggggaaagctatgctttatgtccactccggatggtgaaaactgtggacttgtaaaaaatctagctgttactgctattgttagctcaagggtgatgcagcccttgattgagagcttcatttcttgtggaatgagtaagctgaatgacattcctactgaacacattcaaagaatggataagatctttttgaatggcaattgggtgggatcttgtgaaaattcagcttcatttgtatttcgattgaggtgcatgagacgcagcagtctgattgatcctcaggttgaaattaaaagggacaagcaccacaatgaggttcgcgtgtttactgatgcagggcgaatcctcagaccccttcttgtggttgagaatctgaataaaatcagaaaacctaaggggcgctcattctctttccatgaattaatgcaacaagaaataattgagttcattggtgttgaagaggaggaagatatacaatgtgcgtggggaatcaggcatttgtttgagagtgaaggtgcgatatctagttatactcactgtgaactggatccttcctttcttctgggattaagctgtggtatcattccttttgcaaaccacaattttgctcggagggtattgtaccaatctgaaaaacactcgcaacaagctattgggtactcaacgacaaatccacacatcagagttgatactctttctcatcaactatattatcctcagaggcctcttttcaaaacagttatagccgactgtcttggcagatcagattatgcttcttttggaagaaaaaatgatttcgcgagaccagaatattttaatggacaaaatgcaattgtagcagtcaatgttcatcaggggtttaaccaagaggattccctggttatgaatagggcttctcttgaacgaggtatgtttaggactgaacacctcaggagctataaggcagatgtagaaaacaaggatggaaccaaacgactgaaattgaaggaaaaaatagactttggaaaaacagaaagcaaaagaggacgtgttgacaatcttgatgatgatggcttaccttacgttggtgcaagtcttcagaccaatgacattgttattggcaaagtctcagaatctggagaagaccacagtattaagctgaagcatacagaaaagggaatggttcagaaagtattgctttcagcaaatgatgaagggaagaattttgctgtggttactctaagacaggttcggacaccttgccttggagataagttttccagcatgcatggccaaaaaggtgttgttggttttctagaatctcaagagaacttcccatttactcacgaaggtatagtcccggatattgtgataaatccacatgccttcccaacacgtcaaactcccggacagctgcttgaagctgctctggggaagggaatagcttgcaaaggtacaatgagatatgcaacaccattcaccacagcatcagttgacgttattgcagaacagttgcacaggtaagtgtttcttctaacggatgaatagctgcttgccttaattcagtaacccaccccttgcacatgaaacgaagatctgagaccctttcaaagggttgggcattttttagcctcttctaggtgaactttgtaattgttaagcttattaatacatcttataagaaccttggacgtcattaatgcaccctatgctctcaagtcttaactctgttagtactttactgcttattacacatacagaagaagaaaagggaaaggtagggaaacaatgtacacagagagagagaacagaatggctggtggccatcctcatattttgtatatgagtaaacatgtatcagtaatttcacatgtatctttttgtcatattttgcaccaaaatggtggaaacacacgagtttccttcccgtttcccttttacttgtattactatcagttgctgcttatctaacggagacatccatattggtaccgctaaatataaaactgagtgcactcacacactactatgttctcagtgaggatcttacttcagataatcaagtgatgtatctgattttttttgtgtgtgtttagacttgttttcgtctgtgacttgtttagttaattttcaagattttatgtatcttgttgcattgcagggctggttattcacgatggggatctgagaacgttctaaatgggcgaacaggtgaaagagtgcaatccttggttttcatgggccctaccttttaccagaggctgattcatatgtccgaagataaggtgaaattccgtaacactgggccggtgcaccccctcacgaggcagcctgttgccgacaggaaaaggtttggtggagttaagtttggagaaatggagcgtgactgcctcctcgcccatgggtcagctgccaacctgcatgaacgcctcttcctgcttagtgacttctcccagatgcacatctgccagacatgcgagcgcgtggctaatgttgtcatgaggtctgtccccggaggcaagaagatccgtggcccctactgcggcttctgcaagtcttcggagaacatagtgagaatcaatgtgccctatggcgcgaagctgctctaccaggaactcttcagcatggggatctgcctcaagtttgagacccaagtctgctagaacttgtagacctgcttgcatccagttattacatatgtacatacagctagcctatgaggatctccaagctggtgtgccggtgtgtgatgctggcatagtaaggatgggcgagctagaaaccctgttgtgtttatgtgctgttttctccctgctcatgtggtaaactatgctaaagtgaatgaacactcgtttcctgttccctctttgaatgcgctgtgttagcatgcccttttgtttgaagattgcgtcttttgtggagcaccttgtattgctccgtagggatcacaccccttaccgccggcgatggccgacgatttgagataagatataatatttctggtcgtccttgttaaagagttcatgcatatacagtacacaagaaatgtcgatcgaatatagctagtaaaacaacttcaagaaacatgtacatgcggttggatggatcctttctcatcgatgatttgtctgcattgattcatccaaatcaagatacaagaggcagcatgagatgatctgtctgtgtctgcattgatccaaatcaagacacaatagagggacagcatgaggacgaacagagacaaatccatcgccccgtgcttgagtttctccacgagctagtaagagatcagcaagatcctctctagctaactacctgagggaaacgaacagcaggggaggaccaagaagtgatgagtgggggaactccatgcgagccctctggcctctcctcccacaggctacatcttgaggacgaagaagaacagtcctcgatgcgtcttcacctagctgctgcttaatttacgagtgatgctcttcgatccaaaggtacttatactacaaatacccctccccctctctctctctgtctccatcgccccaatgcaaagccggtctttctatagctcatagctgctggaatttggacctggctttgaaacatgtcgtgcactcgcgttgggtttgaaagagatgacttgcgttgcagcgagcgagcgacacaggtcaggtcacactgcaggggggaagcgaagcacgagtgtacatgcattgaacctggacgccctctttagcttttgcgtttgggcatacagtatttttattttggccttctgggatttgggaatacgagtcatcgattccctcagtgtcgtcccgtcacagctttttttttccgttgcctttatgctgcatgcccattcagcagtcacgca

SEQ ID NO: 23923 - DNA, 5200 bp, Zea Mays
aagccgcaactgcgggggggggctgcggctggtgccgaagccggatccgagcgccaggccgcgcctggccgtccgcttccaaatcgtgcatgattaggtggttgatggcactcgggtggtggtggtgcactgcggctcctcccgagcccccaaaagccaaattccatcgccctatggcatcgtgcattgattctaatgggaaagttcgcataactgaaactttgccgtggatcttgtgaattttagtgggaatttgatcgtggaaagtttatgaagttttgttgggattatggatgcataagatagtggtgtatgtgatttgcccatagtttctgcagcctcattgttttccatttgggatcaataaaacttcatgctcatggatagggctgatacatcaggttttgtcagtggtggtatacattacatgaacatccatgtgtattttcattttgtgtatactatgtgcttcctcagtggtgaagttgtaaagctggagttctgatctctgttggttggattaagtatctggtctctggataacatataaatttcttcctatcataatcctaccttatttataataagcaggatggaccttaataggacaaatctttggtttcatggaaaggaacatatagctactgcttcattctcccaggcccaaccatctgccataaattgcaggaatgaagaactatctatgtcagccgtgaacttgggttacattaggagctcagaaatagcacagaactctagaaaatcatttcagcatggcgatcaaagtttgaccgctccagatgatagctgcaggctggcccttggacttgggccaacaccaaatctatattctgctgatagtcactcatttggtggaaacaaagcttatcaatcagcaactttgctcagtcaacattgtgccacaaccgatcctggtttaatgttgggtctttcaagatgtagctcaagaaatttgcaatctacaagggcgagtggcagcaagaattattcacctgcaaggaagactggtatcatcttaccacttattgatgagggatcaacttcagcaaaaaggaaaaaaggtggctatttgctaccacttctgtttgtgccaagatcagaagatctttgtcttaatggaacatctacagacaccgatgcccaacaacatattggaactgaatgtgatactgaaagcggtcataatagatctctgaatcttcacgagattcagcctagcgctgatctatccattacagctggttgttcttttgctgcaacttctgatgtagtagccgatacaagtgatgagcagaggagtcatcagcgccatccaaagaaatgcagatatgcaagattgtgatgcttctgttatcaacacgatatctgcaactatcaaagaatctgataaactgtgtgaagacttccgtaaatcagataaagctcgtcaatatgttgatgagttggtaaaaagttcgagatttcctccagcggagtcctttgatgactatattgctaggtttctctttcctgatattagtggaaatagaaacaaagcacttttcttagggtacatggttaaatgtctgctaatggcttttactgggaagcgtaaatgtgataataaggatgatttcaggaacaaaaggctggacctacctggtgaattgcttggaagggaacttagggcacagcttaggctggcagagaaacgcatggttaaggccatccaaagagatttgaatagtgaccgtgagttacaagatcttgaacgttatatagatgcatcaattgttactaatggtctaaatcgtgccttttccactggttcttggtgccatccgtacaaaagagctgaacgatgctcaggaattgttgcgactctaaggagaactaatcctcttcaaatgatgtctgacttgaggaaaacccggcagcgggttgcttacgctgggaaagctggtgatgcaagatatccgaatccatcctattggggaaagctatgctttatgtccactccggatggtgaaaactgtggacttgtaaaaaatctagctgttactgctattgttagctcaagggtgatgcagcccttgattgagagcttcatttcttgtggaatgagtaagctgaatgacattcctactgaacacattcaaagaatggataagatctttttgaatggcaattgggtgggatcttgtgaaaattcagcttcatttgtatttcgattgaggtgcatgagacgcagcagtctgattgatcctcaggttgaaattaaaagggacaagcaccacaatgaggttcgcgtgtttactgatgcagggcgaatcctcagaccccttcttgtggttgagaatctgaataaaatcagaaaacctaaggggcgctcattctctttccatgaattaatgcaacaagaaataattgagttcattggtgttgaagaggaggaagatatacaatgtgcgtggggaatcaggcatttgtttgagagtgaaggtgcgatatctagttatactcactgtgaactggatccttcctttcttctgggattaagctgtggtatcattccttttgcaaaccacaattttgctcggagggtattgtaccaatctgaaaaacactcgcaacaagctattgggtactcaacgacaaatccacacatcagagttgatactctttctcatcaactatattatcctcagaggcctcttttcaaaacagttatagccgactgtcttggcagatcagattatgcttcttttggaagaaaaaatgatttcgcgagaccagaatattttaatggacaaaatgcaattgtagcagtcaatgttcatcaggggtttaaccaagaggattccctggttatgaatagggcttctcttgaacgaggtatgtttaggactgaacacctcaggagctataaggcagatgtagaaaacaaggatggaaccaaacgactgaaattgaaggaaaaaatagactttggaaaaacagaaagcaaaagaggacgtgttgacaatcttgatgatgatggcttaccttacgttggtgcaagtcttcagaccaatgacattgttattggcaaagtctcagaatctggagaagaccacagtattaagctgaagcatacagaaaagggaatggttcagaaagtattgctttcagcaaatgatgaagggaagaattttgctgtggttactctaagacaggttcggacaccttgccttggagataagttttccagcatgcatggccaaaaaggtgttgttggttttctagaatctcaagagaacttcccatttactcacgaaggtatagtcccggatattgtgataaatccacatgccttcccaacacgtcaaactcccggacagctgcttgaagctgctctggggaagggaatagcttgcaaaggtacaatgagatatgcaacaccattcaccacagcatcagttgacgttattgcagaacagttgcacagggctggttattcacgatggggatctgagaacgttctaaatgggcgaacaggtgaaagagtgcaatccttggttttcatgggccctaccttttaccagaggctgattcatatgtccgaagataaggtgaaattccgtaacactgggccggtgcaccccctcacgaggcagcctgttgccgacaggaaaaggtttggtggagttaagtttggagaaatggagcgtgactgcctcctcgcccatgggtcagctgccaacctgcatgaacgcctcttcctgcttagtgacttctcccagatgcacatctgccagacatgcgagcgcgtggctaatgttgtcatgaggtctgtccccggaggcaagaagatccgtggcccctactgcggcttctgcaagtcttcggagaacatagtgagaatcaatgtgccctatggcgcgaagctgctctaccaggaactcttcagcatggggatctgcctcaagtttgagacccaagtctgctagaacttgtagacctgcttgcatccagttattacatatgtacatacagctagcctatgaggatctccaagctggtgtgccggtgtgtgatgctggcatagtaaggatgggcgagctagaaaccctgttgtgtttatgtgctgttttctccctgctcatgtggtaaactatgctaaagtgaatgaacactcgtttcctgttccctctttgaatgcgctgtgttagcatgcccttttgtttgaagattgcgtcttttgtggagcaccttgtattgctccgtagggatcacaccccttaccgccggcgatggccgacgatttgagataagatataatatttctggtcgtccttgttaaagagttcatgcatatacagtacacaagaaatgtcgatcgaatatagctagtaaaacaacttcaagaaacatgtacatgcggttggatggatcctttctcatcgatgatttgtctgcattgattcatccaaatcaagatacaagaggcagcatgagatgatctgtctgtgtctgcattgatccaaatcaagacacaatagagggacagcatgaggacgaacagagacaaatccatcgccccgtgcttgagtttctccacgagctagtaagagatcagcaagatcctctctagctaactacctgagggaaacgaacagcaggggaggaccaagaagtgatgagtgggggaactccatgcgagccctctggcctctcctcccacaggctacatcttgaggacgaagaagaacagtcctcgatgcgtcttcacctagctgctgcttaatttacgagtgatgctcttcgatccaaaggtacttatactacaaatacccctccccctctctctctctgtctccatcgccccaatgcaaagccggtctttctatagctcatagctgctggaatttggacctggctttgaaacatgtcgtgcactcgcgttgggtttgaaagagatgacttgcgttgcagcgagcgagcgacacaggtcaggtcacactgcaggggggaagcgaagcacgagtgtacatgcattgaacctggacgccctctttagcttttgcgtttgggcatacagtatttttattttggccttctgggatttgggaatacgagtcatcgattccctcagtgtcgtcccgtcacagctttttttttccgttgcctttatgctgcatgcccattcagcagtcacgca

SEQ ID NO: 23924 - DNA, 2782 bp, Zea Mays
caaattccatcgccctatggcatcggaattattggatgcacaaaagttaagatactaccttaaatgattgtctttctctatggtttcagtgcattgattctaatgggaaagttcgcataactgaaactttgccgtggatcttgtgaattttagtgggaatttgatcgtggaaagtttatgaagttttgttgggattatggatgcataagatagtggtgtatgtgatttgcccatagtttctgcagcctcattgttttccatttgggatcaataaaacttcatgctcatggatagggctgatacatcaggttttgtcagtggtggtatacattacatgaacatccatgtgtattttcattttgtgtatactatgtgcttcctcagtggtgaagttgtaaagctggagttctgatctctgttggttggattaagtatctggtctctggataacatataaatttcttcctatcataatcctaccttatttataataagcaggatggaccttaataggacaaatctttggtttcatggaaaggaacatatagctactgcttcattctcccaggcccaaccatctgccataaattgcaggaatgaagaactatctatgtcagccgtgaacttgggttacattaggagctcagaaatagcacagaactctagaaaatcatttcagcatggcgatcaaagtttgaccgctccagatgatagctgcaggctggcccttggacttgggccaacaccaaatctatattctgctgatagtcactcatttggtggaaacaaagcttatcaatcagcaactttgctcagtcaacattgtgccacaaccgatcctggtttaatgttgggtctttcaagatgtagctcaagaaatttgcaatctacaagggcgagtggcagcaagaattattcacctgcaaggaagactggtatcatcttaccacttattgatgagggatcaacttcagcaaaaaggaaaaaaggtggctatttgctaccacttctgtttgtgccaagatcagaagatctttgtcttaatggaacatctacagacaccgatgcccaacaacatattggaactgaatgtgatactgaaagcggtcataatagatctctgaatcttcacgagattcagcctagcgctgatctatccattacagctggttgttcttttgctgcaacttctgatgtagtagccgatacaagtgatgagcagaggagtcatcagcgccatccaaagaaatgcaggttcaatggttgctcgaaaggtgcaagggatgcatcaggactttgcatttctcatggcggtggccagaggtgccagaagcctggttgcaacaaaggtgctgagagtcgaacggctttctgcaaagctcatggaggagggagacgctgccaggagctaggctgcaccaaaagcgccgaagggaagacagagttctgtattgctcatggtggtgggcgccggtgtgggattgaggaatgcccaagagcggcaagggggaagtctggattctgcataaaacatggtggagggaaaaggtgcaggatagagggctgcactcgtagtgctgaaggccatcctgggttgtgcatctcacatggaggtggtcgccggtgccagtacccaaactgtgataagggggcccaaggaagcaccatcttttgcaagtcccatggtggaggcaagaggtgcatgtttgatggctgtaccagaggagcagagggcagcacgtccttctgcaaagggcatggtggcggtaagaggtgcctctttgagggaggtgggatgtgcccaaagagcgtccatggtggaaccagcttctgtgttgcgcatggagggggcaaacgctgctctgttcccgggtgcaccaagagtgcccgcggtcgctctgattgctgtgtgaagcacggtggtggcaagcgttgcaggttcgatgggtgtgacaagagcgcacaggggagcactgacttctgcaaggctcatggagggggcaagcgatgcgcttggagcaccggctgcgacaagttcgctaggggaaggagtggcctatgcgcagcgcatacgaccctgatggcttccaaggtagtgcaccatcctggacatgcacgaagcatggtcgggccttgccacttcagcggcggcgtctctggttcgtcagcagctgatagcaacatggatcatgccatctcgtcatccggccatggcgcatggtcagactgcgtcgactcgtcgagagacatgcagagcgccggcaggctcctaataccacgtcaggtgcttgtccctggttcactgaaggacgctccttcgtgtggtctagcaggcaacggccaggacgacggagggagccggaaccagagctgtgggctcgtggtgcctgagggaagggttcacggtggagggctgatgtccatgcttggagttggaggcaacctgggaagcaatcctgatggttcgaaagcctgaaataccaaggatgagacgtagaagcacataatttaggttattttgcatgcctctgttatgattcttgcaatggaacatatacatgaatcttcaaatggccattgtgtaactatagtgcttgccaattggccattgtagtatttgctatgtacaagagtggttttggcatctagtcaatgttgtgcatagagctgagaactgcatagttacttgggttcagaaattatgcggaagcttgtaagttgtttcactccgaatttttgcaaacctgtttgctgaaatatttagtccatcctgacgggttcg

SEQ ID NO: 23925 - DNA, 2844 bp, Zea Mays
caagccgcaactgcgggggggggctgcggctggtgccgaagccggatccgagcgccaggccgcgcctggccgtccgcttccaaatcgtgcatgattaggtggttgatggcactcgggtggtggtggtgcactgcggctcctcccgagcccccaaaagccaaattccatcgccctatggcatcggtacgcacgatggcataaatctcccagcttttcctccccacgcctctttttatctcccggctcccgtccccatcgagcgctcccctcgctgcccgggtctcccccaccctttcgcttcgccgcctccggggttctccgcgccgtgcattgattctaatgggaaagttcgcataactgaaactttgccgtggatcttgtgaattttagtgggaatttgatcgtggaaagtttatgaagttttgttgggattatggatgcataagatagtggtgtatgtgatttgcccatagtttctgcagcctcattgttttccatttgggatcaataaaacttcatgctcatggatagggctgatacatcaggttttgtcagtggtggatggaccttaataggacaaatctttggtttcatggaaaggaacatatagctactgcttcattctcccaggcccaaccatctgccataaattgcaggaatgaagaactatctatgtcagccgtgaacttgggttacattaggagctcagaaatagcacagaactctagaaaatcatttcagcatggcgatcaaagtttgaccgctccagatgatagctgcaggctggcccttggacttgggccaacaccaaatctatattctgctgatagtcactcatttggtggaaacaaagcttatcaatcagcaactttgctcagtcaacattgtgccacaaccgatcctggtttaatgttgggtctttcaagatgtagctcaagaaatttgcaatctacaagggcgagtggcagcaagaattattcacctgcaaggaagactggtatcatcttaccacttattgatgagggatcaacttcagcaaaaaggaaaaaaggtggctatttgctaccacttctgtttgtgccaagatcagaagatctttgtcttaatggaacatctacagacaccgatgcccaacaacatattggaactgaatgtgatactgaaagcggtcataatagatctctgaatcttcacgagattcagcctagcgctgatctatccattacagctggttgttcttttgctgcaacttctgatgtagtagccgatacaagtgatgagcagaggagtcatcagcgccatccaaagaaatgcaggttcaatggttgctcgaaaggtgcaagggatgcatcaggactttgcatttctcatggcggtggccagaggtgccagaagcctggttgcaacaaaggtgctgagagtcgaacggctttctgcaaagctcatggaggagggagacgctgccaggagctaggctgcaccaaaagcgccgaagggaagacagagttctgtattgctcatggtggtgggcgccggtgtgggattgaggaatgcccaagagcggcaagggggaagtctggattctgcataaaacatggtggagggaaaaggtgcaggatagagggctgcactcgtagtgctgaaggccatcctgggttgtgcatctcacatggaggtggtcgccggtgccagtacccaaactgtgataagggggcccaaggaagcaccatcttttgcaagtcccatggtggaggcaagaggtgcatgtttgatggctgtaccagaggagcagagggcagcacgtccttctgcaaagggcatggtggcggtaagaggtgcctctttgagggaggtgggatgtgcccaaagagcgtccatggtggaaccagcttctgtgttgcgcatggagggggcaaacgctgctctgttcccgggtgcaccaagagtgcccgcggtcgctctgattgctgtgtgaagcacggtggtggcaagcgttgcaggttcgatgggtgtgacaagagcgcacaggggagcactgacttctgcaaggctcatggagggggcaagcgatgcgcttggagcaccggctgcgacaagttcgctaggggaaggagtggcctatgcgcagcgcatacgaccctgatggcttccaaggtagtgcaccatcctggacatgcacgaagcatggtcgggccttgccacttcagcggcggcgtctctggttcgtcagcagctgatagcaacatggatcatgccatctcgtcatccggccatggcgcatggtcagactgcgtcgactcgtcgagagacatgcagagcgccggcaggctcctaataccacgtcaggtgcttgtccctggttcactgaaggacgctccttcgtgtggtctagcaggcaacggccaggacgacggagggagccggaaccagagctgtgggctcgtggtgcctgagggaagggttcacggtggagggctgatgtccatgcttggagttggaggcaacctgggaagcaatcctgatggttcgaaagcctgaaataccaaggatgagacgtagaagcacataatttaggttattttgcatgcctctgttatgattcttgcaatggaacatatacatgaatcttcaaatggccattgtgtaactatagtgcttgccaattggccattgtagtatttgctatgtacaagagtggttttggcatctagtcaatgttgtgcatagagctgagaactgcatagttacttgggttcagaaattatgcggaagcttgtaagttgtttcactccgaatttttgcaaacctgtttgctgaaatatttagtccatcctgacgggttcg

SEQ ID NO: 23926 - DNA, 3083 bp, Zea Mays
caagccgcaactgcgggggggggctgcggctggtgccgaagccggatccgagcgccaggccgcgcctggccgtccgcttccaaatcgtgcatgattaggtggttgatggcactcgggtggtggtggtgcactgcggctcctcccgagcccccaaaagccaaattccatcgccctatggcatcggtacgcacgatggcataaatctcccagcttttcctccccacgcctctttttatctcccggctcccgtccccatcgagcgctcccctcgctgcccgggtctcccccaccctttcgcttcgccgcctccggggttctccgcgccggaattattggatgcacaaaagttaagatactaccttaaatgattgtctttctctatggtttcagtgcattgattctaatgggaaagttcgcataactgaaactttgccgtggatcttgtgaattttagtgggaatttgatcgtggaaagtttatgaagttttgttgggattatggatgcataagatagtggtgtatgtgatttgcccatagtttctgcagcctcattgttttccatttgggatcaataaaacttcatgctcatggatagggctgatacatcaggttttgtcagtggtggtatacattacatgaacatccatgtgtattttcattttgtgtatactatgtgcttcctcagtggtgaagttgtaaagctggagttctgatctctgttggttggattaagtatctggtctctggataacatataaatttcttcctatcataatcctaccttatttataataagcaggatggaccttaataggacaaatctttggtttcatggaaaggaacatatagctactgcttcattctcccaggcccaaccatctgccataaattgcaggaatgaagaactatctatgtcagccgtgaacttgggttacattaggagctcagaaatagcacagaactctagaaaatcatttcagcatggcgatcaaagtttgaccgctccagatgatagctgcaggctggcccttggacttgggccaacaccaaatctatattctgctgatagtcactcatttggtggaaacaaagcttatcaatcagcaactttgctcagtcaacattgtgccacaaccgatcctggtttaatgttgggtctttcaagatgtagctcaagaaatttgcaatctacaagggcgagtggcagcaagaattattcacctgcaaggaagactggtatcatcttaccacttattgatgagggatcaacttcagcaaaaaggaaaaaaggtggctatttgctaccacttctgtttgtgccaagatcagaagatctttgtcttaatggaacatctacagacaccgatgcccaacaacatattggaactgaatgtgatactgaaagcggtcataatagatctctgaatcttcacgagattcagcctagcgctgatctatccattacagctggttgttcttttgctgcaacttctgatgtagtagccgatacaagtgatgagcagaggagtcatcagcgccatccaaagaaatgcaggttcaatggttgctcgaaaggtgcaagggatgcatcaggactttgcatttctcatggcggtggccagaggtgccagaagcctggttgcaacaaaggtgctgagagtcgaacggctttctgcaaagctcatggaggagggagacgctgccaggagctaggctgcaccaaaagcgccgaagggaagacagagttctgtattgctcatggtggtgggcgccggtgtgggattgaggaatgcccaagagcggcaagggggaagtctggattctgcataaaacatggtggagggaaaaggtgcaggatagagggctgcactcgtagtgctgaaggccatcctgggttgtgcatctcacatggaggtggtcgccggtgccagtacccaaactgtgataagggggcccaaggaagcaccatcttttgcaagtcccatggtggaggcaagaggtgcatgtttgatggctgtaccagaggagcagagggcagcacgtccttctgcaaagggcatggtggcggtaagaggtgcctctttgagggaggtgggatgtgcccaaagagcgtccatggtggaaccagcttctgtgttgcgcatggagggggcaaacgctgctctgttcccgggtgcaccaagagtgcccgcggtcgctctgattgctgtgtgaagcacggtggtggcaagcgttgcaggttcgatgggtgtgacaagagcgcacaggggagcactgacttctgcaaggctcatggagggggcaagcgatgcgcttggagcaccggctgcgacaagttcgctaggggaaggagtggcctatgcgcagcgcatacgaccctgatggcttccaaggtagtgcaccatcctggacatgcacgaagcatggtcgggccttgccacttcagcggcggcgtctctggttcgtcagcagctgatagcaacatggatcatgccatctcgtcatccggccatggcgcatggtcagactgcgtcgactcgtcgagagacatgcagagcgccggcaggctcctaataccacgtcaggtgcttgtccctggttcactgaaggacgctccttcgtgtggtctagcaggcaacggccaggacgacggagggagccggaaccagagctgtgggctcgtggtgcctgagggaagggttcacggtggagggctgatgtccatgcttggagttggaggcaacctgggaagcaatcctgatggttcgaaagcctgaaataccaaggatgagacgtagaagcacataatttaggttattttgcatgcctctgttatgattcttgcaatggaacatatacatgaatcttcaaatggccattgtgtaactatagtgcttgccaattggccattgtagtatttgctatgtacaagagtggttttggcatctagtcaatgttgtgcatagagctgagaactgcatagttacttgggttcagaaattatgcggaagcttgtaagttgtttcactccgaatttttgcaaacctgtttgctgaaatatttagtccatcctgacgggttcg

SEQ ID NO: 23927 - DNA, 2876 bp, Zea Mays
caagccgcaactgcgggggggggctgcggctggtgccgaagccggatccgagcgccaggccgcgcctggccgtccgcttccaaatcgtgcatgattaggtggttgatggcactcgggtggtggtggtgcactgcggctcctcccgagcccccaaaagccaaattccatcgccctatggcatcgtgcattgattctaatgggaaagttcgcataactgaaactttgccgtggatcttgtgaattttagtgggaatttgatcgtggaaagtttatgaagttttgttgggattatggatgcataagatagtggtgtatgtgatttgcccatagtttctgcagcctcattgttttccatttgggatcaataaaacttcatgctcatggatagggctgatacatcaggttttgtcagtggtggtatacattacatgaacatccatgtgtattttcattttgtgtatactatgtgcttcctcagtggtgaagttgtaaagctggagttctgatctctgttggttggattaagtatctggtctctggataacatataaatttcttcctatcataatcctaccttatttataataagcaggatggaccttaataggacaaatctttggtttcatggaaaggaacatatagctactgcttcattctcccaggcccaaccatctgccataaattgcaggaatgaagaactatctatgtcagccgtgaacttgggttacattaggagctcagaaatagcacagaactctagaaaatcatttcagcatggcgatcaaagtttgaccgctccagatgatagctgcaggctggcccttggacttgggccaacaccaaatctatattctgctgatagtcactcatttggtggaaacaaagcttatcaatcagcaactttgctcagtcaacattgtgccacaaccgatcctggtttaatgttgggtctttcaagatgtagctcaagaaatttgcaatctacaagggcgagtggcagcaagaattattcacctgcaaggaagactggtatcatcttaccacttattgatgagggatcaacttcagcaaaaaggaaaaaaggtggctatttgctaccacttctgtttgtgccaagatcagaagatctttgtcttaatggaacatctacagacaccgatgcccaacaacatattggaactgaatgtgatactgaaagcggtcataatagatctctgaatcttcacgagattcagcctagcgctgatctatccattacagctggttgttcttttgctgcaacttctgatgtagtagccgatacaagtgatgagcagaggagtcatcagcgccatccaaagaaatgcaggttcaatggttgctcgaaaggtgcaagggatgcatcaggactttgcatttctcatggcggtggccagaggtgccagaagcctggttgcaacaaaggtgctgagagtcgaacggctttctgcaaagctcatggaggagggagacgctgccaggagctaggctgcaccaaaagcgccgaagggaagacagagttctgtattgctcatggtggtgggcgccggtgtgggattgaggaatgcccaagagcggcaagggggaagtctggattctgcataaaacatggtggagggaaaaggtgcaggatagagggctgcactcgtagtgctgaaggccatcctgggttgtgcatctcacatggaggtggtcgccggtgccagtacccaaactgtgataagggggcccaaggaagcaccatcttttgcaagtcccatggtggaggcaagaggtgcatgtttgatggctgtaccagaggagcagagggcagcacgtccttctgcaaagggcatggtggcggtaagaggtgcctctttgagggaggtgggatgtgcccaaagagcgtccatggtggaaccagcttctgtgttgcgcatggagggggcaaacgctgctctgttcccgggtgcaccaagagtgcccgcggtcgctctgattgctgtgtgaagcacggtggtggcaagcgttgcaggttcgatgggtgtgacaagagcgcacaggggagcactgacttctgcaaggctcatggagggggcaagcgatgcgcttggagcaccggctgcgacaagttcgctaggggaaggagtggcctatgcgcagcgcatacgaccctgatggcttccaaggtagtgcaccatcctggacatgcacgaagcatggtcgggccttgccacttcagcggcggcgtctctggttcgtcagcagctgatagcaacatggatcatgccatctcgtcatccggccatggcgcatggtcagactgcgtcgactcgtcgagagacatgcagagcgccggcaggctcctaataccacgtcaggtgcttgtccctggttcactgaaggacgctccttcgtgtggtctagcaggcaacggccaggacgacggagggagccggaaccagagctgtgggctcgtggtgcctgagggaagggttcacggtggagggctgatgtccatgcttggagttggaggcaacctgggaagcaatcctgatggttcgaaagcctgaaataccaaggatgagacgtagaagcacataatttaggttattttgcatgcctctgttatgattcttgcaatggaacatatacatgaatcttcaaatggccattgtgtaactatagtgcttgccaattggccattgtagtatttgctatgtacaagagtggttttggcatctagtcaatgttgtgcatagagctgagaactgcatagttacttgggttcagaaattatgcggaagcttgtaagttgtttcactccgaatttttgcaaacctgtttgctgaaatatttagtccatcctgacgggttcg

SEQ ID NO: 23928 - DNA, 1130 bp, Zea Mays
cctgcagctctgctcatgccccccgcccgtgccgcccaattccaaaccttggctgctccccaccgctccgcgcacgtctctctgcgccgccggtccccggctgcgcccccctctgccgaggaagagcacgggcatggcggacgaggcgcatcttaggtctgccgtgccaggcccttgggcggcggattaccgggagaaggccgtccactactgcactacaccatcaatatcgcattggccaactggtgataatgtgatatgagcatcaagcccgagaccattcaatgcggcttatgcgggaccaagctttgccttgttgctcagagctgctgcccgtcctcgtgcggtggaaagcctcagagcggtcggggtgcagcggagacctagccagggccaactaagaaactattcctgattgtgcatgtgatgcacagtgttttccaattgtcaataagagctgtaaagcaacctgcaattttgcggtatgttttgtggctgcttcgtgccccagtatcctgcagcctgtcatacatagctcacacgatttggcctattgcaagttcgcacagcaatacagcatgattccaggcttgcgagatgtttgtcagtgtggctattcttctggctgcaaaaccatttttgtaccctgtctttttaggtgcatgaattgtgagctccaatcaatcaagggtgggcatgttacgagcatcaagagatatgatccgggcctgataataataattgcaagaaagcagcatttctctggattaaagtacaactatattaaagtggcaaaaccgtaccgcagccgatatataatggagcgcataattcatcggctgtattattctcgtcgccaaccctacctgcactgacgctgatgcttcatttgcaacttggctctcggatcgcccggatggtgccagccaggctgcacctgcacataaataaattattatccataatattgtaggtgtttttgcatccatcaatccatgttttctccgtttgaagaatctgtacgtacgaaaaggatgtggatgtagtattatacaccactcacgcctggcaatcttttctttgtagctgtgatgtggtaagttcatcggaaaaataaataaatgtcccgg

SEQ ID NO: 23929 - DNA, 2871 bp, Zea Mays
cctgcagctctgctcatgccccccgcccgtgccgcccaattccaaaccttggctgctccccaccgctccgcgcacgtctctctgcgccgccggtccccggctgcgcccccctctgccgaggaagagcacgggcatggcggacgaggcgcatcttaggtctgccgtgccaggcccttgggcggcggattaccgggagaaggccgtccactactgcactacaccatcaatatcggtgattcggtggagtccctttatgtcttctgtgcgtacactcttcctggtcctagcttaggaactaggagccgagcttatgccatggaccttcttcagctaacccaccacgattatacattttacttgatgattcttctcacaggtgtgagattttttcccccctgaacggtcacaagcaactagtcatcagtaatcgaacgccgagctccttttgagtcgtttgctgttttttcccctgcagcattggccaactggtgataatgtgatatgagcatcaagcccgagaccattcaatgcggcttatgcgggaccaagctttgccttgttgctcaggtgagtgtcgtcgatgtagcaaggctttactagtcgaaacatctttattggtctgttttgtaaggaatccgagtgcttctgtgctcttgcagttctctggattaacattgcaaactgtgtttacatactgatccgtggtactagtatatacagaacgtctgcatgttgacactagtactagtatatactttctgcctcaccctattcagcagtggtcataaaacaaaattaatgcggttctaacctaaggtacatgcgctcgtggcaaagctaagcatcgaggagaggataatctttgtgcttgtttgcttgactcctgaatgtggacctcaaccccaaaggttatatgcggattgattcaacctgtttactatatatccatgttgggaatagttctacattgtgtataggcaagtatgatttatatggttgagggtgcaattactaatgggctagcattttgggggagtgttggtcgaacggacctaaagcccgctgctacgcgttcgggcgcgtgtgacatggcccgatagcctagatgtgtgtgcggacaacctggcgaccgtgccatgtgtcggcggtccggttccaacaatccagacctttacatgatcttaagtcagtatgtcttttctgttttttgctaaggcatcttaagtcgaatgggccttctacgatccttccagaagaacagaatgataaaaataaaattcctgagatcaacagtggcgattttgatctagatgccttagccgaagcactcgaacaatcggcaacattagcatctaattcaaagaagaagaataaatcgaagcatgctaatgctcctgtaaaacgtcctgtactgaaggcgcaagcatgtgatcttagcataccaggtgtgcacaagtttaaaagaactcgttaccatgcatgcaaaatctgaatatctgattgttttgatctgataaaatcctgttgcagttctttcttgttttacatatattatgataattgataaaggtaccgtgggatcaaatatcagtgagttggttttggacaaagaaaccatggatgccgcaaatgacggagaagaaaaatgggaaggtgaaaagtatgagtaccataaagctattggtgctgacagaactttttcgaaattcgagaaacgattattagacaagattgaatatgagcatatcattgaagaatttatttaaaggaaccctaagagaatgaagttgttcaagtaaaattcatacaataaagagttaaataggtatttttttcataaactccatttctatgtactatattacaacattttaatacttacaattatgtttttaaatagtttagtattttatacagggcctcattttctcctggcatggccctgttggtactggggtgaaaccagacattgttcattgtattcttttgtttacagttccccactctgcactattgcagttccccactctgcactattgcttaactctgtgtcaatttaccgtagagctgctgcccgtcctcgtgcggtggaaagcctcagagcggtcggggtgcagcggagacctagccagggccaactaagaaactattcctgattgtgcatgtgatgcacagtgttttccaattgtcaataagagctgtaaagcaacctgcaattttgcggtatgttttgtggctgcttcgtgccccagtatcctgcagcctgtcatacatagctcacacgatttggcctattgcaagttcgcacagcaatacagcatgattccaggcttgcgagatgtttgtcagtgtggctattcttctggctgcaaaaccatttttgtaccctgtctttttaggtgcatgaattgtgagctccaatcaatcaagggtgggcatgttacgagcatcaagagatatgatccgggcctgataataataattgcaagaaagcagcatttctctggattaaagtacaactatattaaagtggcaaaaccgtaccgcagccgatatataatggagcgcataattcatcggctgtattattctcgtcgccaaccctacctgcactgacgctgatgcttcatttgcaacttggctctcggatcgcccggatggtgccagccaggctgcacctgcacataaataaattattatccataatattgtaggtgtttttgcatccatcaatccatgttttctccgtttgaagaatctgtacgtacgaaaaggatgtggatgtagtattatacaccactcacgcctggcaatcttttctttgtagctgtgatgtggtaagttcatcggaaaaataaataaatgtcccgg

SEQ ID NO: 23930 - DNA, 1160 bp, Zea Mays
cctgcagctctgctcatgccccccgcccgtgccgcccaattccaaaccttggctgctccccaccgctccgcgcacgtctctctgcgccgccggtccccggctgcgcccccctctgccgaggaagagcacgggcatggcggacgaggcgcatcttaggtctgccgtgccaggcccttgggcggcggattaccgggagaaggccgtccactactgcactacaccatcaatatcggtgattcggtggagtccctttatgtcttctcattggccaactggtgataatgtgatatgagcatcaagcccgagaccattcaatgcggcttatgcgggaccaagctttgccttgttgctcagagctgctgcccgtcctcgtgcggtggaaagcctcagagcggtcggggtgcagcggagacctagccagggccaactaagaaactattcctgattgtgcatgtgatgcacagtgttttccaattgtcaataagagctgtaaagcaacctgcaattttgcggtatgttttgtggctgcttcgtgccccagtatcctgcagcctgtcatacatagctcacacgatttggcctattgcaagttcgcacagcaatacagcatgattccaggcttgcgagatgtttgtcagtgtggctattcttctggctgcaaaaccatttttgtaccctgtctttttaggtgcatgaattgtgagctccaatcaatcaagggtgggcatgttacgagcatcaagagatatgatccgggcctgataataataattgcaagaaagcagcatttctctggattaaagtacaactatattaaagtggcaaaaccgtaccgcagccgatatataatggagcgcataattcatcggctgtattattctcgtcgccaaccctacctgcactgacgctgatgcttcatttgcaacttggctctcggatcgcccggatggtgccagccaggctgcacctgcacataaataaattattatccataatattgtaggtgtttttgcatccatcaatccatgttttctccgtttgaagaatctgtacgtacgaaaaggatgtggatgtagtattatacaccactcacgcctggcaatcttttctttgtagctgtgatgtggtaagttcatcggaaaaataaataaatgtcccgg

SEQ ID NO: 23931 - DNA, 1864 bp, Zea Mays
cctgcagctctgctcatgccccccgcccgtgccgcccaattccaaaccttggctgctccccaccgctccgcgcacgtctctctgcgccgccggtccccggctgcgcccccctctgccgaggaagagcacgggcatggcggacgaggcgcatcttaggtctgccgtgccaggcccttgggcggcggattaccgggagaaggccgtccactactgcactacaccatcaatatcggtgattcggtggagtccctttatgtcttctgtgcgtacactcttcctggtcctagcttaggaactaggagccgagcttatgccatggaccttcttcagctaacccaccacgattatacattttacttgatgattcttctcacagcattggccaactggtgataatgtgatatgagcatcaagcccgagaccattcaatgcggcttatgcgggaccaagctttgccttgttgctcaggtaccgtgggatcaaatatcagtgagttggttttggacaaagaaaccatggatgccgcaaatgacggagaagaaaaatgggaaggtgaaaagtatgagtaccataaagctattggtgctgacagaactttttcgaaattcgagaaacgattattagacaagattgaatatgagcatatcattgaagaatttatttaaaggaaccctaagagaatgaagttgttcaagtaaaattcatacaataaagagttaaataggtatttttttcataaactccatttctatgtactatattacaacattttaatacttacaattatgtttttaaatagtttagtattttatacagggcctcattttctcctggcatggccctgttggtactggggtgaaaccagacattgttcattgtattcttttgtttacagttccccactctgcactattgcagttccccactctgcactattgcttaactctgtgtcaatttaccgtagagctgctgcccgtcctcgtgcggtggaaagcctcagagcggtcggggtgcagcggagacctagccagggccaactaagaaactattcctgattgtgcatgtgatgcacagtgttttccaattgtcaataagagctgtaaagcaacctgcaattttgcggtatgttttgtggctgcttcgtgccccagtatcctgcagcctgtcatacatagctcacacgatttggcctattgcaagttcgcacagcaatacagcatgattccaggcttgcgagatgtttgtcagtgtggctattcttctggctgcaaaaccatttttgtaccctgtctttttaggtgcatgaattgtgagctccaatcaatcaagggtgggcatgttacgagcatcaagagatatgatccggtatgtactatgttcttgcgtttttggcctgtaaacccaccaatctctctccccctccctctctcaaaaggaaatcatttttattgctttctagggcctgataataataattgcaagaaagcagcatttctctggattaaagtacaactatattaaagtggcaaaaccgtaccgcagccgatatataatggagcgcataattcatcggctgtattattctcgtcgccaaccctacctgcactgacgctgatgcttcatttgcaacttggctctcggatcgcccggatggtgccagccaggctgcacctgcacataaataaattattatccataatattgtaggtgtttttgcatccatcaatccatgttttctccgtttgaagaatctgtacgtacgaaaaggatgtggatgtagtattatacaccactcacgcctggcaatcttttctttgtagctgtgatgtggtaagttcatcggaaaaataaataaatgtcccgg

SEQ ID NO: 23932 - DNA, 1293 bp, Zea Mays
ggcgtgacacgattcacgcacgtgacacgtgacggccgggccaagggacagcaaggagcgaaacgctgactgttcacatacggcatgtatggccgggaacaggaaaggtccactactctgctgatgacgctctcatactacaggttaggaaaatatgcaccaccccacccccacccaataggaactgatgaattgctaatttctttgtaaggagaaaatatatcaaacagctatagctatttatatgttggatatatattactaatatgacggacatgttaaaactccagcaaaaagcccaggatgttctgccttacttggatggccgttgcgtttatcttgttggttagttcttggcttctagctccacatcaccagttcacctcaaaccctagcttcatcccatcatcgtagtacgatatttgtgtactttggtatgcaggaatgatgggttcaggcaaaactacagttgggaagatactatccgaagtgttaggttattcgttcttcgacagtgataagttggtagagaaggctgttggtatttcatctgttgctgagatctttcagctccatagcgaaacattcttcagagataatgagagtgaggtcctgacggatctgtcatcaatgcatcggttggttgttgcaaccggaggtggtgcagtgatccgaccaatcaattggagttacatgaagaaagggctgaccgtatggttagatgtcccactggatgcacttgcaagaagaatcgctgctgtaggaaccgcgtctcgaccactcttgcatcaggaatccggtgatccttatgcaaaggcttatgcaaaacttacgtcactttttgagcaaagaatggactcgtatgctaatgctgatgccagagtttcacttgaacatattgcattaaaacaaggccataatgatgtcactatacttacacctagtaccatcgccattgaggcattgctaaagatggaaagttttcttaccgagaagaccatggtcagaaactgacctcttgaatgagagggaaaggatgctgacaacatgtggcccttgtttgtttaattgtacatatacctttgcattattgcctaaactctttctacagtgttgttggattattgtttgtgcagcatgaaagaggaccgtttgagtttgtatttatgcaaatgaataagtaaataactttcagttaaaacaatgacaattcgttatttatctcgatgaatggttgatggggacattagggcattagcatggtactgtcatttcaatattcactatgtcaga

SEQ ID NO: 23933 - DNA, 1328 bp, Zea Mays
ctcctgaacacaccacccctcgtctccccacggaggccgtcctctcctctcctctgcgtccgccactgcccaccgctcgcccgcgcgcgctccattacctcggcgggcgatggccgacctatccaacaccggctccacctaacacgagcagcgcccccgcctaggcggcagctggctggtcggtcgtcgagcagctagcggcggcagcgcccggagggaggccgtctcactctcctcgtcggggcggcaggagatggaggccatcgtgggcgtccgcgcgccgccgcgtggccgtgcctgggccggcctcgagaagccgccgcgcgccgcttgccgcgccagagtcccgacggcgaggctcgcggtcgcggcggacaggccgcggaggctggtgctgctgggcgccgatacgcggagggccgcggatcctgccctccgttgcgccgcgcaatctgcaggaacaggaaaggtccactactctgctgatgacgctctcatactacagcaaaaagcccaggatgttctgccttacttggatggccgttgcgtttatcttgttggaatgatgggttcaggcaaaactacagttgggaagatactatccgaagtgttaggttattcgttcttcgacagtgataagttggtagagaaggctgttggtatttcatctgttgctgagatctttcagctccatagcgaaacattcttcagagataatgaggagttacatgaagaaagggctgaccgtatggttagatgtcccactggatgcacttgcaagaagaatcgctgctgtaggaaccgcgtctcgaccactcttgcatcaggaatccggtgatccttatgcaaaggcttatgcaaaacttacgtcactttttgagcaaagaatggactcgtatgctaatgctgatgccagagtttcacttgaacatattgcattaaaacaaggccataatgatgtcactatacttacacctagtaccatcgccattgaggcattgctaaagatggaaagttttcttaccgagaagaccatggtcagaaactgacctcttgaatgagagggaaaggatgctgacaacatgtggcccttgtttgtttaattgtacatatacctttgcattattgcctaaactctttctacagtgttgttggattattgtttgtgcagcatgaaagaggaccgtttgagtttgtatttatgcaaatgaataagtaaataactttcagttaaaacaatgacaattcgttatttatctcgatgaatggttgatggggacattagggcattagcatggtactgtcatttcaatattcactatgtcaga

SEQ ID NO: 23934 - DNA, 1478 bp, Zea Mays
ctcctgaacacaccacccctcgtctccccacggaggccgtcctctcctctcctctgcgtccgccactgcccaccgctcgcccgcgcgcgctccattacctcggcgggcgatggccgacctatccaacaccggctccacctaacacgagcagcgcccccgcctaggcggcagctggctggtcggtcgtcgagcagctagcggcggcagcgcccggagggaggccgtctcactctcctcgtcggggcggcaggagatggaggccatcgtgggcgtccgcgcgccgccgcgtggccgtgcctgggccggcctcgagaagccgccgcgcgccgcttgccgcgccagagtcccgacggcgaggctcgcggtcgcggcggacaggccgcggaggctggtgctgctgggcgccgatacgcggagggccgcggatcctgccctccgttgcgccgcgcaatctgcaggtggaacaggaaaggtccactactctgctgatgacgctctcatactacaggttaggaaaatatgcaccaccccacccccacccaataggaactgatgaattgctaatttctttgtaaggagaaaatatatcaaacagctatagctatttatatgttggatatatattactaatatgacggacatgttaaaactccagcaaaaagcccaggatgttctgccttacttggatggccgttgcgtttatcttgttggaatgatgggttcaggcaaaactacagttgggaagatactatccgaagtgttaggttattcgttcttcgacagtgataagttggtagagaaggctgttggtatttcatctgttgctgagatctttcagctccatagcgaaacattcttcagagataatgaggagttacatgaagaaagggctgaccgtatggttagatgtcccactggatgcacttgcaagaagaatcgctgctgtaggaaccgcgtctcgaccactcttgcatcaggaatccggtgatccttatgcaaaggcttatgcaaaacttacgtcactttttgagcaaagaatggactcgtatgctaatgctgatgccagagtttcacttgaacatattgcattaaaacaaggccataatgatgtcactatacttacacctagtaccatcgccattgaggcattgctaaagatggaaagttttcttaccgagaagaccatggtcagaaactgacctcttgaatgagagggaaaggatgctgacaacatgtggcccttgtttgtttaattgtacatatacctttgcattattgcctaaactctttctacagtgttgttggattattgtttgtgcagcatgaaagaggaccgtttgagtttgtatttatgcaaatgaataagtaaataactttcagttaaaacaatgacaattcgttatttatctcgatgaatggttgatggggacattagggcattagcatggtactgtcatttcaatattcactatgtcaga

SEQ ID NO: 23935 - DNA, 1663 bp, Zea Mays
ctcctgaacacaccacccctcgtctccccacggaggccgtcctctcctctcctctgcgtccgccactgcccaccgctcgcccgcgcgcgctccattacctcggcgggcgatggccgacctatccaacaccggctccacctaacacgagcagcgcccccgcctaggcggcagctggctggtcggtcgtcgagcagctagcggcggcagcgcccggagggaggccgtctcactctcctcgtcggggcggcaggagatggaggccatcgtgggcgtccgcgcgccgccgcgtggccgtgcctgggccggcctcgagaagccgccgcgcgccgcttgccgcgccagagtcccgacggcgaggctcgcggtcgcggcggacaggccgcggaggctggtgctgctgggcgccgatacgcggagggccgcggatcctgccctccgttgcgccgcgcaatctgcaggaacaggaaaggtccactactctgctgatgacgctctcatactacagcaaaaagcccaggatgttctgccttacttggatggccgttgcgtttatcttgttggaatgatgggttcaggcaaaactacagttgggaagatactatccgaagtgttaggttattcgttcttcgacagtgataagttggtagagaaggctgttggtatttcatctgttgctgagatctttcagctccatagcgaaacattcttcagagataatgaggtaatatgtctttctctctagagatgacaagatttatttattaatttccttactgaaggttgcaagtgtgggaaaagactcccaagtccgcaagccattcatttttgtttctaagaagatcgaattggcaattccgcacctggggctaaaatgctgcaatcgtcgactgacagcattaagttccaattgaagtccttctgtacctgataaccaacttttctgatatcctcttgtttcattcgacttgtcaagagtgaggtcctgacggatctgtcatcaatgcatcggttggttgttgcaaccggaggtggtgcagtgatccgaccaatcaattggagttacatgaagaaagggctgaccgtatggttagatgtcccactggatgcacttgcaagaagaatcgctgctgtaggaaccgcgtctcgaccactcttgcatcaggaatccggtgatccttatgcaaaggcttatgcaaaacttacgtcactttttgagcaaagaatggactcgtatgctaatgctgatgccagagtttcacttgaacatattgcattaaaacaaggccataatgatgtcactatacttacacctagtaccatcgccattgaggcattgctaaagatggaaagttttcttaccgagaagaccatggtcagaaactgacctcttgaatgagagggaaaggatgctgacaacatgtggcccttgtttgtttaattgtacatatacctttgcattattgcctaaactctttctacagtgttgttggattattgtttgtgcagcatgaaagaggaccgtttgagtttgtatttatgcaaatgaataagtaaataactttcagttaaaacaatgacaattcgttatttatctcgatgaatggttgatggggacattagggcattagcatggtactgtcatttcaatattcactatgtcaga

SEQ ID NO: 23936 - DNA, 949 bp, Zea Mays
gccagccctgccactccctatgcgcagcaggagcaaggcgcagcatgatcccaaagagtcagtcgacccagagctcaggggcatggcagcgccccatgcccatgccccaagctatgtagctagtcctgtggccgcgctggcccgtccctcactcccttgctatgtatgctattgctacccatccactatcgatcatcgcgggcataaactaatccggccggctgcggctgcagctactcatcggcaaagctgcagtataaattcaggggagctccatcgacgagtgagctccctgggggaccaggctgggagagcccccccgtcaggccccctcctcctcctggtctcctctcttctatccgagctcggcattcagggctactacacctgcttacatccatcgttcatgcatggtgcatacaatggtatgcgcatatgcactgcattgttcgttcagaataaataagtagaccatgcaactgctacatacacagtggaaaggtttttgatcgagaggcaacgcaattgcaatggtgatcagggtgtggtcgaggtcgatcgtgcatcatggccgcatgcatgcatgggagatgcagcaggcgttggcgtcgtctgtcgccacagcttggatagcggaaccaaaaaaaaaaaagggtcatgtggctagcagcttctgtttattttcactttcttcgttcatcgcatgctcttgttgttcactgttgtactatctagtagttctctttatctggtgcttgcaatctaattctccgcttccttgtcgtgacatttttttttctttcaatggtcgatgtcttcgtcatgaatgctttgtactctgcgtatatcggtatgcagttgtacgtgccctttattaacacttccactgttctatatacttagacattaatagtgtgtttggtttgaggaatgaagtgatccatcttct

SEQ ID NO: 23937 - DNA, 2244 bp, Zea Mays
cgagcgttgtcgcattggtgcatttaccatagaaagaacgcagagcaaattgttcagacttgggacaagcagttccacagctttggcaaggagcagaagatccctttcctttatcttgctaatgacatcttacagaacagcaagcgcaacgggacagagtttgtagaagaattttggaaggttctccctggggcgcttaaagatgtaagtgagaacggtgatgaccgtgggaagaaggtggcatctaggctggttgacatatggcaagaaaggagagtttttggctcacgcgctgggggtatcaaggatgtgatgcttggggcagccccccttcctgttttagatatgaccaaaaaacggtctcgcagttcagcaataaggattgttaaaagagattctcgttctgtgaaactgagactaggcattggaggaactgcagagaggatcatatctgcattgcacactgttctcagtgaacaagcagatgaggatgatgacctggaaaaatgcaagacttctatgcgtcatgttggaaagatggagaaggacgttgacagtgcttgtagcaaagccgaagatcctcgtcgcgaggttctttgcacagaactaaaagatgaggaagctaacatgaaaaaatgcatcgaaaagctaaaagctgttgagaaaaatagagcagctattgtgtttgaactgaaggaggcactgcaggaacaggaatctgaactggagaaagtccgcactcagttacagctgaagcaatggtacatgaagcctcgaacatgcagcggagactcaagaatgagccaaccattccgctgcccagatcagcatcgttagtagagccaggaaaggtggtctccaatgggcaagtaaaggagcagcacaagacggctgctgctatccttgcagacaagattgcagcatcatcaaactctcagcagattctgcagtctgcactttcgaagtttgctgccgaagaagcaaagaattcatctgaaacacgctcagataagaggcaaaaggctgaacaactatcgcaggtaccaagcgtcgcaaatgccgctgcttttgttccaatgccacaagtggttgccacaacagctcagcagcagccccaggcaatcttagtgcaacaagcacctatgcagagccaagccactgcatctcagccccagtacaatatctaccaggccccgccccagcagtttgtccctcagcctggaggtgtaatgatgggcatgccttacaacatgagctccatgaccccaccgcctccaccgccgccccagatgatgagcctaggaaggccctcaccttcagctccacagccccagatggctgtcatgccgcagactcagcctccagcgccaccgatgcttcagcagcagatgccaatgaacctaggtcctcagatgcagttcacccttcaaccgcctggcgtgccgcctttcaggcccatgcagccacctcctgggatgcagtacttccatccccaatctcagtgacagttttggtagcccagccctgttaaacttttgacaggttctcaatttagcgttgactagtaagcaggatctgactgctgtagggtatactgtttgtgtggttcgtttcgacatatgttgttgtactgtacatgtaatgcgaggagaggtaaagagcgaggagagaaatgaagattaaagatttcacataggcctgcttcgttctcgtaaggtggtttggtgggttgaatctgcggctgcaagtgaggtgagttctcttttctcatttttgtgcatgcaggtaaagcttctgggtttcctaaaggggcagagtttatgggcctgattacatcagccgtttttttttggtaccataggcaacgaaatacagaaatattatttttgcatattacaatagcctggagcaaggtggagcttgctcctagtcacctagtgcctcaattagacaacttgccagcatcgcagttccaacctccaagggcagcaagttctgtatgaaaattgaggcagagatgtgctgctgtcttaccccatgcatctgggatgctcttatctaactcaaaacatgatgtaatctctctctagtatgcatgatcccaaccccaagaacatccttatatggaggaggaaacaaagtgtgatcttgcaggcaatagatagcctgcgggaacatgcattgactggatgttgcgaatttacctggtaaatatttatataggttacatctaattcagtacta

SEQ ID NO: 23938 - DNA, 2520 bp, Zea Mays
acgcttacactcttctttagttcttacctcttcaaaccctagcctccctgatccatccgcacctcgaaatttcggcagccgatgcctccgccatcgccgccgtggtcgcctagcacctcttctatctaggtttcgtcggtccctcttcttcctgcgccctcaagatctgcgcgacgacctgagctctccgtgctgtttagggcggccatgaacagcgcgttcagcgaggacatactcgctggcaagctcgccaagctcaacaacacgcagcaatgcatcgagacgttgtcgcattggtgcatttaccatagaaagaacgcagagcaaattgttcagacttgggacaagcagttccacagctttggcaaggagcagaagatccctttcctttatcttgctaatgacatcttacagaacagcaagcgcaacgggacagagtttgtagaagaattttggaaggttctccctggggcgcttaaagatgtaagtgagaacggtgatgaccgtgggaagaaggtggcatctaggctggttgacatatggcaagaaaggagagtttttggctcacgcgctgggggtatcaaggatgtgatgcttggggcagccccccttcctgttttagatatgaccaaaaaacggtctcgcagttcagcaataaggattgttaaaagagattctcgttctgtgaaactggcattggaggaactgcagagaggatcatatctgcattgcacactgttctcagtgaacaagcagatgaggatgatgacctggaaaaatgcaagacttctatgcgtcatgttggaaagatggagaaggacgttgacagtgcttgtagcaaagccgaagatcctcgtcgcgaggttctttgcacagaactaaaagatgaggaagctaacatgaaaaaatgcatcgaaaagctaaaagctgttgagaaaaatagagcagctattgtgtttgaactgaaggaggcactgcaggaacaggaatctgaactggagaaagtccgcactcagttacagctagctgaagcaatggtacatgaagcctcgaacatgcagcggagactcaagaatgagccaaccattccgctgcccagatcagcatcgttagtagagccaggaaaggtggtctccaatgggcaagtaaaggagcagcacaagacggctgctgctatccttgcagacaagattgcagcatcatcaaactctcagcagattctgcagtctgcactttcgaagtttgctgccgaagaagcaaagaattcatctgaaacacgctcagataagaggcaaaaggctgaacaactatcgcaggtaccaagcgtcgcaaatgccgctgcttttgttccaatgccacaagtggttgccacaacagctcagcagcagccccaggcaatcttagtgcaacaagcacctatgcagagccaagccactgcatctcagccccagtacaatatctaccaggccccgccccagcagtttgtccctcagcctggaggtgtaatgatgggcatgccttacaacatgagctccatgaccccaccgcctccaccgccgccccagatgatgagcctaggaaggccctcaccttcagctccacagccccagatggctgtcatgccgcagactcagcctccagcgccaccgatgcttcagcagcagatgccaatgaacctaggtcctcagatgcagttcacccttcaaccgcctggcgtgccgcctttcaggcccatgcagccacctcctgggatgcagtacttccatccccaatctcagtgacagttttggtagcccagccctgttaaacttttgacaggttctcaatttagcgttgactagtaagcaggatctgactgctgtagggtatactgtttgtgtggttcgtttcgacatatgttgttgtactgtacatgtaatgcgaggagaggtaaagagcgaggagagaaatgaagattaaagatttcacataggcctgcttcgttctcgtaaggtggtttggtgggttgaatctgcggctgcaagtgaggtgagttctcttttctcatttttgtgcatgcaggtaaagcttctgggtttcctaaaggggcagagtttatgggcctgattacatcagccgtttttttttggtaccataggcaacgaaatacagaaatattatttttgcatattacaatagcctggagcaaggtggagcttgctcctagtcacctagtgcctcaattagacaacttgccagcatcgcagttccaacctccaagggcagcaagttctgtatgaaaattgaggcagagatgtgctgctgtcttaccccatgcatctgggatgctcttatctaactcaaaacatgatgtaatctctctctagtatgcatgatcccaaccccaagaacatccttatatggaggaggaaacaaagtgtgatcttgcaggcaatagatagcctgcgggaacatgcattgactggatgttgcgaatttacctggtaaatatttatataggttacatctaattcagtacta

SEQ ID NO: 23939 - DNA, 1040 bp, Zea Mays
attatagtcatctttcatgtttccagcctccttacttaccaggctttgccgtttagcatttagaaccccaccctgttagaatggaacctggccaagcattcagttcttttgtgtcaataagactacagcagaaatgcagaatgtcttggagagtatagttgaaaatcggggaatgagttaatgttcttgctgcttgacatatctagtttatcatgggtcctatctgtggtgtgccagacttcaagatgaggggaaagaagagtgatgagctcgaacctgtcgatgctggcgatgaagatgatgatggtggtgacgatggggacgaggatggtgactttggggaggagggtgaagaggacgtctcagaaggggagggatatgacaacccaaagggcaatgagaccaagaagcaaagaggtgatcctgaggaaaatggtgaggaagatgaggaagaaccagaagatcaggagggtggcggcgacgacgatgatgacgacgatgacgatgatgagaacggggatgacgaggacgacgacaatggggatgacgatgaggagggtgtagatgaagaagacgatgaccaggacgaggatgaggaggaagatgatgatgaagactcgctccagcccccaaagaagaggaagaagtgaagatcttctgccgctttagttaccgtgcgctgagttctgcctggcttttcgtcatatcctcgcatttcaactttcccatagagagttaagaaggatccacacgttcagcagcacgtgtgggcttgtaggagctttatgatttgaggcaattagggacaactcttatgtcattgttgcttgcttctgtggagtcgaacagatgtttcgctaacataattcgacttgagtgatgaaagcctccagattgaatatgccttctcttttatctcgtatggaatcattgatgcagccctggttgatagcgttccttcaataaatgaattatattggcatcatgacagcttcatgtgaattgcacgtttatactgtgcgttcaaatctcaactaatg

SEQ ID NO: 23940 - DNA, 931 bp, Zea Mays
aaaggtctttctttcttaaacgccaagcctgtccgccgtcctttgccgcttgcatttcactgcgagttgcgaccgccaagttggtccacagttacttaacagtgcgggtcctatctgtggtgtgccagacttcaagatgaggggaaagaagagtgatgagctcgaacctgtcgatgctggcgatgaagatgatgatggtggtgacgatggggacgaggatggtgactttggggaggagggtgaagaggacgtctcagaaggggagggatatgacaacccaaagggcaatgagaccaagaagcaaagaggtgatcctgaggaaaatggtgaggaagatgaggaagaaccagaagatcaggagggtggcggcgacgacgatgatgacgacgatgacgatgatgagaacggggatgacgaggacgacgacaatggggatgacgatgaggagggtgtagatgaagaagacgatgaccaggacgaggatgaggaggaagatgatgatgaagactcgctccagcccccaaagaagaggaagaagtgaagatcttctgccgctttagttaccgtgcgctgagttctgcctggcttttcgtcatatcctcgcatttcaactttcccatagagagttaagaaggatccacacgttcagcagcacgtgtgggcttgtaggagctttatgatttgaggcaattagggacaactcttatgtcattgttgcttgcttctgtggagtcgaacagatgtttcgctaacataattcgacttgagtgatgaaagcctccagattgaatatgccttctcttttatctcgtatggaatcattgatgcagccctggttgatagcgttccttcaataaatgaattatattggcatcatgacagcttcatgtgaattgcacgtttatactgtgcgttcaaatctcaactaatg

SEQ ID NO: 23941 - DNA, 1008 bp, Zea Mays
tccgcgcccccgaatattcgcttctcatgacaccgaaagattcctactcgatctccagatattttcccccgcctcgtcaacagcccgtggggtttttctttttcttttcccttccatctagaaaaaccggcgagaagctgctgtcccgtttcagtggcttaacttctaagcaacatgtttcagggtcctatctgtggtgtgccagacttcaagatgaggggaaagaagagtgatgagctcgaacctgtcgatgctggcgatgaagatgatgatggtggtgacgatggggacgaggatggtgactttggggaggagggtgaagaggacgtctcagaaggggagggatatgacaacccaaagggcaatgagaccaagaagcaaagaggtgatcctgaggaaaatggtgaggaagatgaggaagaaccagaagatcaggagggtggcggcgacgacgatgatgacgacgatgacgatgatgagaacggggatgacgaggacgacgacaatggggatgacgatgaggagggtgtagatgaagaagacgatgaccaggacgaggatgaggaggaagatgatgatgaagactcgctccagcccccaaagaagaggaagaagtgaagatcttctgccgctttagttaccgtgcgctgagttctgcctggcttttcgtcatatcctcgcatttcaactttcccatagagagttaagaaggatccacacgttcagcagcacgtgtgggcttgtaggagctttatgatttgaggcaattagggacaactcttatgtcattgttgcttgcttctgtggagtcgaacagatgtttcgctaacataattcgacttgagtgatgaaagcctccagattgaatatgccttctcttttatctcgtatggaatcattgatgcagccctggttgatagcgttccttcaataaatgaattatattggcatcatgacagcttcatgtgaattgcacgtttatactgtgcgttcaaatctcaactaatg

SEQ ID NO: 23942 - DNA, 1607 bp, Zea Mays
aagaagcgatttacgcatatgccccctccagccatcagtagccacgggctatcctgcgcccaccacctgccctcctgccttcgtcctgcccggcgcctctgccctcctccgggctccacagagtgaaaaagtctcctcttttcctcttcctctcccgttgccaggcatggggttggcctagttgtgcccgttgagcactagcagcctccttgaaacctccagatctgtgcctccaaggcccccgttcctcggcaacaaggtaacctccctgttcctgctccctttcctgactactggtgatgaggatgatcctatccggtgcctcctctgttaacgcctagtcctgtcgtttcaatcagctgtttcctgttagtttttcctctcctgcagtgtctacctttttcatatgcatgtttatgggataataatgtttcccttgcagcagaacagatacttgaccgaacattgcaggttctctcctcacgcgagaggagctgaaaaagtagtagcgccctcttgttcatcccatatttttgtttgtttgttttgcaccccaagttcccaagagcttttctttgcctgacagttgtacttgcgcccctgcggagcaaatctaagattgggtttttgctaaaattagtcccatctgacggaccttgttccctgtgcccgcccacgtggcctcctctgcagccgtccagatggacaccgccgcgcccctgcaactgaaagcctgcgccggcgacgccgcggagaagctgctgctcgccgtcgcagccgagggtcctatctgtggtgtgccagacttcaagatgaggggaaagaagagtgatgagctcgaacctgtcgatgctggcgatgaagatgatgatggtggtgacgatggggacgaggatggtgactttggggaggagggtgaagaggacgtctcagaaggggagggatatgacaacccaaagggcaatgagaccaagaagcaaagaggtgatcctgaggaaaatggtgaggaagatgaggaagaaccagaagatcaggagggtggcggcgacgacgatgatgacgacgatgacgatgatgagaacggggatgacgaggacgacgacaatggggatgacgatgaggagggtgtagatgaagaagacgatgaccaggacgaggatgaggaggaagatgatgatgaagactcgctccagcccccaaagaagaggaagaagtgaagatcttctgccgctttagttaccgtgcgctgagttctgcctggcttttcgtcatatcctcgcatttcaactttcccatagagagttaagaaggatccacacgttcagcagcacgtgtgggcttgtaggagctttatgatttgaggcaattagggacaactcttatgtcattgttgcttgcttctgtggagtcgaacagatgtttcgctaacataattcgacttgagtgatgaaagcctccagattgaatatgccttctcttttatctcgtatggaatcattgatgcagccctggttgatagcgttccttcaataaatgaattatattggcatcatgacagcttcatgtgaattgcacgtttatactgtgcgttcaaatctcaactaatg

SEQ ID NO: 23943 - DNA, 2589 bp, Zea Mays
atttattctacctctttccaatgtcccattttccttgtgaatcactagtgtcgcaaatcccaatctcccagcttgcgcctaaaccctagcttgcctatcgatggcgccgaagaagcgcaaggccgatcccgccgagtcccccgccgccgtggaggcagccaccaccaaccaccgccacgagccggcgtcctcggagcccaagccacgcggctccatctacttccccatcactgacgacccgcccgaacccaacgccgccgaagaggacgaggacgagggcgccggcgacgacgaggacgacgcggaggacattgtcaagctacttgagccgctgtcgcgggagcagctcgttgcgctgctccgcacggcggcggaggcgagccccgccacgatggcggccgtccgccgcgccgttgaggccgaccctgccagcaggaagctcttcgtccacggtctcggatggggtgccggcgccgaggacctccgctccgccttctcacgcttcggcgagctcgaggactgccgcgtcatctctgacaagcaatctggtagatccaagggctacgggttcgtcctcttccgctcccgccgctctgcgctccgcgccctcaaccgccctcagctccaaatcggtggtcgtcttgctttctgtcacctcgccgcctcaggccccgcacccccagctcagtctcagaaccctatctccaacgccaaccccaatgctaactctaactccacgagcaacgcttctggatcctcatcatcacaaactgacaatatacaacgcaagatatttgttggtaatgtgcatgctgatgtggacgtggaccgcctatatgagtattttgcacaatttggtgagattgaagagggcccgttgggctttgacaagaacactggcagaccaaagggatttgcattatttgtttacaagtctgtggagagtgctcgccgtgctttggaggagccaataaagaattttgatggaaagacactcaatgtgcagaaagccatagatgggaggaccaagggctcatctggaatgaatacaaatactaactccaatcccactactgcatctgtggtcgccgcccagatgactgctccttccagtgttgccatcagcccatatgatgcatcagcatatagtgctactgtggttcctgacatgagttttgcacagcaagctgctatgctgggattaggtgcacagcaacaggcattcactcaacccaatgcaatgcttgccatgatagcagcaatgcagaacccagctgcgctagggatgagtccagccatgcttgctgctatgaacccagccttcgccgctgctgcattgggtgcaggggggcagcaggcacacacagttggtcttacaggttttggagctcagggttttgggacaccgtcgtttggagcaggtgccgctttcccaaatgcagcaggtgttcaagcagcagcagctgcatatcaaggaagtggagctcctcctggctttcaagggccacctgggtttcaggttggccaggcaactacccagacaagcactgcagcggcagcggctgccgcagctgccactgctgctggttatcaggctggggcatctgggcagggccaggtgcctggttctcaggtcggaggcactggttttcagggtggatattgacagaactagccgtccagatggacaccgccgcgcccctgcaactgaaagcctgcgccggcgacgccgcggagaagctgctgctcgccgtcgcagccgagggtcctatctgtggtgtgccagacttcaagatgaggggaaagaagagtgatgagctcgaacctgtcgatgctggcgatgaagatgatgatggtggtgacgatggggacgaggatggtgactttggggaggagggtgaagaggacgtctcagaaggggagggatatgacaacccaaagggcaatgagaccaagaagcaaagaggtgatcctgaggaaaatggtgaggaagatgaggaagaaccagaagatcaggagggtggcggcgacgacgatgatgacgacgatgacgatgatgagaacggggatgacgaggacgacgacaatggggatgacgatgaggagggtgtagatgaagaagacgatgaccaggacgaggatgaggaggaagatgatgatgaagactcgctccagcccccaaagaagaggaagaagtgaagatcttctgccgctttagttaccgtgcgctgagttctgcctggcttttcgtcatatcctcgcatttcaactttcccatagagagttaagaaggatccacacgttcagcagcacgtgtgggcttgtaggagctttatgatttgaggcaattagggacaactcttatgtcattgttgcttgcttctgtggagtcgaacagatgtttcgctaacataattcgacttgagtgatgaaagcctccagattgaatatgccttctcttttatctcgtatggaatcattgatgcagccctggttgatagcgttccttcaataaatgaattatattggcatcatgacagcttcatgtgaattgcacgtttatactgtgcgttcaaatctcaactaatg

SEQ ID NO: 23944 - DNA, 6530 bp, Zea Mays
atttattctacctctttccaatgtcccattttccttgtgaatcactagtgtcgcaaatcccaatctcccagcttgcgcctaaaccctagcttgcctatcgatggcgccgaagaagcgcaaggccgatcccgccgagtcccccgccgccgtggaggcagccaccaccaaccaccgccacgagccggcgtcctcggagcccaagccacgcggctccatctacttccccatcactgacgacccgcccgaacccaacgccgccgaagaggacgaggacgagggcgccggcgacgacgaggacgacgcggaggacattgtcaagctacttgagccgctgtcgcgggagcagctcgttgcgctgctccgcacggcggcggaggcgagccccgccacgatggcggccgtccgccgcgccgttgaggccgaccctgccagcaggaagctcttcgtccacggtctcggatggggtgccggcgccgaggacctccgctccgccttctcacgcttcggcgagctcgaggactgccgcgtcatctctgacaagcaatctggtagatccaagggctacgggttcgtcctcttccgctcccgccgctctgcgctccgcgccctcaaccgccctcagctccaaatcggtggtcgtcttgctttctgtcacctcgccgcctcaggccccgcacccccagctcagtctcagaaccctatctccaacgccaaccccaatgctaactctaactccacgagcaacgcttctggatcctcatcatcacaaactgacaatatacaacgcaagatatttgttggtaatgtgcatgctgatgtggacgtggaccgcctatatgagtattttgcacaatttggtgagattgaagagggcccgttgggctttgacaagaacactggcagaccaaagggatttgcattatttgtttacaagtctgtggagagtgctcgccgtgctttggaggagccaataaagaattttgatggaaagacactcaatgtgcagaaagccatagatgggaggaccaagggctcatctggaatgaatacaaatactaactccaatcccactactgcatctgtggtcgccgcccagatgactgctccttccagtgttgccatcagcccatatgatgcatcagcatatagtgctactgtggttcctgacatgagttttgcacagcaagctgctatgctgggattaggtgcacagcaacaggcattcactcaacccaatgcaatgcttgccatgatagcagcaatgcagaacccagctgcgctagggatgagtccagccatgcttgctgctatgaacccagccttcgccgctgctgcattgggtgcaggggggcagcaggcacacacagttggtcttacaggttttggagctcagggttttgggacaccgtcgtttggagcaggtgccgctttcccaaatgcagcaggtgttcaagcagcagcagctgcatatcaaggaagtggagctcctcctggctttcaagggccacctgggtttcaggttggccaggcaactacccagacaagcactgcagcggcagcggctgccgcagctgccactgctgctggttatcaggctggggcatctgggcagggccaggtgcctggttctcaggtcggaggcactggttttcagggtggatattgacagaactagccatctgattattttccttgtatcttagtttggcatctgtggtccgtggttcgttcatgtggttttgcattcggatggcttttgagtctatattggtgccaaaatgtagcgaaaggcttcctgctgttgaattttacaactggatttgaaccagatgcctttgtagcagtatttgaaggaggaactttcttgaaggatcatatcgttttattgcctaatatgtagttttgctattgcggcttcattatgtactttgtggatgtgtactgggtttcatgtatcaaaatatctgtattttgactagttggctgttacctggtcttatcaaccgtgttaaatggttttgtgggcacaattggagacattttaactgcagttcctgggctgtttggagctatggggtatttatggcttttgccttaaacctggaaatttcttctctgcggatggtttcgacgaccactacatttaagatcttgaatgtgttgcagctttgttgcacttctaagtttatttttaaaattcccagtgtttaacagtagccgcgcaaaatagcttgaatgttaagtggttatacaatcccataagggctagtttggaaacacaaatccccttggggattgagagggaaattagttcatttccacctcaatcctctccaatccccaaggggatttgagtatacaaactagccctaaaagagatgatttgacctgacggatggtttgcatatggtatctctgggaatttagtgttcattctttgaaaatattttggagctctttcttttgccttactgtgacaatggtcatgtcttgacagttgacacttcataactgtattactgattactttagtgtctccattttctcaactaccccactttatgttgatttttttcatggattgcctatgtgaggatgtactgttcatatatgcacaataagaatttcaaaagaagactgttcttgctttgttcttattagacccaatatgcactaaatgttagattagtagatgttttttcttactgctggtagaatactaggttgctgaccattggagtgttaaatcgtcatgtgaaccatgaataggccaagatgaaactgtcaagtggatgaatatcaataaattttaatccttgtgcatgcaaccatgctgtctttttcttttcacgacatgaaagtagtattgtgaaatcattgtgtttatttcatcaacagaattagtattgctactgatgatcttacatcactcgcttgccattctgtcttggtctgttgtgcaatgcatgtctctggatattatagatagtgctgcctgctatatttcaagtaatacatttgacacttcgcacttcctaactaaccaaacatcacttgccaaatcacaatttataaaacacagtaccagttccacccactagagttgaaagcacacttggaggtaattagtgcgcagaggcggcatctggtcagcagtggcaggggagtcctgagccctgggttccttctgccttctaatgtgctggatggcccatgccagactaggctaccttctgtttcacatttctgttatttaattttcttattacgttcaaggactaatgataccctctctttcagaccatttgctatcacatccctcctcttgccttccccaatctagacaaatgccttgccatgatgcaaattgcatttgctgacaattctttatttggttcagtgcttaaaaatatccagcataaacttggtgttcacttaatcgctttcaattgcataggttgaacattaaccctgaaacagagaaagattattcagttagtgtatactccttgttccaaaaggtgtcattcccctgccacctaggcacgcttatgtgctatgtgttggggtaccgtggagcctaggggggtaggtgttatctaggtggctcctgtcggccacggtggttggacatgctatccctggtgcccttatgtgcagatccggatgctgagcggcatgggagaaggttggaacagtgggtggcggcgggggaggaggcatgtatggtgggtgccagggagatgtggacgtcgagcagcaaaggcagtctatgggcggtgatggagatgggaaatgcagctgcaatgcagcggatatgataggcatggttgagaggaggctggcagcggcagaggcagcgacagtcagacggaagggatgaggctggccgcgacggagaaggaagagacagtagcgtggcagtggagaagggacgaagagtcgtgcggtgatggagttctgcgaactggtgcgtgtggctgggaggagagatggatggataaggtgggctctgttttgatggtcctttctgtccagctaggttcatacatctctagtttcttctctttttcatggtaatatataaatgtgtaaaacgcctaggcgcacctaggcttacttatggggtgtttggtttgaggaatgagctagtccatcatcttcacatcccttgtttttttggtttgtggaatggaatgagttgatccatttccacctcattcctcatagttagttagttagtactaatatgaggaatgaggtcatcccaccaaatatgaggaatggacccatgatgcaccacctcattttggatggagtgattcctcaaaccaaacacccccttaggctctaggcagaggggtcactaccttgtgtatactagtagtgcaatagtgccaaattgaccaactttagttaaaaaaatataatcaacaaatttctgactattagtttacagaaagtagaaccataacctgccaaaattttgcaggtggtagaccattctaattttcaattaccttctgtagggaactgtcaacgcagttgatagctaacagttgtaaatggtcattgactattgacagtttctgggatttcataatccatatttccctcacagaacaattgacctttttttgtcacttctagttttttcccgaacttcaacaaaagcacctcgctgaacaattgttctttttttgggggtcacttctagtttttgccttgctgtcaacagagctacttgttttgatagttacactcttgtgatcgaatgtcaatatttctttatagctaattattgtcatgattatgctttctaagcttgattgtctccctaacagttgttgatatgttatgttgctattcttgtgttgccatatacttaagggcttgttcggttcgctctcaatccatgtggattgagtgtgattgggcgggtttaaatcccaagcaagtcaaacttaatttttttcaatcccatacaatccatgtgtaatgtgtaatgggaataaccgaacaatgtctaaatgtgtttgcattcttattatgatatctcttaagcctctgttgagcacacgatcattgttctcaattttttatacatcatcctatttttattgagcttatttcgagttatgtttgacctgatactccaggttcatttggtttaggattttcatcagttgttcagtgcagtcttaattaatgactctgagccaaaaaaatcttaatatacttggtctgatttttagattctccagacagaattataaaaattaattataatggatctctatgaggtcatttgcgtaatgatgaccatatccagccaatgttacacactttccggactgatgttgcaataaattttttcccctgtttacgatcatggattcataattggggctcgtaatatctgtcacttattatgtgcatttcagaaatattctgaatcggaatctagtggacttgctttgcgttgcatgaactatttatgggtatgggcacggtttggcctggttccttgcggggccattggcttattgtgctacaaggatggcagagctataatactatttatccagcacagtcggtgcctcacaaaccggaaagccgtccagatggacaccgccgcgcccctgcaactgaaagcctgcgccggcgacgccgcggagaagctgctgctcgccgtcgcagccgagggtcctatctgtggtgtgccagacttcaagatgaggggaaagaagagtgatgagctcgaacctgtcgatgctggcgatgaagatgatgatggtggtgacgatggggacgaggatggtgactttggggaggagggtgaagaggacgtctcagaaggggagggatatgacaacccaaagggcaatgagaccaagaagcaaagaggtgatcctgaggaaaatggtgaggaagatgaggaagaaccagaagatcaggagggtggcggcgacgacgatgatgacgacgatgacgatgatgagaacggggatgacgaggacgacgacaatggggatgacgatgaggagggtgtagatgaagaagacgatgaccaggacgaggatgaggaggaagatgatgatgaagactcgctccagcccccaaagaagaggaagaagtgaagatcttctgccgctttagttaccgtgcgctgagttctgcctggcttttcgtcatatcctcgcatttcaactttcccatagagagttaagaaggatccacacgttcagcagcacgtgtgggcttgtaggagctttatgatttgaggcaattagggacaactcttatgtcattgttgcttgcttctgtggagtcgaacagatgtttcgctaacataattcgacttgagtgatgaaagcctccagattgaatatgccttctcttttatctcgtatggaatcattgatgcagccctggttgatagcgttccttcaataaatgaattatattggcatcatgacagcttcatgtgaattgcacgtttatactgtgcgttcaaatctcaactaatg

SEQ ID NO: 23945 - DNA, 6502 bp, Zea Mays
atttattctacctctttccaatgtcccattttccttgtgaatcactagtgtcgcaaatcccaatctcccagcttgcgcctaaaccctagcttgcctatcgatggcgccgaagaagcgcaaggccgatcccgccgagtcccccgccgccgtggaggcagccaccaccaaccaccgccacgagccggcgtcctcggagcccaagccacgcggctccatctacttccccatcactgacgacccgcccgaacccaacgccgccgaagaggacgaggacgagggcgccggcgacgacgaggacgacgcggaggacattgtcaagctacttgagccgctgtcgcgggagcagctcgttgcgctgctccgcacggcggcggaggcgagccccgccacgatggcggccgtccgccgcgccgttgaggccgaccctgccagcaggaagctcttcgtccacggtctcggatggggtgccggcgccgaggacctccgctccgccttctcacgcttcggcgagctcgaggactgccgcgtcatctctgacaagcaatctggtagatccaagggctacgggttcgtcctcttccgctcccgccgctctgcgctccgcgccctcaaccgccctcagctccaaatcggtggtcgtcttgctttctgtcacctcgccgcctcaggccccgcacccccagctcagtctcagaaccctatctccaacgccaaccccaatgctaactctaactccacgagcaacgcttctggatcctcatcatcacaaactgacaatatacaacgcaagatatttgttggtaatgtgcatgctgatgtggacgtggaccgcctatatgagtattttgcacaatttggtgagattgaagagggcccgttgggctttgacaagaacactggcagaccaaagggatttgcattatttgtttacaagtctgtggagagtgctcgccgtgctttggaggagccaataaagaattttgatggaaagacactcaatgtgcagaaagccatagatgggaggaccaagggctcatctggaatgaatacaaatactaactccaatcccactactgcatctgtggtcgccgcccagatgactgctccttccagtgttgccatcagcccatatgatgcatcagcatatagtgctactgtggttcctgacatgagttttgcacagcaagctgctatgctgggattaggtgcacagcaacaggcattcactcaacccaatgcaatgcttgccatgatagcagcaatgcagaacccagctgcgctagggatgagtccagccatgcttgctgctatgaacccagccttcgccgctgctgcattgggtgcaggggggcagcaggcacacacagttggtcttacaggttttggagctcagggttttgggacaccgtcgtttggagcaggtgccgctttcccaaatgcagcaggtgttcaagcagcagcagctgcatatcaaggaagtggagctcctcctggctttcaagggccacctgggtttcaggttggccaggcaactacccagacaagcactgcagcggcagcggctgccgcagctgccactgctgctggttatcaggctggggcatctgggcagggccaggtgcctggttctcaggtcggaggcactggttttcagggtggatattgacagaactagtttggcatctgtggtccgtggttcgttcatgtggttttgcattcggatggcttttgagtctatattggtgccaaaatgtagcgaaaggcttcctgctgttgaattttacaactggatttgaaccagatgcctttgtagcagtatttgaaggaggaactttcttgaaggatcatatcgttttattgcctaatatgtagttttgctattgcggcttcattatgtactttgtggatgtgtactgggtttcatgtatcaaaatatctgtattttgactagttggctgttacctggtcttatcaaccgtgttaaatggttttgtgggcacaattggagacattttaactgcagttcctgggctgtttggagctatggggtatttatggcttttgccttaaacctggaaatttcttctctgcggatggtttcgacgaccactacatttaagatcttgaatgtgttgcagctttgttgcacttctaagtttatttttaaaattcccagtgtttaacagtagccgcgcaaaatagcttgaatgttaagtggttatacaatcccataagggctagtttggaaacacaaatccccttggggattgagagggaaattagttcatttccacctcaatcctctccaatccccaaggggatttgagtatacaaactagccctaaaagagatgatttgacctgacggatggtttgcatatggtatctctgggaatttagtgttcattctttgaaaatattttggagctctttcttttgccttactgtgacaatggtcatgtcttgacagttgacacttcataactgtattactgattactttagtgtctccattttctcaactaccccactttatgttgatttttttcatggattgcctatgtgaggatgtactgttcatatatgcacaataagaatttcaaaagaagactgttcttgctttgttcttattagacccaatatgcactaaatgttagattagtagatgttttttcttactgctggtagaatactaggttgctgaccattggagtgttaaatcgtcatgtgaaccatgaataggccaagatgaaactgtcaagtggatgaatatcaataaattttaatccttgtgcatgcaaccatgctgtctttttcttttcacgacatgaaagtagtattgtgaaatcattgtgtttatttcatcaacagaattagtattgctactgatgatcttacatcactcgcttgccattctgtcttggtctgttgtgcaatgcatgtctctggatattatagatagtgctgcctgctatatttcaagtaatacatttgacacttcgcacttcctaactaaccaaacatcacttgccaaatcacaatttataaaacacagtaccagttccacccactagagttgaaagcacacttggaggtaattagtgcgcagaggcggcatctggtcagcagtggcaggggagtcctgagccctgggttccttctgccttctaatgtgctggatggcccatgccagactaggctaccttctgtttcacatttctgttatttaattttcttattacgttcaaggactaatgataccctctctttcagaccatttgctatcacatccctcctcttgccttccccaatctagacaaatgccttgccatgatgcaaattgcatttgctgacaattctttatttggttcagtgcttaaaaatatccagcataaacttggtgttcacttaatcgctttcaattgcataggttgaacattaaccctgaaacagagaaagattattcagttagtgtatactccttgttccaaaaggtgtcattcccctgccacctaggcacgcttatgtgctatgtgttggggtaccgtggagcctaggggggtaggtgttatctaggtggctcctgtcggccacggtggttggacatgctatccctggtgcccttatgtgcagatccggatgctgagcggcatgggagaaggttggaacagtgggtggcggcgggggaggaggcatgtatggtgggtgccagggagatgtggacgtcgagcagcaaaggcagtctatgggcggtgatggagatgggaaatgcagctgcaatgcagcggatatgataggcatggttgagaggaggctggcagcggcagaggcagcgacagtcagacggaagggatgaggctggccgcgacggagaaggaagagacagtagcgtggcagtggagaagggacgaagagtcgtgcggtgatggagttctgcgaactggtgcgtgtggctgggaggagagatggatggataaggtgggctctgttttgatggtcctttctgtccagctaggttcatacatctctagtttcttctctttttcatggtaatatataaatgtgtaaaacgcctaggcgcacctaggcttacttatggggtgtttggtttgaggaatgagctagtccatcatcttcacatcccttgtttttttggtttgtggaatggaatgagttgatccatttccacctcattcctcatagttagttagttagtactaatatgaggaatgaggtcatcccaccaaatatgaggaatggacccatgatgcaccacctcattttggatggagtgattcctcaaaccaaacacccccttaggctctaggcagaggggtcactaccttgtgtatactagtagtgcaatagtgccaaattgaccaactttagttaaaaaaatataatcaacaaatttctgactattagtttacagaaagtagaaccataacctgccaaaattttgcaggtggtagaccattctaattttcaattaccttctgtagggaactgtcaacgcagttgatagctaacagttgtaaatggtcattgactattgacagtttctgggatttcataatccatatttccctcacagaacaattgacctttttttgtcacttctagttttttcccgaacttcaacaaaagcacctcgctgaacaattgttctttttttgggggtcacttctagtttttgccttgctgtcaacagagctacttgttttgatagttacactcttgtgatcgaatgtcaatatttctttatagctaattattgtcatgattatgctttctaagcttgattgtctccctaacagttgttgatatgttatgttgctattcttgtgttgccatatacttaagggcttgttcggttcgctctcaatccatgtggattgagtgtgattgggcgggtttaaatcccaagcaagtcaaacttaatttttttcaatcccatacaatccatgtgtaatgtgtaatgggaataaccgaacaatgtctaaatgtgtttgcattcttattatgatatctcttaagcctctgttgagcacacgatcattgttctcaattttttatacatcatcctatttttattgagcttatttcgagttatgtttgacctgatactccaggttcatttggtttaggattttcatcagttgttcagtgcagtcttaattaatgactctgagccaaaaaaatcttaatatacttggtctgatttttagattctccagacagaattataaaaattaattataatggatctctatgaggtcatttgcgtaatgatgaccatatccagccaatgttacacactttccggactgatgttgcaataaattttttcccctgtttacgatcatggattcataattggggctcgtaatatctgtcacttattatgtgcatttcagaaatattctgaatcggaatctagtggacttgctttgcgttgcatgaactatttatgggtatgggcacggtttggcctggttccttgcggggccattggcttattgtgctacaaggatggcagagctataatactatttatccagcacagtcggtgcctcacaaaccggaaagccgtccagatggacaccgccgcgcccctgcaactgaaagcctgcgccggcgacgccgcggagaagctgctgctcgccgtcgcagccgagggtcctatctgtggtgtgccagacttcaagatgaggggaaagaagagtgatgagctcgaacctgtcgatgctggcgatgaagatgatgatggtggtgacgatggggacgaggatggtgactttggggaggagggtgaagaggacgtctcagaaggggagggatatgacaacccaaagggcaatgagaccaagaagcaaagaggtgatcctgaggaaaatggtgaggaagatgaggaagaaccagaagatcaggagggtggcggcgacgacgatgatgacgacgatgacgatgatgagaacggggatgacgaggacgacgacaatggggatgacgatgaggagggtgtagatgaagaagacgatgaccaggacgaggatgaggaggaagatgatgatgaagactcgctccagcccccaaagaagaggaagaagtgaagatcttctgccgctttagttaccgtgcgctgagttctgcctggcttttcgtcatatcctcgcatttcaactttcccatagagagttaagaaggatccacacgttcagcagcacgtgtgggcttgtaggagctttatgatttgaggcaattagggacaactcttatgtcattgttgcttgcttctgtggagtcgaacagatgtttcgctaacataattcgacttgagtgatgaaagcctccagattgaatatgccttctcttttatctcgtatggaatcattgatgcagccctggttgatagcgttccttcaataaatgaattatattggcatcatgacagcttcatgtgaattgcacgtttatactgtgcgttcaaatctcaactaatg

SEQ ID NO: 23946 - DNA, 2763 bp, Zea Mays
cagtaaggactttacattaaggctcaattatcacgggcctttcggcgccgccaggcctccgttatcaaggtttaggtctggtgtgtactgtatttattctacctctttccaatgtcccattttccttgtgaatcactagtgtcgcaaatcccaatctcccagcttgcgcctaaaccctagcttgcctatcgatggcgccgaagaagcgcaaggccgatcccgccgagtcccccgccgccgtggaggcagccaccaccaaccaccgccacgagccggcgtcctcggagcccaagccacgcggctccatctacttccccatcactgacgacccgcccgaacccaacgccgccgaagaggacgaggacgagggcgccggcgacgacgaggacgacgcggaggacattgtcaagctacttgagccgctgtcgcgggagcagctcgttgcgctgctccgcacggcggcggaggcgagccccgccacgatggcggccgtccgccgcgccgttgaggccgaccctgccagcaggaagctcttcgtccacggtctcggatggggtgccggcgccgaggacctccgctccgccttctcacgcttcggcgagctcgaggactgccgcgtcatctctgacaagcaatctggtagatccaagggctacgggttcgtcctcttccgctcccgccgctctgcgctccgcgccctcaaccgccctcagctccaaatcggtggtcgtcttgctttctgtcacctcgccgcctcaggccccgcacccccagctcagtctcagaaccctatctccaacgccaaccccaatgctaactctaactccacgagcaacgcttctggatcctcatcatcacaaactgacaatatacaacgcaagatatttgttggtaatgtgcatgctgatgtggacgtggaccgcctatatgagtattttgcacaatttggtgagattgaagagggcccgttgggctttgacaagaacactggcagaccaaagggatttgcattatttgtttacaagtctgtggagagtgctcgccgtgctttggaggagccaataaagaattttgatggaaagacactcaatgtgcagaaagccatagatgggaggaccaagggctcatctggaatgaatacaaatactaactccaatcccactactgcatctgtggtcgccgcccagatgactgctccttccagtgttgccatcagcccatatgatgcatcagcatatagtgctactgtggttcctgacatgagttttgcacagcaagctgctatgctgggattaggtgcacagcaacaggcattcactcaacccaatgcaatgcttgccatgatagcagcaatgcagaacccagctgcgctagggatgagtccagccatgcttgctgctatgaacccagccttcgccgctgctgcattgggtgcaggggggcagcaggcacacacagttggtcttacaggttttggagctcagggttttgggacaccgtcgtttggagcaggtgccgctttcccaaatgcagcaggtgttcaagcagcagcagctgcatatcaaggaagtggagctcctcctggctttcaagggccacctgggtttcaggttggccaggcaactacccagacaagcactgcagcggcagcggctgccgcagctgccactgctgctggttatcaggctggggcatctgggcagggccaggtgcctggttctcaggtcggaggcactggttttcagggtggatattgacagaactagaaatattctgaatcggaatctagtggacttgctttgcgttgcatgaactatttatgggtatgggcacggtttggcctggttccttgcggggccattggcttattgtgctacaaggatggcagagctataatactatttatccagcacagtcggtgcctcacaaaccggaaagggtcctatctgtggtgtgccagacttcaagatgaggggaaagaagagtgatgagctcgaacctgtcgatgctggcgatgaagatgatgatggtggtgacgatggggacgaggatggtgactttggggaggagggtgaagaggacgtctcagaaggggagggatatgacaacccaaagggcaatgagaccaagaagcaaagaggtgatcctgaggaaaatggtgaggaagatgaggaagaaccagaagatcaggagggtggcggcgacgacgatgatgacgacgatgacgatgatgagaacggggatgacgaggacgacgacaatggggatgacgatgaggagggtgtagatgaagaagacgatgaccaggacgaggatgaggaggaagatgatgatgaagactcgctccagcccccaaagaagaggaagaagtgaagatcttctgccgctttagttaccgtgcgctgagttctgcctggcttttcgtcatatcctcgcatttcaactttcccatagagagttaagaaggatccacacgttcagcagcacgtgtgggcttgtaggagctttatgatttgaggcaattagggacaactcttatgtcattgttgcttgcttctgtggagtcgaacagatgtttcgctaacataattcgacttgagtgatgaaagcctccagattgaatatgccttctcttttatctcgtatggaatcattgatgcagccctggttgatagcgttccttcaataaatgaattatattggcatcatgacagcttcatgtgaattgcacgtttatactgtgcgttcaaatctcaactaatg

SEQ ID NO: 23947 - DNA, 2852 bp, Zea Mays
cagtaaggactttacattaaggctcaattatcacgggcctttcggcgccgccaggcctccgttatcaaggtttaggtctggtgtgtactgtatttattctacctctttccaatgtcccattttccttgtgaatcactagtgtcgcaaatcccaatctcccagcttgcgcctaaaccctagcttgcctatcgatggcgccgaagaagcgcaaggccgatcccgccgagtcccccgccgccgtggaggcagccaccaccaaccaccgccacgagccggcgtcctcggagcccaagccacgcggctccatctacttccccatcactgacgacccgcccgaacccaacgccgccgaagaggacgaggacgagggcgccggcgacgacgaggacgacgcggaggacattgtcaagctacttgagccgctgtcgcgggagcagctcgttgcgctgctccgcacggcggcggaggcgagccccgccacgatggcggccgtccgccgcgccgttgaggccgaccctgccagcaggaagctcttcgtccacggtctcggatggggtgccggcgccgaggacctccgctccgccttctcacgcttcggcgagctcgaggactgccgcgtcatctctgacaagcaatctggtagatccaagggctacgggttcgtcctcttccgctcccgccgctctgcgctccgcgccctcaaccgccctcagctccaaatcggtggtcgtcttgctttctgtcacctcgccgcctcaggccccgcacccccagctcagtctcagaaccctatctccaacgccaaccccaatgctaactctaactccacgagcaacgcttctggatcctcatcatcacaaactgacaatatacaacgcaagatatttgttggtaatgtgcatgctgatgtggacgtggaccgcctatatgagtattttgcacaatttggtgagattgaagagggcccgttgggctttgacaagaacactggcagaccaaagggatttgcattatttgtttacaagtctgtggagagtgctcgccgtgctttggaggagccaataaagaattttgatggaaagacactcaatgtgcagaaagccatagatgggaggaccaagggctcatctggaatgaatacaaatactaactccaatcccactactgcatctgtggtcgccgcccagatgactgctccttccagtgttgccatcagcccatatgatgcatcagcatatagtgctactgtggttcctgacatgagttttgcacagcaagctgctatgctgggattaggtgcacagcaacaggcattcactcaacccaatgcaatgcttgccatgatagcagcaatgcagaacccagctgcgctagggatgagtccagccatgcttgctgctatgaacccagccttcgccgctgctgcattgggtgcaggggggcagcaggcacacacagttggtcttacaggttttggagctcagggttttgggacaccgtcgtttggagcaggtgccgctttcccaaatgcagcaggtgttcaagcagcagcagctgcatatcaaggaagtggagctcctcctggctttcaagggccacctgggtttcaggttggccaggcaactacccagacaagcactgcagcggcagcggctgccgcagctgccactgctgctggttatcaggctggggcatctgggcagggccaggtgcctggttctcaggtcggaggcactggttttcagggtggatattgacagaactagaaatattctgaatcggaatctagtggacttgctttgcgttgcatgaactatttatgggtatgggcacggtttggcctggttccttgcggggccattggcttattgtgctacaaggatggcagagctataatactatttatccagcacagtcggtgcctcacaaaccggaaagccgtccagatggacaccgccgcgcccctgcaactgaaagcctgcgccggcgacgccgcggagaagctgctgctcgccgtcgcagccgagggtcctatctgtggtgtgccagacttcaagatgaggggaaagaagagtgatgagctcgaacctgtcgatgctggcgatgaagatgatgatggtggtgacgatggggacgaggatggtgactttggggaggagggtgaagaggacgtctcagaaggggagggatatgacaacccaaagggcaatgagaccaagaagcaaagaggtgatcctgaggaaaatggtgaggaagatgaggaagaaccagaagatcaggagggtggcggcgacgacgatgatgacgacgatgacgatgatgagaacggggatgacgaggacgacgacaatggggatgacgatgaggagggtgtagatgaagaagacgatgaccaggacgaggatgaggaggaagatgatgatgaagactcgctccagcccccaaagaagaggaagaagtgaagatcttctgccgctttagttaccgtgcgctgagttctgcctggcttttcgtcatatcctcgcatttcaactttcccatagagagttaagaaggatccacacgttcagcagcacgtgtgggcttgtaggagctttatgatttgaggcaattagggacaactcttatgtcattgttgcttgcttctgtggagtcgaacagatgtttcgctaacataattcgacttgagtgatgaaagcctccagattgaatatgccttctcttttatctcgtatggaatcattgatgcagccctggttgatagcgttccttcaataaatgaattatattggcatcatgacagcttcatgtgaattgcacgtttatactgtgcgttcaaatctcaactaatg

SEQ ID NO: 23948 - DNA, 6421 bp, Zea Mays
atttattctacctctttccaatgtcccattttccttgtgaatcactagtgtcgcaaatcccaatctcccagcttgcgcctaaaccctagcttgcctatcgatggcgccgaagaagcgcaaggccgatcccgccgagtcccccgccgccgtggaggcagccaccaccaaccaccgccacgagccggcgtcctcggagcccaagccacgcggctccatctacttccccatcactgacgacccgcccgaacccaacgccgccgaagaggacgaggacgagggcgccggcgacgacgaggacgacgcggaggacattgtcaagctacttgagccgctgtcgcgggagcagctcgttgcgctgctccgcacggcggcggaggcgagccccgccacgatggcggccgtccgccgcgccgttgaggccgaccctgccagcaggaagctcttcgtccacggtctcggatggggtgccggcgccgaggacctccgctccgccttctcacgcttcggcgagctcgaggactgccgcgtcatctctgacaagcaatctggtagatccaagggctacgggttcgtcctcttccgctcccgccgctctgcgctccgcgccctcaaccgccctcagctccaaatcggtggtcgtcttgctttctgtcacctcgccgcctcaggccccgcacccccagctcagtctcagaaccctatctccaacgccaaccccaatgctaactctaactccacgagcaacgcttctggatcctcatcatcacaaactgacaatatacaacgcaagatatttgttggtaatgtgcatgctgatgtggacgtggaccgcctatatgagtattttgcacaatttggtgagattgaagagggcccgttgggctttgacaagaacactggcagaccaaagggatttgcattatttgtttacaagtctgtggagagtgctcgccgtgctttggaggagccaataaagaattttgatggaaagacactcaatgtgcagaaagccatagatgggaggaccaagggctcatctggaatgaatacaaatactaactccaatcccactactgcatctgtggtcgccgcccagatgactgctccttccagtgttgccatcagcccatatgatgcatcagcatatagtgctactgtggttcctgacatgagttttgcacagcaagctgctatgctgggattaggtgcacagcaacaggcattcactcaacccaatgcaatgcttgccatgatagcagcaatgcagaacccagctgcgctagggatgagtccagccatgcttgctgctatgaacccagccttcgccgctgctgcattgggtgcaggggggcagcaggcacacacagttggtcttacaggttttggagctcagggttttgggacaccgtcgtttggagcaggtgccgctttcccaaatgcagcaggtgttcaagcagcagcagctgcatatcaaggaagtggagctcctcctggctttcaagggccacctgggtttcaggttggccaggcaactacccagacaagcactgcagcggcagcggctgccgcagctgccactgctgctggttatcaggctggggcatctgggcagggccaggtgcctggttctcaggtcggaggcactggttttcagggtggatattgacagaactagtttggcatctgtggtccgtggttcgttcatgtggttttgcattcggatggcttttgagtctatattggtgccaaaatgtagcgaaaggcttcctgctgttgaattttacaactggatttgaaccagatgcctttgtagcagtatttgaaggaggaactttcttgaaggatcatatcgttttattgcctaatatgtagttttgctattgcggcttcattatgtactttgtggatgtgtactgggtttcatgtatcaaaatatctgtattttgactagttggctgttacctggtcttatcaaccgtgttaaatggttttgtgggcacaattggagacattttaactgcagttcctgggctgtttggagctatggggtatttatggcttttgccttaaacctggaaatttcttctctgcggatggtttcgacgaccactacatttaagatcttgaatgtgttgcagctttgttgcacttctaagtttatttttaaaattcccagtgtttaacagtagccgcgcaaaatagcttgaatgttaagtggttatacaatcccataagggctagtttggaaacacaaatccccttggggattgagagggaaattagttcatttccacctcaatcctctccaatccccaaggggatttgagtatacaaactagccctaaaagagatgatttgacctgacggatggtttgcatatggtatctctgggaatttagtgttcattctttgaaaatattttggagctctttcttttgccttactgtgacaatggtcatgtcttgacagttgacacttcataactgtattactgattactttagtgtctccattttctcaactaccccactttatgttgatttttttcatggattgcctatgtgaggatgtactgttcatatatgcacaataagaatttcaaaagaagactgttcttgctttgttcttattagacccaatatgcactaaatgttagattagtagatgttttttcttactgctggtagaatactaggttgctgaccattggagtgttaaatcgtcatgtgaaccatgaataggccaagatgaaactgtcaagtggatgaatatcaataaattttaatccttgtgcatgcaaccatgctgtctttttcttttcacgacatgaaagtagtattgtgaaatcattgtgtttatttcatcaacagaattagtattgctactgatgatcttacatcactcgcttgccattctgtcttggtctgttgtgcaatgcatgtctctggatattatagatagtgctgcctgctatatttcaagtaatacatttgacacttcgcacttcctaactaaccaaacatcacttgccaaatcacaatttataaaacacagtaccagttccacccactagagttgaaagcacacttggaggtaattagtgcgcagaggcggcatctggtcagcagtggcaggggagtcctgagccctgggttccttctgccttctaatgtgctggatggcccatgccagactaggctaccttctgtttcacatttctgttatttaattttcttattacgttcaaggactaatgataccctctctttcagaccatttgctatcacatccctcctcttgccttccccaatctagacaaatgccttgccatgatgcaaattgcatttgctgacaattctttatttggttcagtgcttaaaaatatccagcataaacttggtgttcacttaatcgctttcaattgcataggttgaacattaaccctgaaacagagaaagattattcagttagtgtatactccttgttccaaaaggtgtcattcccctgccacctaggcacgcttatgtgctatgtgttggggtaccgtggagcctaggggggtaggtgttatctaggtggctcctgtcggccacggtggttggacatgctatccctggtgcccttatgtgcagatccggatgctgagcggcatgggagaaggttggaacagtgggtggcggcgggggaggaggcatgtatggtgggtgccagggagatgtggacgtcgagcagcaaaggcagtctatgggcggtgatggagatgggaaatgcagctgcaatgcagcggatatgataggcatggttgagaggaggctggcagcggcagaggcagcgacagtcagacggaagggatgaggctggccgcgacggagaaggaagagacagtagcgtggcagtggagaagggacgaagagtcgtgcggtgatggagttctgcgaactggtgcgtgtggctgggaggagagatggatggataaggtgggctctgttttgatggtcctttctgtccagctaggttcatacatctctagtttcttctctttttcatggtaatatataaatgtgtaaaacgcctaggcgcacctaggcttacttatggggtgtttggtttgaggaatgagctagtccatcatcttcacatcccttgtttttttggtttgtggaatggaatgagttgatccatttccacctcattcctcatagttagttagttagtactaatatgaggaatgaggtcatcccaccaaatatgaggaatggacccatgatgcaccacctcattttggatggagtgattcctcaaaccaaacacccccttaggctctaggcagaggggtcactaccttgtgtatactagtagtgcaatagtgccaaattgaccaactttagttaaaaaaatataatcaacaaatttctgactattagtttacagaaagtagaaccataacctgccaaaattttgcaggtggtagaccattctaattttcaattaccttctgtagggaactgtcaacgcagttgatagctaacagttgtaaatggtcattgactattgacagtttctgggatttcataatccatatttccctcacagaacaattgacctttttttgtcacttctagttttttcccgaacttcaacaaaagcacctcgctgaacaattgttctttttttgggggtcacttctagtttttgccttgctgtcaacagagctacttgttttgatagttacactcttgtgatcgaatgtcaatatttctttatagctaattattgtcatgattatgctttctaagcttgattgtctccctaacagttgttgatatgttatgttgctattcttgtgttgccatatacttaagggcttgttcggttcgctctcaatccatgtggattgagtgtgattgggcgggtttaaatcccaagcaagtcaaacttaatttttttcaatcccatacaatccatgtgtaatgtgtaatgggaataaccgaacaatgtctaaatgtgtttgcattcttattatgatatctcttaagcctctgttgagcacacgatcattgttctcaattttttatacatcatcctatttttattgagcttatttcgagttatgtttgacctgatactccaggttcatttggtttaggattttcatcagttgttcagtgcagtcttaattaatgactctgagccaaaaaaatcttaatatacttggtctgatttttagattctccagacagaattataaaaattaattataatggatctctatgaggtcatttgcgtaatgatgaccatatccagccaatgttacacactttccggactgatgttgcaataaattttttcccctgtttacgatcatggattcataattggggctcgtaatatctgtcacttattatgtgcatttcagaaatattctgaatcggaatctagtggacttgctttgcgttgcatgaactatttatgggtatgggcacggtttggcctggttccttgcggggccattggcttattgtgctacaaggatggcagagctataatactatttatccagcacagtcggtgcctcacaaaccggaaagcccatcagatgatgagaacaaaggaatcacattcccgatttgctgtcgcccccgctaatcttccccagcttttctttgcacaagcatcctggctgcaagtagcctgatgctcgtgctgaagctttgttgaagccaaccgtatcttttgacctttctatctccctctttctctattgctcgctgccgttttgggccccatttcccttgccgttttgattggtttcatgctagcaagtggtttttttctagtatgttttattatcaggacctagcaacgaacgttggttcctgccgacacgatgagtgttacacataactgtaggtgctatgctgaggcgtcctttacacataactggactctacacgctgacgttagttttgtcgccgcacgggtcatctggggattttgcggtgccggaacgggggtggttctgagggggaaacatgtgggattgcacacagaatttgacgctgtgaaccagagaactcttctctgccgatgtcagctcccaactccaacggctgctgtactccgtgatctgttcccacctactcctcgcggtggtatttaatgcgtgtccgtcggtccgtcctctacgcagaggatttgagtatcgtcatctctgagacgctaatgacgtgttagcgacgtgcgtttggctcttgagcggtgtcgacggattgctctttgtgaaactgacttgtgtttacttttctttttgtgtgtgtgaaaaaaaaactgagtccgatctgttgccaaaggcgccttgtggtttgaggcgagaacgccacagggaagggggaaaaaacagcagcgcagaaccacgcggacc

SEQ ID NO: 23949 - DNA, 453 bp, Zea Mays
ttacatctcatttcaattcaatatcgacatccaaacggagcataaggttcttttcgcccactatgtccagtgtccactgaccccttgttgaactgtacatgactacagatactacagatacaaagaatccttcagcaattggatccaaaaacattgctttaactggccactaaaatgttaagaacagcaagtagatacagggcagaacgccagaacttattagctctgtttacaggaggaaagctaggcaggggcccactttgagaccgagtggctcatacagtattgtatctagtcttctcgctcaccgtccacacatttgcagcatggtctggggaaaaaatatgcggttgcaaggagtaccggcaaatgcggtcgaagaaaaggaaggggaaatggttgtcaaaatcacgagaacgtggtcgaagaagcacaagcgcgaaggagagcaag

SEQ ID NO: 23950 - DNA, 883 bp, Zea Mays
atggctccccgtcgatcctcatgaacgtgtgctcggctgctcccttgtggaactcgaaacggattcggtgggcctgaaaccaaaatacactcatcaccaaatcttcagtttcctttcctagttaggcgcactgtgtgccgagccgctgagtgctgacagagcagactagttccttccacctgcgctagacgagttccatggccattaggagccagcaagatgagcccatgccaggcatcacggaagccgacaacctcgataagcccatcgtcaacgtaaggtgttccccatggattcaatcctccagagaagcttggcaggttcaggcagataactgattgaatgctgaaacaagaggggtaatgtttgtcagattttataataattcgtaattttatttcttgccaataaccagtccacctcaatcgtacatggacatgcctgggcgacagtggtatattacctgcgaggaatctttagctcttcccactgggaaccaggtcttttcatgatcttcacctttgcaagttgagaaatgttcctgaaagtggaagttgtataggtcatatacgcataacgcatatcagaggtcaaggaatacagagactcttaaagtgatggtgaaggagttccttatacagatataattaatgtcatacatgctacactgaacatgctggtatagaaaattgaactataattcgatcaatatcagaaacattatagactgcattagtgacaaagtacctcgatgaaagatggtttagggaatgcttaaatccaagcttagcatatgtaccctgcatcaaagaaatgcattatactaaccatgctgatggggtttgcaaatcctaatgatacagcgaggtaagtgaaaaaagag

SEQ ID NO: 23951 - DNA, 1084 bp, Zea Mays
atgatcacattttttttaaaaaaaaagtttcttccggttataatatatcctgccaaaaaagggtacgtctgtatggacccaacccatacagtgacggcagtgtaccactttgttctaatccacctcgatctagtcagctccggtcgccccacccaccacacgacacatccccagagcccaattcgctacaccctgtgtgcgtgaaacctgtcgcggtttgctgttcagcacgtctgcctcccgcaagttgtgtgcaggcaccaccgcaaccaaccgccatttggtttcgctcaacttcggcacttcgtgagctctggagtcacagcatcgatgagcctgagtgcctcctgcctcctgcctcctggaagttgtagctcaggctggcgttcaacgccgtcgtggaaagtggaagccccctcggtaactttgtttcgccaaagaatcaacgtagggatgtgatgtcttcaaagattataccactgtgttccccatggattcaatcctccagagaagcttggcaggttcaggcagataactgattgaatgctgaaacaagaggggtaatgtttgtcagattttataataattcgtaattttatttcttgccaataaccagtccacctcaatcgtacatggacatgcctgggcgacagtggtatattacctgcgaggaatctttagctcttcccactgggaaccaggtcttttcatgatcttcacctttgcaagttgagaaatgttcctgaaagtggaagttgtataggtcatatacgcataacgcatatcagaggtcaaggaatacagagactcttaaagtgatggtgaaggagttccttatacagatataattaatgtcatacatgctacactgaacatgctggtatagaaaattgaactataattcgatcaatatcagaaacattatagactgcattagtgacaaagtacctcgatgaaagatggtttagggaatgcttaaatccaagcttagcatatgtaccctgcatcaaagaaatgcattatactaaccatgctgatggggtttgcaaatcctaatgatacagcgaggtaagtgaaaaaagag

SEQ ID NO: 23952 - DNA, 648 bp, Zea Mays
ctccaacaacctgaaacattccagctgagaatctaatccgagattttttaaagttccgagcaccgatttgctagcttctctattacatttgcaagtctccatgatcacattttttttaaaaaaaaagtttcttccggttataatatatcctgccaaaaaagggtacgtctgtatggacccaacccatacagtgacggcagtgtaccactttgttctaatccacctcgatctagtcagctccggtcgccccacccaccacacgacacatccccagagcccaattcgctacaccctgtgtgcgtgaaacctgtcgcggtttgctgttcagcacgtctgcctcccgcaagttgtgtgcaggcaccaccgcaaccaaccgccatttggtttcgctcaacttcggcacttcgtgagctctggagtcacagcatcgatgagcctgagtgcctcctgcctcctgcctcctggaagttgtagctcaggctggcgttcaacgccgtcgtggaaagtggaagccccctcggtaactttgtttcgccaaagaatcaacgtagggatgtgatgtcttcaaagattataccactgcctaggtgttggggccccagacggagaggaacatgacggtgcgcagcgcctgctcggcgcgccgcc

SEQ ID NO: 23953 - DNA, 1219 bp, Zea Mays
gccgtttctgccgcaagacacaggcgacgaaaccgatgtgcggaaggagagcccccggtatccaggaaaaccagcgcccgcggccgcttgtttgcagtcctccctcccgtatatatcaacccgcccaccacacctccaccccaaacaggcaaacacacaacacaaccaaccacctcactcgatctctcatcactcgcaagtccagcgatcaccaaccagagctcggctccaagcctccaactccaacccaaggagacagatacgttcgcagatggcgggtgcagcgaaggcgtcgtggatggtggccatgagcgtgggcgccgtggaggcgctcaaggaccagggtggcctctgccgctggaactacgcgctgcggtccgtccaccgcaccgccaagcaaaaagcccgagaaagaaagaacaaacaggagacacagatggcggctgcagcgaaggcgtcgtggatggtggcgatgagcgtcggggccgtggaggcgctcaaggaccaggcgggcctgtgccgctggaactacgcgctgcgctccgtccaccgcgccgccaaggccaacgctcccagcttcgcgcaggccaggaagctggcgccgcccgccgcggacaaggccgccgcggaggaggggatgaggaccgtcatgtacctctgctagtttcggcttcctgcaaccgtaccgagctcggcttcaaatctgatccatgactggttgccttgccgacccactgtaacataggagtatagcaccacgatgatgatgatgaaaagttctgccacttgatttcagttcctcaaaactctgaatccctacgctactgtgctggcatggaaataaaatgaagagtgcatttctgttcataagagcctgttgcgttcctacggaacggtggccctaaggattctagatcggattgtttgcctaattaatataagtatccataaattggaatggatcctggttgcattctgaaacaactgaacagctctaaggtcttattcgtttgtatcggattgcatctgtaatcgtttcaactaattaaagtttatataaattagagaatcaatccggttagaaatcgtttcgatttatcaatccggtacaaatgataaggcctaacatgtttttttctgggtggattggcgtgtgccactctgccagacacgtacgagtctggtacaaaccacaatagctctggaatgccttctttaa

SEQ ID NO: 23954 - DNA, 1248 bp, Zea Mays
ctcaaacacagccagtgcctcaaatggtttcccgtccttgctgagcgcgccgatcaccaggacataggcatgttgaggtctgatgacgatggtggttttgcaaatacttggataaacctaacaatggtaactcgctgctttgcaatgacaacggttgttaaacgacacatgagtccatgacagaagcagaaagcagctatggaagttagggagtgttcatcgactgttcatgtttgaaccaagcatgagggatgaaagtggtaaaatttgattgctctgcttcagtgcttcgttgagaagcttttgctcgtttctgtccgcgacgcggaagtccagccgtttctgccgcaagacacaggcgacgaaaccgatgtgcggaaggagagcccccggtatccaggaaaaccagcgcccgcggccgcttgtttgcagtcctccctcccgtatatatcaacccgcccaccacacctccaccccaaacaggcaaacacacaacacaaccaaccacctcactcgatctctcatcactcgcaagtccagcgatcaccaaccagagctcggctccaagcctccaactccaacccaaggagacagatacgttcgcagatggcgggtgcagcgaaggcgtcgtggatggtggccatgagcgtgggcgccgtggaggcgctcaaggaccagggtggcctctgccgctggaactacgcgctgcggtccgtccaccgcaccgccaaggccaacgtccgcagcagcctcgccgcgcagcgggacaaggagctggccccggcggcggagtcgaagaggcggccgggcaaggccgccgcggaggaggggatgaggaccgtcatgtacctcagctgctggggacccaactaggaggactagctagggttcactgttcagttcattgctggtgctgggttcagttcagacctggctggccggttgcctcctgcgattgtaaaataggaatacggtcacgacgatgaatgatgatgacgatgaaaagttctgccactgtatgtttcaggcctgtgggctcaaaacaagaattcggtggtgcttgatggctgaaacatccatatccatgtgctggaacataacagtcggtgatgccaagcatgaaatggcaatctcactcaggtcgtgggatctgctctctaatgaccggtacaaccgagactgtgtttcagctcagttcctgctgatggttcgttcatcagaggtcaatttcagtccgctatgcgtgaa

SEQ ID NO: 23955 - DNA, 997 bp, Zea Mays
gacaaggcagccgccgccgtccccattaacatcaccgagacctatcgccgcagaaccaccgaatccacggcatcggagagtgtagaggttagtactaggcggaggtcaagatggtgtgcatccggcaggcgactatcgacgacctgctggcgatgcaggcgtgcaacttgatgtgcctgccggagaactaccagatgaagtactacctctaccacatgctgtcttggccgcagctcctcttcgtcgccgaggactacggcggccgcatcgtcggctacgtgctcgccaagatggaggaggacccctccgagccctgccacggccacatcacctccctcgcggtgctccgctcccaccgcaagctcgggctcgccaccaagctcatgtccgccgcgcaggcagccatggaccaggtcttcggcgccgaatccacgacatcgaggccaagtactacgccgatggagaggacgcgttcgacatgcgcaagcctctccggcagccgcaacctaagaagcaccaccatcaccaccaccacggccccggtgggtgctgctcccacgacgcacctacggcgacgactggttcttctcctcagtcttttagttcgccggataagaaggctaacacttgacggatgaagcatatctacagagaggagtcaccaagcccattggacttccgatacgcagctttttctaatagaatgggaaacgaattgtactgtaattgtttgtgtactttactttggctcaatcgtccgaccgtatctttgtaatcagtgagaatggcaagcaaatgtccttgacatctattgttattgtaaaaacatgtgttataacgctgattctcagattacatttgattattcgagctgacaatttcttcaggttttatacagcagaatgtaatgcgcaatattattgtcggatcactcaaattacggagaactccagtgccgagatttctgagtatcaatgctaattatttcaaaaacaaa

SEQ ID NO: 23956 - DNA, 774 bp, Zea Mays
gacaaggcagccgccgccgtccccattaacatcaccgagacctatcgccgcagaaccaccgaatccacggcatcggagagtgtagaggttagtactaggcggaggtcaagatggtgtgcatccggcaggcgactatcgacgacctgctggcgatgcaggcgtgcaacttgatgtgcctgccggagaactaccagatgaagtactacctctaccacatgctgtcttggccgcagctcctcttcgtcgccgaggactacggcggccgcatcgtcggctacgtgctcgccaagatggaggaggacccctccgagccctgccacggccacatcacctccctcgcggtgctccgctcccaccgcaagctcgggctcgccaccaagctcatgtccgccgcgcaggcagccatggaccaggtcttcggcgccgagtacgtctccctccacgtccgccgatccaaccgcgccgccttcaacctctacacctccactctcgggtaccagatccacgacatcgaggccaagtactacgccgatggagaggacgcgttcgacatgcgcaagcctctccggcagccgcaacctaagaagcaccaccatcaccaccaccacggccccggtgggtgctgctcccacgacgcacctacggcgacgactggttcttctcctcagtcttttagttcgccggataagaaggctaacacttgacggatgagttgttcgttgttctcaaactgtgattttggttgaccgatcaaatcagtagttacgttgtaga

SEQ ID NO: 23957 - DNA, 3586 bp, Zea Mays
atggccgcctcgccgtcgctgcacgccgtggcgcaccgggggccctccctgaccgccctcctcttcctcgtcgccgcgatggtgctggttccccctgcggtggccgagatccgggagaccgcaatccgggccgacccgcggagcatcatcccgctggacgagttcggcttctcccactcgggcgtgctggagctcaacgtctccggcatcgccttcgacccgcaggcctccgcggagctggacctctcccagctcggcttcttcctctccacgctcgacgcctgggtccacgtcctccgccagctccaggacctcgacgtcacctgcgcgctccagtccgagctcgtcaagctcgccttctctttcgaccgcctccgcccgccctccaaccccaccgacgtcgaggtcgctcgctcctcctccttctccaccgccttccgcgtctccgagcccggccagtacacgctcgtcttcgccaactgcctcggcggcgggcgcgacaccctaaaagccaaattctacaggcgggcccgtttcgcgcgcggcccaacgcctcgctctcgagagttcccctccgagtcgacgaggcaggagctgaaccaaccgtacaacagtttctccccgattcctccgccgtctgttcccttcggaaactcaatggcgtcgcccgacgacgagtccgcgcagccaccatcgaagcggccccgacgcgatgccgaacctgaggtggacgccgctgagccatcaccgcgcgtggtgctcaacccagcggactgcgatctcgacttcgatgtaggcgggggcggtctccgggggagcgcgcttcacgagggcggcttcgcctactgctggtccggcgcgcgcgcgacggtgggcgccaggggcggcgggcggtactgcttcgggtgcagaatcgtcgctgagcagccggtggagatggatcccacgacctccggggagcgccacctctgccgcattggggtctcgagaggggatgatcccgtaggtgcgctcggggagtcccagcacagcttcgggttcgggggcacggggaagttctcccaccagcgcaggtttgtcaactacggcgtcaagttcggcgtcggcgacacggtcgtctgcgccgtggacctcgattccaagcccatggcgtcgatagggttcgcgagaaatggcgaatggcttggtattgcgaggcattttgatgcgggcgagaaagggcttggtctggttgacgctcctctgaggccgatgcgatggggatccgcactgtttccccatgtcctgctgaagaatgttatcgtggagatgcagttcagcagggaggatgggctgctgcctgttgatggttatgaaccctgggcctcagctttttctcaaaggaattcagtatttggcccttcgtttgagcaaaataaatgtgaggtcatgatgatggtcggtcttccggcctctggcaagtcaacatgggcagagaaatgggtcaaggagcatcaggagaaacgttatatccttctcggaactaaccttgtattggagcaaatgaaggtgccaggattattgcgtaagaataactatggtgagcgttttgaacgactgatggattatgctacatggattttcaacaaactgctgactagggctgcaaatacccctcgcaacttcattatcgatcaaacgaatgtttacaagaatgctcgcattcgcaagctgaggccatttgctaactaccgcaagtgaactgaaatccagggcagcgaagcgtttcaatgagatgggaaaggaaataccagctgaagcagttaacgaaatgacagccaattttgtcctaccactctcgaaggatatgcctcattcgaaggagccttttgacgaggtaatcttcacagagctttctagggatgaggctcagagaaccctagatgatatgcagcgtgtgttgccaagaaatgtgaccccaagctatggaaactctggcaaccaaaaacattatagttcaacatatgctgggactgctgctccacttgatcctagtgcaaggtcatcaatgccaggcttttatccaccaacggccaattcatatggagttggcgacctacgtagcagtgctgctactttcagcacaggtgtgcatactgaaggcaacacaacacatggacagacaccctgcagcgttcgaagtttccggagtccaacaggaaaccaacatggaatccattcaagctatccaagtgctccaaaccaatatcagatgccctcaagctacctgagtaactcaaaccaatatgaagtccgtgcaagctaccgaagtacaccacttccgggatatggacagagtacatatgcttcccgcaggaacccaagcccatacaattctgagatgcaccaaggtattcaggctcccatgagtagcaggaacctctaccgagcacctgggtcagccgaagcctatgtggcaccttgctatgcagctggaaatctgattgggaggccacatcaggtgttatcaccatcaacttttccagcacatggtccacaaccagctgctcagtgggtgccaaatcaaggtagttcccgctcatggagttctgacagttacaggccttactatggacaatagtctcatgatgtgcaccggccgtcgaatgctgctttggcaccacatcctagctatgctatcgtcacggttctgcaccaaactacatgaatcaatggcggagaccttggtagaattagctttgatggcagcttgtttattttctatataaataaggccatgtttggtttcaattagtcttaggactaaactttagtcctaggactaaactttagtccctacttgtttggttctagggactaaatagactcaaatgctcttggaatacactcatgtgggcttttagtctcttttagcacctatgtgaaggactaaagactaaatcattttagtccatattttagtcctagtgtttggcaaaaaagggactaaatgggactaaaaactagagactaatctttagtccctctaaccaaacaccccctaaaacgagaggtgtaaataacagtgctcaggttctactcgttctagggaaccttcgtgcgtctgttacgtacaaagctacgcatttagcaacacgtttgtgaattaccttcttcaaaagttctgattttggtggatatcattttgcattattgccctgaattccaacaggaatctagattcatgaatagttaattcgtaacattctcagaaatgtgattatttcgctgcatgttacgggtgccatgtatccagagttttgtatgataagatgctagcctgggttgtgtaattcagctttgacgaacaccgtggcttctcgaagttcatttgacagcaatcgctggaatttaagcagctacaaggatgtataaatcccaaaaatccgttacattcgggcgtgtacaaggtacagtcagttcacggcaacgcaaactggtcgacgtcaaggttgataaaaacacgtcggctcttccaactttacaagacaaaacacctagcctataactctcatgagcaagaactccttaaagggtcatctcctcc

SEQ ID NO: 23958 - DNA, 4372 bp, Zea Mays
taaaaatagcatgtatgcattccaaataaacctcgcaatgtaataatagaaagagacgttaaatgatttggtccgcccacctagtacattcaccatattttggttaaaataatttaacaccgcaacgacaaatgagtagggttacaacgagattgttcaacattacgtttgtttgggttgaaccaatcaatgtatgtttctcgctactgctagactgagatgagcatgtgcatcaccaccttgaagcaagaagacttggcgccacctagtgcctcgttacaccattcctaagcaagcttgcttctctttccagaaccgaagcaaccgaaaaggaaaccccagttccttcaagccgctgccacagcatttgccccattctgcagtaaacagcatcacaaaatccgcctgcaatgcaaagggtgccaatatataagagggtgcatgctcagaggtggagatggaatcatgcaaacatagatcaagaaaccacgcaatggggagcagcaagagagtgcccccgtaccttctgctggtgctgctggccgtcggagccgccgcggtgagcgtcggcatcctgcacaagatgagggagcgccgcgtccttgctgtcctcctccaggaacgcgaccagcagctcatctccttccaagtcctcctcgaggtaccgggtatgcatgactcgttttcatgcatccgccgcgttcgagaatttttttttttgcatgaaccacaattgtgcttctaataggtagagctgttgcttgactgaatacatgtttctctgtgcctgcactttttggccgactctgtcagtagataatggataccctgcttttgtcacccagagtcctggactattaactactccatccgttttttgctagatacataggctttgcgacgtacctagattcacaataaaattgatgtatttagaaaagttaaaatatcttaaagtttaagacagagagagtattaattaagtactctcaaacaatatgccaccacttcagtttactccctttattcaacgaatacaagcaagaaattaatgctcatagtatccatctgaagttctgaagaacatagttccacctgtatgaagacctacaggacacctaataaaccactctatacaaatacaacactgtcaaaaaaggaatcttgtcagagtgtcctacagataagatttctttagataaaaccgaatatatgacagaatgtagtgccctcaaagaaacaaggttctcagactacaagcattcaattaactccaaacacctccaggtctctagatggaatacatagggccattaaattaagcatagtgcactaaactgagcacaaaaaaaatgagttgatagaacaccacaacctcagttctctttgaaacgtttcatcatcaaatagattaaaaatgtgtttgcgcataatacttcaaaagtcgagatctatcaactgaatatagaggattgcctgtaatgcttaaattagggaattattgataccactagtaagtaaaatataagaaacagtacaatgtcatgcaaagtatgattctatttgcaatcggcattttcatgaaagaaccatcatattgccaatttagggtgtatttaagcacaaattttgcaggtgcttcaatggaaacatgataatttacaggagaaagattcccgcattataaatagggcctcagaagaaagatggattcaacaaaactacagtgttgcacatgcaaaatctttccatacccaaagcatgaagatactatcaaacatagaatcatgcagtcataaggtagtccacataataaatcgcccctgagaggacttcaatattgacactatttgcagacataaatttatctgtaggcaactaaggttgtctttggtgaatcgtataaaatagggaacacggaattgtagataacactgtttgacactgtttacagagtaaagtttgaaatagaggatgatatagaggatccgctggagatggcctaagtcgctatatttaattgaacatcctcttattctgcaagtaaatactgaaactattctgccagtaagtacagtccacttgatgatgtaaactgcaatagctgtagcactttagagcattctatctgccttttatttttattgtgttctatgaattatctatccagcatgttattcaaaaacacctcatcaaccaaatattactgtcttgtttttggcagaaagaaaaggaaattaacaaagagatgaggaggaaagtggacgaactggaagccaaaacatctgtcctaagtattgagagggcagaattgaaaaacaagctcatggattcagaaactaccacgacatatcttaccaacacgcagaaagaattggaagcagctcttgtggagaaagagagccatatcaaccaaataaaagagaatgcagttgcttcaaacccagatcagacgataactataaaggaactcctgcagcagaaagaagctgagcctgatcttgacaaatccgaaaattccagtgatcccattcctgctacagtagaagataattccaacaatactacaatatcagagagcagccacaatgatgagagcattgtagtgggagcaaacactgaaaatgcaacttctgaaaccgtggtagacaaatctgaaaactccaacgattccatgcctgctccagaaaaagaaaattcaagcaacactaatgcatcagatagcagccaccagaatgagaacattatagtggaagcaaaagaagataatgaaacttctgaccttgtggtactcgacaaatctgaaagcaccaatggttctgtacctgttactgcagaagaacaaaattcctacaacaccactgcatgggagagcaaccaacaagataacagttcctcacaagaacagttcttaaagttaacaaccaacatagaagatggccagtttcaacagaacaaaggtgatgccaatgagcaatcagatgatgcttcagagggaagccatttagatagatctgagcttcagcgggggaaccaaaaactgatagacaaccaggaagccagcaaagaagaaccggatggcacaagacaggtggaagatcctcaaggcgaggccagcaaccacggcagagaaagtaaagtgctcgagaaggaaaatgagaaagaaagaaatcctgagggcacgagctcagtggacaccttgagcgaagccaaccaaaacaaaacacaagcagtggaacctgttgtcgacccaacagatgtaaaccccagcacatccacaaataacgaggagagaagagaaacaaggaagagacgtagaaggagaaggtccagatctagaaggaataggaaggccgctgttgaggatgcaaacatacttgatgtgtttgtctccagggtgcggcaagcctacctcttttaccttgactatgcaaagttggctggttttagtgtcaggacaaagaggtgtaattgcaactgctggtgtggtgtgattgcaaccccgcattaggtgtgattgcaactgttgtataattctactcaaatatctgttaaaaaatgtaaacaaaatgattgcaactgctggtgtgttgtaattgaaactactggtgtggtgtggatgcaactgctgagttgctctgatgtgattgcaagtactgaataactctgggaaattttgttaaaaaatatgattgcaactgctggtctggtgtaattgcaactgctggtctggtgtgattgcaacttctatataactagatgcaactgctggtctggttcgaaaattgtagcattctgtcgggagcgtgcgggagggacgaagacgaaacgtcggttcggcctgggtggggcggttggctcggaccatggcgcgtaggttcggcctgggtgcattctctatattgaatgcacccaggtgtaatatataaatacagtatatatatatacccgcgggtacctgatacccgatgggtacgggcactggtacaattttttacccgcgggtacaattgctggcgggtatggctaatacccgcgggtacggtcgtgggcgggtatttattatacccgacccgaatccgacccgttgccatccagtcatacatagtctctcctgataaaatggatgcaaagacttccctcgtattaaatatagtatttatgaactttttcccacaagatatgtattttttatcacacaataaatgtatttgcaaataagctttactgtccttaaacaagatgtgaattgaacagtaagaaagacaacaaattcaggtagagctgcaaatgagatatgtgactttacttctcaacatgtataaataataaataaaataaacagaaaggcttagctgtcgtaagtcttcag

SEQ ID NO: 23959 - DNA, 2809 bp, Zea Mays
taaaaatagcatgtatgcattccaaataaacctcgcaatgtaataatagaaagagacgttaaatgatttggtccgcccacctagtacattcaccatattttggttaaaataatttaacaccgcaacgacaaatgagtagggttacaacgagattgttcaacattacgtttgtttgggttgaaccaatcaatgtatgtttctcgctactgctagactgagatgagcatgtgcatcaccaccttgaagcaagaagacttggcgccacctagtgcctcgttacaccattcctaagcaagcttgcttctctttccagaaccgaagcaaccgaaaaggaaaccccagttccttcaagccgctgccacagcatttgccccattctgcagtaaacagcatcacaaaatccgcctgcaatgcaaagggtgccaatatataagagggtgcatgctcagaggtggagatggaatcatgcaaacatagatcaagaaaccacgcaatggggagcagcaagagagtgcccccgtaccttctgctggtgctgctggccgtcggagccgccgcggtgagcgtcggcatcctgcacaagatgagggagcgccgcgtccttgctgtcctcctccaggaacgcgaccagcagctcatctccttccaagtcctcctcgagaaagaaaaggaaattaacaaagagatgaggaggaaagtggacgaactggaagccaaaacatctgtcctaagtattgagagggcagaattgaaaaacaagctcatggattcagaaactaccacgacatatcttaccaacacgcagaaagaattggaagcagctcttgtggagaaagagagccatatcaaccaaataaaagagaatgcagttgcttcaaacccagatcagacgataactataaaggaactcctgcagcagaaagaagctgagcctgatcttgacaaatccgaaaattccagtgatcccattcctgctacagtagaagataattccaacaatactacaatatcagagagcagccacaatgatgagagcattgtagtgggagcaaacactgaaaatgcaacttctgaaaccgtggtagacaaatctgaaaactccaacgattccatgcctgctccagaaaaagaaaattcaagcaacactaatgcatcagatagcagccaccagaatgagaacattatagtggaagcaaaagaagataatgaaacttctgaccttgtggtactcgacaaatctgaaagcaccaatggttctgtacctgttactgcagaagaacaaaattcctacaacaccactgcatgggagagcaaccaacaagataacagttcctcacaagaacagttcttaaagttaacaaccaacatagaagatggccagtttcaacagaacaaaggtgatgccaatgagcaatcagatgatgcttcagagggaagccatttagatagatctgagcttcagcgggggaaccaaaaactgatagacaaccaggaagccagcaaagaagaaccggatggcacaagacaggtggaagatcctcaaggcgaggccagcaaccacggcagagaaagtaaagtgctcgagaaggaaaatgagaaagaaagaaatcctgagggcacgagctcagtggacaccttgagcgaagccaaccaaaacaaaacacaagcagtggaacctgttgtcgacccaacagatgtaaaccccagcacatccacaaataacgaggagagaagagaaacaaggaagagacgtagaaggagaaggtccagatctagaaggaataggaaggccgctgttgaggatgcaaacatacttgatgtgtttgtctccagggtgcggcaagcctacctcttttaccttgactatgcaaagttggctggttttagtgtcaggacaaagaggtgtaattgcaactgctggtgtggtgtgattgcaaccccgcattaggtgtgattgcaactgttgtataattctactcaaatatctgttaaaaaatgtaaacaaaatgattgcaactgctggtgtgttgtaattgaaactactggtgtggtgtggatgcaactgctgagttgctctgatgtgattgcaagtactgaataactctgggaaattttgttaaaaaatatgattgcaactgctggtctggtgtaattgcaactgctggtctggtgtgattgcaacttctatataactagatgcaactgctggtctggttcgaaaattgtagcattctgtcgggagcgtgcgggagggacgaagacgaaacgtcggttcggcctgggtggggcggttggctcggaccatggcgcgtaggttcggcctgggtgcattctctatattgaatgcacccaggtgtaatatataaatacagtatatatatatacccgcgggtacctgatacccgatgggtacgggcactggtacaattttttacccgcgggtacaattgctggcgggtatggctaatacccgcgggtacggtcgtgggcgggtatttattatacccgacccgaatccgacccgttgccatccagtcatacatagtctctcctgataaaatggatgcaaagacttccctcgtattaaatatagtatttatgaactttttcccacaagatatgtattttttatcacacaataaatgtatttgcaaataagctttactgtccttaaacaagatgtgaattgaacagtaagaaagacaacaaattcaggtagagctgcaaatgagatatgtgactttacttctcaacatgtataaataataaataaaataaacagaaaggcttagctgtcgtaagtcttcag

SEQ ID NO: 23960 - DNA, 1384 bp, Zea Mays
cgaatacagggcctttgggaaagacttgagaggagaaggcaaatgccttaccatatgcatataaacctggagcttttggaagccacacacttgatctgtgcgatgctgattgaagtccccaatatggctgccagcacctatgacaagcggagacctatgagcaaaacattccgaaggcttcttgaagtgagtgaaaggcagacatttgttgggccgcccgagaatgtgagggaccatgtaatggctgccacaagagccctcaacaagggtgatcaccaaaaggctttcagtgtcataaattcgttggagatttggaagcttttgaggaacagagagcatgttcttgagatgttggagcttaagatcaaggaggaagctcttagaacctatctcttttcatactcgtcttcgtacgagtccttaagccttaaccagctcactaccatgtttgatctcagcgagcagcatgcccacagcattgttagcaagatgatgatgcatgaagagcttcatgctagctgggaccagccaacaaagtgcatcgtattccatagtgtggaccaaactaggcttcaggggctactcttccagatggcagataagctctcggtcctggtggagatcaatgagagggcatacgaggcaagaactggtggtactctcgagggggtacctcccaggcgcaggggcgagggtcaggataatatgggaaagtggcaggataactttgtctcgtcacaggggcggcagggtggtggcaacaggtttggatactccggcagaggtgcaatatctggtcaaagtggtggtggacaccagagggacaggggcaatcagggttaccgcgggggctatggtggcgtttcaaggtttcaggatgcaaggggtcgcaaccagtctattccatcaggcagaggtggtgatggtggtgcacgcatggtgaacctgaacaggatgggtagagtttagaagtgataattttcagctcgagtaagcctgaaattctcctaaaagccaagttttgaatcactgctttttacatagtttcctgttctgggctgagccatccacctgtttcctacatttcgttgtagccttttaatttaaggggctaggaaattgaactaagagtttggtactgtttcgtgggagtgtgacttcactccaatatttgatatctatctgtgacacttgctataacctgtacttttcttgtttgtgttatgtggtttttatttggttatgaaaaataaaaaggcatgtcgcagatagaagatcgttattctattcgcgtttgaaaagctttacaccaatctcgagatgaacttttagcataacacttttcttgtggtgttcatttggataaattttccgcggtggtgtc

SEQ ID NO: 23961 - DNA, 3590 bp, Zea Mays
tttctttgtaattgttgtgtattaatattttgttgaatgttttgtgtgccgttgcaacgcacgggcacatacctagtccaccaaacaaaaccttactggtcggtcccgtctgacaaatgggtcccattgctcattggctaagagacctgccaggctgccagcgtacgctagccaagtccctgagtaggcctcctgttttcccccacggcccacgctagccaagtccaggttctgaggttcacaaatcacaaccctagttggcggcgctcagatccggtggcatcctcctcccgcgtccctgtagcggcctccgacgacgaccttgtagcggcagcgtgtggcggcaatcgagcaagactgaagttaaggaagcagcagaaccatggcatcccgtttctggggacagggggacagtgagtctgaggaggaggaggtggaagaagttgagtcagaacagggcagtgatagtgatgatgatggaggtcgaggtggtgcgggacgcggtgcccaaaaccgatatttgaagaatcaagaagatgacagcgatgagtctgatacaggtcaccgtgtgatccgctccctgagggacaagcgcaacgaggagatgagatctattgttgatcagatgcgtaatgcaatgaagatcaatgactgggtgagcttgcaggagagttttgagaagcttaacaaacatcttgagaaggttgttcgtgtcaatgaatctactgaggtaccaaaaatgtatatcaaagctcttgtgttgctggaggacttccttgccgaagcccttgcaaacaaggaggccaggaagaagatgagcagcagcaattcgaaggcactcaatgcgatgaggcaaaaactcaagaagaacaacaagcagtatgaagagcagatccagaagtgcagggagcatccagagagttttgaagatgaagctgcagatgataaagatgtggatgatgacgatgctgatgaaagtgatgcagagattgaagatcctgataaaatagctatgtcagaatcagaagaggaacaagatgaagaggatgatgataaggatggttgggaacagaaaaggagtaagaaggataagctgatggataagcagttcttgaaagatccaagtgaaatcacatgggatattgtcgataagaaactcaaagagattatagcatctaggggaaagaaaggtactggaaggatcgagcgtgttgagcagttaacatttttgacccgtgtggccaaaacaccagctcagaagcttgaaatcctcttccatgtgatttctgcgcagtttgatgttaaccctagtctacttgggcatatgccagtcaatgtgtggaagaagtgtgtcaataatatgcttcttgtgcttgatatactccagcagtatcctaacattgtagtagacacctcatttgagcctgatgagaatgaaactcaaaagggtgcagactacaatggaacaatacatgttgtcggtgacctggttgcattccttgagagactggactctgaatttttgaagaccttacagtgcacagatccatacacaaaagattatgttcagaggctcagagaggaacccctgtttctggttgtcgcacagaacgtccaagattatcttgaaagggttggaaacttcaaagctgctgccaaggttgcactgcgccgtgttgaactagtttactacaagccccaagaagtgtacgatgcaatgagaaaactcgcagagcagcctgaggactgtgtggatgatgatgatgcagaggctggtgatgaacataaagcagtagatgacaatagaggaccatcaccatttgttgtgattccagaggctgtgcacaggaagcctacttttccagaaagcggtagaactttgatggatggattgatgttcttaatttacaagtatggggatgaaaggaccaaagcccgtgcaatgctgtgtgacatatatcaccatgcgatctctgatgagttttcagtggctcgcgacttgcttttaatgagtcatttgcaagatggtattcagctcatggacatatcatcgcagattttattcaacagagtcatggcccagttagggctgtgtgctttcagggctggtttgataaatgaagcccatggttgcttgactgagctctattctactgggagggtgaaagaattgcttgcacaaggtgtgcaacaaagccgataccatgaaaaaactcccgaacaggaaagacttgagaggagaaggcaaatgccttaccatatgcatataaacctggagcttttggaagccacacacttgatctgtgcgatgctgattgaagtccccaatatggctgccagcacctatgacaagcggagacctatgagcaaaacattccgaaggcttcttgaagtgagtgaaaggcagacatttgttgggccgcccgagaatgtgagggaccatgtaatggctgccacaagagccctcaacaagggtgatcaccaaaaggctttcagtgtcataaattcgttggagatttggaagcttttgaggaacagagagcatgttcttgagatgttggagcttaagatcaaggaggaagctcttagaacctatctcttttcatactcgtcttcgtacgagtccttaagccttaaccagctcactaccatgtttgatctcagcgagcagcatgcccacagcattgttagcaagatgatgatgcatgaagagcttcatgctagctgggaccagccaacaaagtgcatcgtattccatagtgtggaccaaactaggcttcaggggctactcttccagatggcagataagctctcggtcctggtggagatcaatgagagggcatacgaggcaagaactggtggtactctcgagggggtacctcccaggcgcaggggcgagggtcaggataatatgggaaagtggcaggataactttgtctcgtcacaggggcggcagggtggtggcaacaggtttggatactccggcagaggtgcaatatctggtcaaagtggtggtggacaccagagggacaggggcaatcagggttaccgcgggggctatggtggcgtttcaaggtttcaggatgcaaggggtcgcaaccagtctattccatcaggcagaggtggtgatggtggtgcacgcatggtgaacctgaacaggatgggtagagtttagaagtgataattttcagctcgagtaagcctgaaattctcctaaaagccaagttttgaatcactgctttttacatagtttcctgttctgggctgagccatccacctgtttcctacatttcgttgtagccttttaatttaaggggctaggaaattgaactaagagtttggtactgtttcgtgggagtgtgacttcactccaatatttgatatctatctgtgacacttgctataacctgtacttttcttgtttgtgttatgtggtttttatttggttatgaaaaataaaaaggcatgtcgcagatagaagatcgttattctattcgcgtttgaaaagctttacaccaatctcgagatgaacttttagcataacacttttcttgtggtgttcatttggataaattttccgcggtggtgtc

SEQ ID NO: 23962 - DNA, 3605 bp, Zea Mays
tttctttgtaattgttgtgtattaatattttgttgaatgttttgtgtgccgttgcaacgcacgggcacatacctagtccaccaaacaaaaccttactggtcggtcccgtctgacaaatgggtcccattgctcattggctaagagacctgccaggctgccagcgtacgctagccaagtccctgagtaggcctcctgttttcccccacggcccacgctagccaagtccaggttctgaggttcacaaatcacaaccctagttggcggcgctcagatccggtggcatcctcctcccgcgtccctgtagcggcctccgacgacgaccttgtagcggcagcgtgtggcggcaatcggtgtactctttgcagagcaagactgaagttaaggaagcagcagaaccatggcatcccgtttctggggacagggggacagtgagtctgaggaggaggaggtggaagaagttgagtcagaacagggcagtgatagtgatgatgatggaggtcgaggtggtgcgggacgcggtgcccaaaaccgatatttgaagaatcaagaagatgacagcgatgagtctgatacaggtcaccgtgtgatccgctccctgagggacaagcgcaacgaggagatgagatctattgttgatcagatgcgtaatgcaatgaagatcaatgactgggtgagcttgcaggagagttttgagaagcttaacaaacatcttgagaaggttgttcgtgtcaatgaatctactgaggtaccaaaaatgtatatcaaagctcttgtgttgctggaggacttccttgccgaagcccttgcaaacaaggaggccaggaagaagatgagcagcagcaattcgaaggcactcaatgcgatgaggcaaaaactcaagaagaacaacaagcagtatgaagagcagatccagaagtgcagggagcatccagagagttttgaagatgaagctgcagatgataaagatgtggatgatgacgatgctgatgaaagtgatgcagagattgaagatcctgataaaatagctatgtcagaatcagaagaggaacaagatgaagaggatgatgataaggatggttgggaacagaaaaggagtaagaaggataagctgatggataagcagttcttgaaagatccaagtgaaatcacatgggatattgtcgataagaaactcaaagagattatagcatctaggggaaagaaaggtactggaaggatcgagcgtgttgagcagttaacatttttgacccgtgtggccaaaacaccagctcagaagcttgaaatcctcttccatgtgatttctgcgcagtttgatgttaaccctagtctacttgggcatatgccagtcaatgtgtggaagaagtgtgtcaataatatgcttcttgtgcttgatatactccagcagtatcctaacattgtagtagacacctcatttgagcctgatgagaatgaaactcaaaagggtgcagactacaatggaacaatacatgttgtcggtgacctggttgcattccttgagagactggactctgaatttttgaagaccttacagtgcacagatccatacacaaaagattatgttcagaggctcagagaggaacccctgtttctggttgtcgcacagaacgtccaagattatcttgaaagggttggaaacttcaaagctgctgccaaggttgcactgcgccgtgttgaactagtttactacaagccccaagaagtgtacgatgcaatgagaaaactcgcagagcagcctgaggactgtgtggatgatgatgatgcagaggctggtgatgaacataaagcagtagatgacaatagaggaccatcaccatttgttgtgattccagaggctgtgcacaggaagcctacttttccagaaagcggtagaactttgatggatggattgatgttcttaatttacaagtatggggatgaaaggaccaaagcccgtgcaatgctgtgtgacatatatcaccatgcgatctctgatgagttttcagtggctcgcgacttgcttttaatgagtcatttgcaagatggtattcagctcatggacatatcatcgcagattttattcaacagagtcatggcccagttagggctgtgtgctttcagggctggtttgataaatgaagcccatggttgcttgactgagctctattctactgggagggtgaaagaattgcttgcacaaggtgtgcaacaaagccgataccatgaaaaaactcccgaacaggaaagacttgagaggagaaggcaaatgccttaccatatgcatataaacctggagcttttggaagccacacacttgatctgtgcgatgctgattgaagtccccaatatggctgccagcacctatgacaagcggagacctatgagcaaaacattccgaaggcttcttgaagtgagtgaaaggcagacatttgttgggccgcccgagaatgtgagggaccatgtaatggctgccacaagagccctcaacaagggtgatcaccaaaaggctttcagtgtcataaattcgttggagatttggaagcttttgaggaacagagagcatgttcttgagatgttggagcttaagatcaaggaggaagctcttagaacctatctcttttcatactcgtcttcgtacgagtccttaagccttaaccagctcactaccatgtttgatctcagcgagcagcatgcccacagcattgttagcaagatgatgatgcatgaagagcttcatgctagctgggaccagccaacaaagtgcatcgtattccatagtgtggaccaaactaggcttcaggggctactcttccagatggcagataagctctcggtcctggtggagatcaatgagagggcatacgaggcaagaactggtggtactctcgagggggtacctcccaggcgcaggggcgagggtcaggataatatgggaaagtggcaggataactttgtctcgtcacaggggcggcagggtggtggcaacaggtttggatactccggcagaggtgcaatatctggtcaaagtggtggtggacaccagagggacaggggcaatcagggttaccgcgggggctatggtggcgtttcaaggtttcaggatgcaaggggtcgcaaccagtctattccatcaggcagaggtggtgatggtggtgcacgcatggtgaacctgaacaggatgggtagagtttagaagtgataattttcagctcgagtaagcctgaaattctcctaaaagccaagttttgaatcactgctttttacatagtttcctgttctgggctgagccatccacctgtttcctacatttcgttgtagccttttaatttaaggggctaggaaattgaactaagagtttggtactgtttcgtgggagtgtgacttcactccaatatttgatatctatctgtgacacttgctataacctgtacttttcttgtttgtgttatgtggtttttatttggttatgaaaaataaaaaggcatgtcgcagatagaagatcgttattctattcgcgtttgaaaagctttacaccaatctcgagatgaacttttagcataacacttttcttgtggtgttcatttggataaattttccgcggtggtgtc

SEQ ID NO: 23963 - DNA, 1968 bp, Zea Mays
ccctaatgcatatttagtactattggacgttcttttgtactgatgacaagaggtgtactctttgcagagcaagactgaagttaaggaagcagcagaaccatggcatcccgtttctggggacagggggacagtgagtctgaggaggaggaggtggaagaagttgagtcagaacagggcagtgatagtgatgatgatggaggtcgaggtggtgcgggacgcggtgcccaaaaccgatatttgaagaatcaagaagatgacagcgatgagtctgatacaggtcaccgtgtgatccgctccctgagggacaagcgcaacgaggagatgagatctattgttgatcagatgcgtaatgcaatgaagatcaatgactgggtgagcttgcaggagagttttgagaagcttaacaaacatcttgagaaggttgttcgtgtcaatgaatctactgaggtaccaaaaatgtatatcaaagctcttgtgttgctggaggacttccttgccgaagcccttgcaaacaaggaggccaggaagaagatgagcagcagcaattcgaaggcactcaatgcgatgaggcaaaaactcaagaagaacaacaagcagtatgaagagcagatccagaagtgcagggagcatccagagagttttgaagatgaagctgcagatgataaagatgtggatgatgacgatgctgatgaaagtgatgcagagattgaagatcctgataaaatagctatgtcagaatcagaagaggaacaagatgaagaggatgatgataaggatggttgggaacagaaaaggagtaagaaggataagctgatggataagcagttcttgaaagatccaagtgaaatcacatgggatattgtcgataagaaactcaaagagattatagcatctaggggaaagaaaggtactggaaggatcgagcgtgttgagcagttaacatttttgacccgtgtggccaaaacaccagctcagaagcttgaaatcctcttccatgtgatttctgcgcagtttgatgttaaccctagtctacttgggcatatgccagtcaatgtgtggaagaagtgtgtcaataatatgcttcttgtgcttgatatactccagcagtatcctaacattgtagtagacacctcatttgagcctgatgagaatgaaactcaaaagggtgcagactacaatggaacaatacatgttgtcggtgacctggttgcattccttgagagactggactctgaatttttgaagaccttacagtgcacagatccatacacaaaagattatgttcagaggctcagagaggaacccctgtttctggttgtcgcacagaacgtccaagattatcttgaaagggttggaaacttcaaagctgctgccaaggttgcactgcgccgtgttgaactagtttactacaagccccaagaagtgtacgatgcaatgagaaaactcgcagagcagcctgaggactgtgtggatgatgatgatgcagaggctggtgatgaacataaagcagtagatgacaatagaggaccatcaccatttgttgtgattccagaggctgtgcacaggaagcctacttttccagaaagcggtagaactttgatggatggattgatgttcttaatttacaagtatggggatgaaaggaccaaagcccgtgcaatgctgtgtgacatatatcaccatgcgatctctgatgagttttcagtggctcgcgacttgcttttaatgagtcatttgcaagatggtattcagctcatggacatatcatcgcagattttattcaacagagtcatggcccagttagggctgtgtgctttcagggctggtttgataaatgaagcccatggttgcttgactgagctctattctactgggagggtgaaagaattgcttgcacaaggtgtgcaacaaagccgataccatgaaaaaactcccgaacagacttggttggcatgagtggggtctggg

SEQ ID NO: 23964 - DNA, 2133 bp, Zea Mays
gggtcccattgctcattggctaagagacctgccaggctgccagcgtacgctagccaagtccctgagtaggcctcctgttttcccccacggcccacgctagccaagtccaggttctgaggttcacaaatcacaaccctagttggcggcgctcagatccggtggcatcctcctcccgcgtccctgtagcggcctccgacgacgaccttgtagcggcagcgtgtggcggcaatcgagcaagactgaagttaaggaagcagcagaaccatggcatcccgtttctggggacagggggacagtgagtctgaggaggaggaggtggaagaagttgagtcagaacagggcagtgatagtgatgatgatggaggtcgaggtggtgcgggacgcggtgcccaaaaccgatatttgaagaatcaagaagatgacagcgatgagtctgatacaggtcaccgtgtgatccgctccctgagggacaagcgcaacgaggagatgagatctattgttgatcagatgcgtaatgcaatgaagatcaatgactgggtgagcttgcaggagagttttgagaagcttaacaaacatcttgagaaggttgttcgtgtcaatgaatctactgaggtaccaaaaatgtatatcaaagctcttgtgttgctggaggacttccttgccgaagcccttgcaaacaaggaggccaggaagaagatgagcagcagcaattcgaaggcactcaatgcgatgaggcaaaaactcaagaagaacaacaagcagtatgaagagcagatccagaagtgcagggagcatccagagagttttgaagatgaagctgcagatgataaagatgtggatgatgacgatgctgatgaaagtgatgcagagattgaagatcctgataaaatagctatgtcagaatcagaagaggaacaagatgaagaggatgatgataaggatggttgggaacagaaaaggagtaagaaggataagctgatggataagcagttcttgaaagatccaagtgaaatcacatgggatattgtcgataagaaactcaaagagattatagcatctaggggaaagaaaggtactggaaggatcgagcgtgttgagcagttaacatttttgacccgtgtggccaaaacaccagctcagaagcttgaaatcctcttccatgtgatttctgcgcagtttgatgttaaccctagtctacttgggcatatgccagtcaatgtgtggaagaagtgtgtcaataatatgcttcttgtgcttgatatactccagcagtatcctaacattgtagtagacacctcatttgagcctgatgagaatgaaactcaaaagggtgcagactacaatggaacaatacatgttgtcggtgacctggttgcattccttgagagactggactctgaatttttgaagaccttacagtgcacagatccatacacaaaagattatgttcagaggctcagagaggaacccctgtttctggttgtcgcacagaacgtccaagattatcttgaaagggttggaaacttcaaagctgctgccaaggttgcactgcgccgtgttgaactagtttactacaagccccaagaagtgtacgatgcaatgagaaaactcgcagagcagcctgaggactgtgtggatgatgatgatgcagaggctggtgatgaacataaagcagtagatgacaatagaggaccatcaccatttgttgtgattccagaggctgtgcacaggaagcctacttttccagaaagcggtagaactttgatggatggattgatgttcttaatttacaagtatggggatgaaaggaccaaagcccgtgcaatgctgtgtgacatatatcaccatgcgatctctgatgagttttcagtggctcgcgacttgcttttaatgagtcatttgcaagatggtattcagctcatggacatatcatcgcagattttattcaacagagtcatggcccagttagggctgtgtgctttcagggctggtttgataaatgaagcccatggttgcttgactgagctctattctactgggagggtgaaagaattgcttgcacaaggtgtgcaacaaagccgataccatgaaaaaactcccgaacagacttggttggcatgagtggggtctggg

SEQ ID NO: 23965 - DNA, 2148 bp, Zea Mays
gggtcccattgctcattggctaagagacctgccaggctgccagcgtacgctagccaagtccctgagtaggcctcctgttttcccccacggcccacgctagccaagtccaggttctgaggttcacaaatcacaaccctagttggcggcgctcagatccggtggcatcctcctcccgcgtccctgtagcggcctccgacgacgaccttgtagcggcagcgtgtggcggcaatcggtgtactctttgcagagcaagactgaagttaaggaagcagcagaaccatggcatcccgtttctggggacagggggacagtgagtctgaggaggaggaggtggaagaagttgagtcagaacagggcagtgatagtgatgatgatggaggtcgaggtggtgcgggacgcggtgcccaaaaccgatatttgaagaatcaagaagatgacagcgatgagtctgatacaggtcaccgtgtgatccgctccctgagggacaagcgcaacgaggagatgagatctattgttgatcagatgcgtaatgcaatgaagatcaatgactgggtgagcttgcaggagagttttgagaagcttaacaaacatcttgagaaggttgttcgtgtcaatgaatctactgaggtaccaaaaatgtatatcaaagctcttgtgttgctggaggacttccttgccgaagcccttgcaaacaaggaggccaggaagaagatgagcagcagcaattcgaaggcactcaatgcgatgaggcaaaaactcaagaagaacaacaagcagtatgaagagcagatccagaagtgcagggagcatccagagagttttgaagatgaagctgcagatgataaagatgtggatgatgacgatgctgatgaaagtgatgcagagattgaagatcctgataaaatagctatgtcagaatcagaagaggaacaagatgaagaggatgatgataaggatggttgggaacagaaaaggagtaagaaggataagctgatggataagcagttcttgaaagatccaagtgaaatcacatgggatattgtcgataagaaactcaaagagattatagcatctaggggaaagaaaggtactggaaggatcgagcgtgttgagcagttaacatttttgacccgtgtggccaaaacaccagctcagaagcttgaaatcctcttccatgtgatttctgcgcagtttgatgttaaccctagtctacttgggcatatgccagtcaatgtgtggaagaagtgtgtcaataatatgcttcttgtgcttgatatactccagcagtatcctaacattgtagtagacacctcatttgagcctgatgagaatgaaactcaaaagggtgcagactacaatggaacaatacatgttgtcggtgacctggttgcattccttgagagactggactctgaatttttgaagaccttacagtgcacagatccatacacaaaagattatgttcagaggctcagagaggaacccctgtttctggttgtcgcacagaacgtccaagattatcttgaaagggttggaaacttcaaagctgctgccaaggttgcactgcgccgtgttgaactagtttactacaagccccaagaagtgtacgatgcaatgagaaaactcgcagagcagcctgaggactgtgtggatgatgatgatgcagaggctggtgatgaacataaagcagtagatgacaatagaggaccatcaccatttgttgtgattccagaggctgtgcacaggaagcctacttttccagaaagcggtagaactttgatggatggattgatgttcttaatttacaagtatggggatgaaaggaccaaagcccgtgcaatgctgtgtgacatatatcaccatgcgatctctgatgagttttcagtggctcgcgacttgcttttaatgagtcatttgcaagatggtattcagctcatggacatatcatcgcagattttattcaacagagtcatggcccagttagggctgtgtgctttcagggctggtttgataaatgaagcccatggttgcttgactgagctctattctactgggagggtgaaagaattgcttgcacaaggtgtgcaacaaagccgataccatgaaaaaactcccgaacagacttggttggcatgagtggggtctggg

SEQ ID NO: 23966 - DNA, 2867 bp, Zea Mays
atcagcgcctggaggcgtgcaagggctaaacccagaatccccaatcatcatggatacaatattcgtccaccttctcctcctctcgtttatgatacttcgtcccatagccatcgccgccgacgtacctgagtccgacacgctcggcaagggccgcaacatcaccgacggcgagacgctcgtctcagccgacgggacgttcaccttgggattcttctctcccggggcgtcgaccaagagatacctcggcatctggttctcggcgtccagtgtcgccgtctgctgggtggcgaacggtggccgccctgtgaatggcaactccggcgtgctggtcgtcagagacacgggaagccttctgcttctagacggctctggccagaccatatggtcgtcgaactccaccagctcatcgtcatcagcggaggcgcagctcctcaactccggcaacctcgtcgtccgcgacggaggcagcagcagcagcagcgacgccatcctgtggcaatcgttcgatcacccgtcgaacaccctgctgtccggcatgaagctgggcaagaacaagtggaccggcgccgagtggtacctcacgtcgtggcgctcggccgacgacccgtcgccgggggcctaccgccgcgcgctggacaccagcgggctgcccgagcttgtggtgtgggagggcaacgtcaggacctaccgcaccggcccgtggaacggccggtggttcagcggcgtcccggaggtgtcggcgtacaggaacttgatctggtaccaggtgacgacaagcccagcggaggtatcctacggctacacctccaaccccggtgccgcattgacccgtgtcgtgctgaccgacgccggcgtggccaagcgcctggtgtgggacgcgggcgcccggacgtggcagaccttcttccagggccccagggacgtctgcgacgcctacggcaagtgcggggcgttcgggctgtgcgacgccggcgcggcgtcgacgtggttctgcacctgcctcacggggttcagcccggcgtcgccgcccgcgtggtccttgagggacacctcaggcggatgcaagcggaacgtgaagctggactgtgccaataacgggagtgggacgacgacgacgacagacggtttcctgttggtccgcggagtgaagctaccggacacacacaacgcgacggtggacatgagcatcacggtggaggactgcgcggcgaggtgcctcgccaactgctcgtgcttggcctacgccgccgcagatatccgcggcggcgacgtccgtagcggctgcgtgatgtggacggatgacatcgtcgacctccgatacgtggacaaagggcaagatctctacctgaggctggccaggtccgagctgccggcggcggcggggccctcgccgcaacggccgtttcgtaccgcaccagttgttggtgcttccgcagctgccgtcgccgtggttcttattgttctgtcggtcgtgcttgtgattaggcggcgccggcgaccaataatcccagctgctcagagtgcctctccgagtgtcccttctactgaactgcgcagacctccgtcagtcccttctgttgacctgtctagtttgaggagggctacaaatgatttctctgcagacaatgtcattgggcgtggaggattcagcaccgtatttgagggcaatttagctgatggtaccaaggttgccgtgaagaggctcacacaatcttaccttaccgatggaggtggtgagactttcatgagagaagtggaagtgatgtcagagctcaagcacgagaacctcgctcgtctccttgcttactgcaaggacggaaatgagcggatactggtctacgagtacatggagaacaggagcttgaacctatgcatattcgcaagagacgccaaccaacgcgctgtgttgaactgggagcggaggctggagatcatcgtaggagtcgccagaggcgttgcttatctgcacggactaagcaaggtggtgatacacagggatctgaaaccgtccaacgtgctcttggacggaaactggagagcaaaaattgcagattttggcaccgccaaagtgttcgtcgatggccagacgaatccgacactgggctccagagtacacggcgcgagggccgagcctgacgctgaagtgcgacgtgtatagctttggagtcgtcctgatcgagatcgtcagtggccaaaggaacagcagcaaccagacgctcgtttccgatgcacgggagtcttggagccagaataagatcaaggagaaccttctggatccagccgtgggccagccggggccagagatcctccttcggctggagaggtgcgtgcaggtcggccttctctgcgtgcagcagtcgccagctgacaggccatccatggctgaagtagtcgcgatgctgacggtgaacggcaccagcagctcgcagatccgttcgcaccgcagtgccgctgccgctgccgccgccactcctctcgcgacgcaggacgcgtcgtctggagcacacggcgactccatctatctcacgtagacggcgaagcaaaagcccacgacgactccatctatcattctcacgtagacgacgacgaagcacgcggcgactccattcatctcgatttctgatcttggagttggatctgtcacggcggtattggttagtggtacacgattacacgagcattgcagttgcaggaagcagcagcaaaagtatatatactagcgaattcatgtatgttgctggaatattaccaaaaacttcatgttcatgggaacttttacaaaagagtagtgttgttgttgtatagcagatcaggcatcagcagttctttccctgtttatttttctctgttagttagttaatcctgtg

SEQ ID NO: 23967 - DNA, 2885 bp, Zea Mays
ctctcttatcagcgcctggaggcgtgcaagggctaaacccagaatccccaatcatcatggatacaatattcgtccaccttctcctcctctcgtttatgatacttcgtcccatagccatcgccgccgacgtacctgagtccgacacgctcggcaagggccgcaacatcaccgacggcgagacgctcgtctcagccgacgggacgttcaccttgggattcttctctcccggggcgtcgaccaagagatacctcggcatctggttctcggcgtccagtgtcgccgtctgctgggtggcgaacggtggccgccctgtgaatggcaactccggcgtgctggtcgtcagagacacgggaagccttctgcttctagacggctctggccagaccatatggtcgtcgaactccaccagctcatcgtcatcagcggaggcgcagctcctcaactccggcaacctcgtcgtccgcgacggaggcagcagcagcagcagcgacgccatcctgtggcaatcgttcgatcacccgtcgaacaccctgctgtccggcatgaagctgggcaagaacaagtggaccggcgccgagtggtacctcacgtcgtggcgctcggccgacgacccgtcgccgggggcctaccgccgcgcgctggacaccagcgggctgcccgagcttgtggtgtgggagggcaacgtcaggacctaccgcaccggcccgtggaacggccggtggttcagcggcgtcccggaggtgtcggcgtacaggaacttgatctggtaccaggtgacgacaagcccagcggaggtatcctacggctacacctccaaccccggtgccgcattgacccgtgtcgtgctgaccgacgccggcgtggccaagcgcctggtgtgggacgcgggcgcccggacgtggcagaccttcttccagggccccagggacgtctgcgacgcctacggcaagtgcggggcgttcgggctgtgcgacgccggcgcggcgtcgacgtggttctgcacctgcctcacggggttcagcccggcgtcgccgcccgcgtggtccttgagggacacctcaggcggatgcaagcggaacgtgaagctggactgtgccaataacgggagtgggacgacgacgacgacagacggtttcctgttggtccgcggagtgaagctaccggacacacacaacgcgacggtggacatgagcatcacggtggaggactgcgcggcgaggtgcctcgccaactgctcgtgcttggcctacgccgccgcagatatccgcggcggcgacgtccgtagcggctgcgtgatgtggacggatgacatcgtcgacctccgatacgtggacaaagggcaagatctctacctgaggctggccaggtccgagctgccggcggcggcggggccctcgccgcaacggccgtttcgtaccgcaccagttgttggtgcttccgcagctgccgtcgccgtggttcttattgttctgtcggtcgtgcttgtgattaggcggcgccggcgaccaataatcccagctgctcagagtgcctctccgagtgtcccttctactgaactgcgcagacctccgtcagtcccttctgttgacctgtctagtttgaggagggctacaaatgatttctctgcagacaatgtcattgggcgtggaggattcagcaccgtatttgagggcaatttagctgatggtaccaaggttgccgtgaagaggctcacacaatcttaccttaccgatggaggtggtgagactttcatgagagaagtggaagtgatgtcagagctcaagcacgagaacctcgctcgtctccttgcttactgcaaggacggaaatgagcggatactggtctacgagtacatggagaacaggagcttgaacctatgcatattcgcaagagacgccaaccaacgcgctgtgttgaactgggagcggaggctggagatcatcgtaggagtcgccagaggcgttgcttatctgcacggactaagcaaggtggtgatacacagggatctgaaaccgtccaacgtgctcttggacggaaactggagagcaaaaattgcagattttggcaccgccaaagtgttcgtcgatggccagacgaatccgacactggtacagacagaggctccagagtacacggcgcgagggccgagcctgacgctgaagtgcgacgtgtatagctttggagtcgtcctgatcgagatcgtcagtggccaaaggaacagcagcaaccagacgctcgtttccgatgcacgggagtcttggagccagaataagatcaaggagaaccttctggatccagccgtgggccagccggggccagagatcctccttcggctggagaggtgcgtgcaggtcggccttctctgcgtgcagcagtcgccagctgacaggccatccatggctgaagtagtcgcgatgctgacggtgaacggcaccagcagctcgcagatccgttcgcaccgcagtgccgctgccgctgccgccgccactcctctcgcgacgcaggacgcgtcgtctggagcacacggcgactccatctatctcacgtagacggcgaagcaaaagcccacgacgactccatctatcattctcacgtagacgacgacgaagcacgcggcgactccattcatctcgatttctgatcttggagttggatctgtcacggcggtattggttagtggtacacgattacacgagcattgcagttgcaggaagcagcagcaaaagtatatatactagcgaattcatgtatgttgctggaatattaccaaaaacttcatgttcatgggaacttttacaaaagagtagtgttgttgttgtatagcagatcaggcatcagcagttctttccctgtttatttttctctgttagttagttaatcctgtg

SEQ ID NO: 23968 - DNA, 1584 bp, Zea Mays
atttccctcttcccataacttccatgtctggaaaaatatgaatatctgtgccaacattggagaaactgttcctctgctcaacaaatctgaacagcacaggatgaaacggtgcgtaccagggctggcaagccggaggtacagcttctcgccatagttgatgcttttccaggtgtcgacaagctccccggtccaaaccaagcaccttgactggtcttccatggcaccgctgctgctcaagttggcgtaagcataggcggtgcaggagcagttcttgctgcactcagccgcgcactgctcaaagcttctgttccggaggagcacgaacttgtcaggaactctcatcccgggcaaggccacgaagtgacttgccttgctgcactgcagaggctccgttctccggcatccttctgaagagttgagatcggcggcgacgggctcgaagccctcgaggcactggcacgccggggcagccccggtgaagtcgcagtaggcgttggggccacaggagccatagaggccgtagccaccggtggggcgctcggagatgagcgtccaggacgacgagttggtgtcccagctcaggagcttcatcgtgccggtgtggtcgagcatgatacggaagtacggcgagccgtcggagacggtgtacgtgaggtagaactcgtcgccggtgttgacgatggtctggtacacgatggagctaggtgagccggtgtacatgccgcctgacaccgacacgccgttccacacgctgatgcggcagtacggctcggccccgtgccagaccatcagctggaggttggagacggggtcgaggccgaacgagaaggctccggtggacgggtcggcggggcctctccaagagaccaggcgcgcggcggggcgagccccgtggatcatcaggaaccgcatgcctgggagaatggtgtcagtcgggtggtcgaagctctgccatatgaccgtaccgttgggcagctggagttgcaggttgcccgtgtcgagcagcacggccaggggagtgccgctgtcgtggacggccgcggcggcggcgttctgcgtcctccagagagtgcggccctgggagtccgaaagcacgaggtcaaagctgttgctgatggcgagcgtcggggacgacgatgtggtggctgggctgtcgcggttggcgacccacacgacggtgcggctgcgctcggggatgccgtggaaccagatcgcaacgtacaggctcgtgctggtgttggagccggacggggagaagaaaccgagggcaaagacgccgcctttggagatgagcaggtcgccgggtgaaagtggccttgcgcttgccagctggtcatcggatttgcagacacggatcatcaggaggagcaggaggatggaaatggtaaggctggtcatatccattctatggttatgctcatcactgacgagtatagatcagggaccacgaaaatggcaccaagatatagatcagagattgtacacatggacaaggtggagtcgtaagttcaccgggtgtagtctgacaaatttgatgaaaatgcaaaacgtcaatgccgtgtaatggtctaaaatatttaacaa

SEQ ID NO: 23969 - DNA, 2014 bp, Zea Mays
ggtttttaatggagcgaaccttataataaagcagcgaaaaccccccgcttacgcgccacagccgaaacggttcgctcgagccaagattcggctatgagaagttcctgagcatggcggcatgggcatcgtggcgtgggagcgccgatggactgggccgctcgaaaggaagaggtccttcctggcccacctaatcggtgtcgttcaaagacttcagaagttcagcggtgcggaactgcggaggctgacagctgaggcggaggaaccgtaaccacgccgccaccgcccttcttccgtagtatcgctagacggacccttgacgcctcgcgccgccacagttcggcacccgtgtcccatggccgccgtcttcgccagaggagtgatccgaagcttttgcagaatgtgtgagctctgcctgtcagtggcgatttgctgaataacctaaatttcacttgcagctagtgttggagatgaatatctgtgccaacattggagaaactgttcctctgctcaacaaatctgaacagcacaggatgaaacggtgcgtaccagggctggcaagccggaggtacagcttctcgccatagttgatgcttttccaggtgtcgacaagctccccggtccaaaccaagcaccttgactggtcttccatggcaccgctgctgctcaagttggcgtaagcataggcggtgcaggagcagttcttgctgcactcagccgcgcactgctcaaagcttctgttccggaggagcacgaacttgtcaggaactctcatcccgggcaaggccacgaagtgacttgccttgctgcactgcagaggctccgttctccggcatccttctgaagagttgagatcggcggcgacgggctcgaagccctcgaggcactggcacgccggggcagccccggtgaagtcgcagtaggcgttggggccacaggagccatagaggccgtagccaccggtggggcgctcggagatgagcgtccaggacgacgagttggtgtcccagctcaggagcttcatcgtgccggtgtggtcgagcatgatacggaagtacggcgagccgtcggagacggtgtacgtgaggtagaactcgtcgccggtgttgacgatggtctggtacacgatggagctaggtgagccggtgtacatgccgcctgacaccgacacgccgttccacacgctgatgcggcagtacggctcggccccgtgccagaccatcagctggaggttggagacggggtcgaggccgaacgagaaggctccggtggacgggtcggcggggcctctccaagagaccaggcgcgcggcggggcgagccccgtggatcatcaggaaccgcatgcctgggagaatggtgtcagtcgggtggtcgaagctctgccatatgaccgtaccgttgggcagctggagttgcaggttgcccgtgtcgagcagcacggccaggggagtgccgctgtcgtggacggccgcggcggcggcgttctgcgtcctccagagagtgcggccctgggagtccgaaagcacgaggtcaaagctgttgctgatggcgagcgtcggggacgacgatgtggtggctgggctgtcgcggttggcgacccacacgacggtgcggctgcgctcggggatgccgtggaaccagatcgcaacgtacaggctcgtgctggtgttggagccggacggggagaagaaaccgagggcaaagacgccgcctttggagatgagcaggtcgccgggtgaaagtggccttgcgcttgccagctggtcatcggatttgcagacacggatcatcaggaggagcaggaggatggaaatggtaaggctggtcatatccattctatggttatgctcatcactgacgagtatagatcagggaccacgaaaatggcaccaagatatagatcagagattgtacacatggacaaggtggagtcgtaagttcaccgggtgtagtctgacaaatttgatgaaaatgcaaaacgtcaatgccgtgtaatggtctaaaatatttaacaa

SEQ ID NO: 23970 - DNA, 1737 bp, Zea Mays
gccccaccgagcggcagtccagcagatgggtctgggggcggtgattacaaagagagcgggctgttgctacgactagtgaggttggaggtactgcagattaattgagagaggggaaggaagcctggttcgtcttagtgtttgcaggcagtgatgatgatgagttcagaggagactgaagcaaaaaggttagaggaagaggctgaaaaaaggacaatgattcatggtgacaagaaagaagaggatccactaatcacaaaaagtgagatgagaaatgagatgaggagtatggttcaggaactcatgggactaggtatgattggccccaaggctttgcctatctcatctgaattaaaattagaactcgttccaaatgatgtgaagctagaaggaagcaagaattatttgagttggtctaggagagtgcgagtgctcttagaaggtaaatgagtggagcactatttagaagagggctgtgttgaacctgttgataggctcagccctgaatagagggtttggtataccaccaactcagttattgtgacgtggttgttagcatccatgtcttcgtctgtaagtaagatggtcgaagccatgcgtgctgttgcacaaatttggaagaccttgaacaatatgtattcgagaaaggagaatgtgatgatgatgatggagatccgaagtaaggcagatgcagtgaaacatacagggagaccagtggaacaatatgctagtgaaattcagtacttgtggagagaactagatcactacgctcctctgcaaatggtttgccctcaggatgcacaggttgtccacaagtgggtagaggacaggagagtaactcactttctaaagaatttggacccggagtttgagagcaggagagatgccttttgtcaccaagaaagtcttcctaccatggatgaagctgtgtcagcaatgattaatgaggaaagcaggctccgggtaatgacatctaatgatcctgcgaaatcagcctacaccgcaaatgatgatagagactgctataattgtggtgagaagggacacttgagctacaattgtcctcatcctcgtggcagtggtgaacgaggtggtggaactcgtggagccacttgtagtacctatggaagaggtcgtggaggttatggaagggggcgtggtggccgtgccaggggcagaggtcgtggtggccctcatgtcaatgtagcggttactgaagacaccccctcaatcaccctgactagggaacaagctaaacggtgggaagaatggcataagggcaaagaatccgagtgtccaaccagcactcctcttggttctgtggcaactacatccacccagcacttcggagaagagaactgggaagaggattgggactgaagtcaagcgtaatgggctatggttcatcaatcaagaggagcaagctttgtcagcaacaacagaaggaaataaaagggaaatcatgctgctacatcatcgattaggacatgtatcttttgagagcttgagtaaattgtaccctgattcctttaagggaatggagaaaggaactcttgtgtgtgatgcatgtgagcttgccaagcataccagatctacttaccctagtgttggacttcgtagcagtgattcatttatgttaatacattctgatgtttggggttcttgctcgattacatctaagtggttttaaatggtttgtcgcatttattgattgctattctcgcatgacatggatatata

SEQ ID NO: 23971 - DNA, 419 bp, Zea Mays
tggcaactacatccacccagcacttcggagaagagaactgggaagaggattgggactgaagtcaagcgtaatgggctatggttcatcaatcaagaggagcaagctttgtcagcaacaacagaaggaaataaaagggaaatcatgctgctacatcatcgattaggacatgtatcttttgagagcttgagtaaattgtaccctgattcctttaagggaatggagaaaggaactcttgtgtgtgatgcatgtgagcttgccaagcataccagatctacttaccctagtgttggacttcgtagcagtgattcatttatgttaatacattctgatgtttggggttcttgctcgattacatctaagtggttttaaatggtttgtcgcatttattgattgctattctcgcatgacatggatatata

SEQ ID NO: 23972 - DNA, 708 bp, Zea Mays
agaagcagctgaggaggcaacagcgagcttgtccctgcagtccgacctcgtccgcagctgccccgccgtgcacgagtcgccgaggaggccgccttgcgcaagctgaggaggccgcagacctcgacctcgtctccgccgtccgacctcgttccgcagctggcctcaaatgcgcgagggcgagtaggaggcggcgacggcgggtgcgcaaggaagaggaggggacaggcgacggtgggtgcgcgaggaagagcaggggacgggcggcggcggggtcatgaaggcagaggagacggcggcgaggttcacaagcgtgggtgcgggaatcccttcccgatctcgtgaggctggggacgaaagcgccgtccccccgcggatccggccggggacgtggctcaccaaaccaaattgatagcttcgtccacacgagttcaccgcggactctgttcatgcagggcctgaccctagcgcctcccacacggactctgccctccatgggtatataagctgcccaggaacgattggatcgcagcgcagaactcgccatcgtcggcatcgctgttcatcggcacttagtccacgaaaagcgggggagtgcgatcttcgtagcgtgctgcacgttcccagagcatagccggtgtgcgacgaattgcagaccggagttagaaacagccgccgatctgctaatttacgtggtcaggtcgcggcgcc

SEQ ID NO: 23973 - DNA, 2724 bp, Zea Mays
tccaaaaccaaacacaatggaaaaaaaatcaaaacatgatttatatgcgcaacacttgatcatttcatcagatagtggcttcaacctccagtttatattttggtatcttctctccatccataagaaccttgaagcctggtattattggccctaatttaaaaatatatgtcatgtatcaaaaaagattgcatgtgtagatgtacaaatcccgttggagccacattatgtcacaatccacaccatgcattacctatttgataaagaatgaatgaaatgcaaccattaaacttgttgcccttccagaaggctagcatagactgaaccggaaaaacgtaagctttatggctaatgacaagttataagcacataatgttactgcaacgctaacgctgatttataatgctataaaaattgtcttataaaaaattgttacagaaacattacctctgttgactgtcgctggccatgaaatcactcccactcctagcaaagtcccgtgccccgcatgtgtatgtgcgacatgaagtccttcagcttgcagtcacagccaccacaaccatcaccacattagcgtgcaaggacccatactattcaaaaggttgatgtacctagaattccttggcaaccgtagatgtagcattttctaaaattttagcttatatattgtatcccttcatggttctacaatcggtgaaagatcatggcatatatagtatctaatttcatacatatttttgctacagacctagtgtcctacagcccatacgaatggtgaagattaaattctgcacaaagaacgacacgatgaatgccttcattaccaaaaacagaagtttctgtctcaacggtcaagttagcatgcatattttttagtaactgagtagccaatcaaatattatgatgtttgtcccagctctatgaaacaaaaaacctttgaagtctcgatctgaagtctatccacaaatgttgccgcattttgtggttctgcgggttacattcaactggcagcttgctttagtttttcattcctaagcgcgagcttcggatcagacatcatgttcaggccaaggtctgctgcggcttcctcatctaatccgtcgaagctagacgtgacctatgaccttgcccagctgatcgtactatcgttcccctgtagatgcttcaggacctaggatttggtatggggaggagaagaaaatcaccttgagggcctatccgtatgcggtggaagggagtaggcaaacgaagggaaatgggatggagaagaagccgttcaacatcttctgctctggttatctcacctccgcctctgcacatcccactccatggctgaccgctcccatcttcgtcgttgcggcagcgccatcttccactggtaccttttctccttccccaccacacaaccctgggacaaagcgcgcaggggagcagggacattgaggaaccacagtcgctgctcccgacggcgatggtgccatgacttagcggacgtcggtgggctttgctcccgcgccgggagaaggacgacgcggagggagcgagtaggaagaaagatgaggcagaagggtaaagaagcgaggggagacgtccactcgccaagcgtcgtatcaaacggaagtatccagagcaagcttatattaagcgctaggcgttaggcaggcgttaagctactgcttagcgactagagagcttaaacgtagattaatcgtgcttaagcgtttataggaatataaaatataatatatatatatatatagttgcaacagaaaaacagttttagctaggaatcaggagttttagctaggctcagatgaaggcatcttatacaaagcatgtgcatgtactaattaagctttcaagtcaaagcatccgtcttaaacatagaatagaacagaggagatggaggagcaacagataaatagaaaagggggagactagaagactggaagagcaacagaactataacgtcactgaccctggtgggcggcgaccggggaagacaggaagagccaaagaggacaaacggacaggcggcgacggcagaactggtcgactggggaagagggcagccgcagcttccacgagctctttctttcccgtcgtttccctcctctcctacgcaacagctctcgcccagtttcccttctctcacgtgcagtagcagctcccacctcccgcgtgccttttaaacttttatgcgcttttccatgcgcccaatcccgcttccacgcacgtttttccgttttagcgcgtagagcgcaaattaagcgtcgcctacgcgcgcccactgcggaaaacaacacctatggcataagcgccgcgctaaggcatcgcttagcgcctaatcacgattaggccggcgcttaagcacgcttttttgaacattgatccagagacagggtgaagtatcctgagacggagggaagggtagagcgagacaggagagatcaagcgatgattgccgatcggacgatgtgtttttttgacaacgtggataggctcgtcgttgccgttttgcacctgctttaatatataggaaatgacgcgcacaaaagagaacaaaaatcagcaaggcaagaatgaaagaataaaaggcaagctgaggaggcagtatcagaccagtgaggcgtcgggggttgtcggatcggtgatacaagaatgcaagattcacttcttgagaaccgaaggttgtcggaacgatgaggtgtcgggaagtgatattag

SEQ ID NO: 23974 - DNA, 2455 bp, Zea Mays
catgtggcggatgcgtactaccgtctccgcacgccagaaccccaaaaccccagcggccagcaaaagcagcggcggcgcggccagggaccgacgtacccgccgcgagaagctccggttggcaccccaacggcatggatgctagcagcgtcagcccgtgcgatctagacagggagtttgcgctccaaatcgctcagctcctcgccacgcctcctctccaatcagcccaggaatactatggtgaactcatacggtccaagaagcttgatggcattagagtgagctacagtggcaagcatgggaaaggtgtttatgcaaatagggactttggtgaagacgaccttgttctgaaggaccaaatgttggtcggtgctcaggacagccttaacaagattgactgtgttgtgtgtagttactgcttccacttcattggttctatagagtaccaaattgggcgtagattgtatttgcaaagccttggtggtagtggtgatggcactaccgagagacactgccatgggagtgatgttgggtcaagtactggctgttccggtgcatcaaatggaaatagcaatgctgtgccacaagaggtcctgttgtcacttatggatggtaatacgctgttgcctttaaccgatcagttctgtttgccaccagttgttgcttgccctggtggatgtgagggagaactctactgcagccaatcatgtgcggattccgattgggattcttatcactctttgctgtgtgctggatccaagactgaaccattgcggaaatctgcccttcagaaatttgtggggcatgctaatgaaaccaatgatatttttttggttgctgccaaggctatcactttcaccttgttgagatataggaaactcaaaagacagcatgtgtctcatgaatcaagctcttcgctcctcttggaagcatggaaaccactttcaatgggcttcaaaaagagatggtgggagtgtgttgctttgcctgaagatgttgattccagtgaagaagaattgtttagacagcagataagggatctggcgtttacgtcactgcagcttctcaaggatgcaatctttgatcctgagtgtgcgcctttgttttcgcttgacatctatggccatataattggcatgtttgagctgaacaatcttgatttagttgtcgcatcaccagttgaagactatttcatatacattgacggtcttccagagagcgacaaggaggaagcagagaaggtgacagggccattcctagatgctttaggagaagactacttagttccgtgcgagggaacggcattctttcctctgcagagctgcatgaaccattcatgccgtccaaatgctaaagcatttaagagagacgaggacaaggatggccatgcagtgataattgcccttaggcccatcagcaaggacgaagagattaccatcgcctacatcgatgaagaccttccttacgaggagaggcaggcgcagcttgcagattacgggttcacgtgtacatgcttgaaatgccaagaagagcgaccggtctgaaaggacaaatatgtttgaattttgcggcattcagcctatgtcactgggtagttttgaaagctcgcgagaagtgagtgcacaaaatgatgtttgttttcggctgtaacttgcaaaagttttgttgttgtccaatgaatatgaatagtgacgaacagacgatcagtcgtcgtaaccagcagcctcatgggactaacacaaccacaagagcgaatggcaatagcagcagattatgggggcactgcatatcgcacaacaacgtgtacatagcacaggcttttacacatggtacaggaaaaatgagttccatcactcgagccgagctgacgaaagaaggaaaaaaaaaacaatgatgtcctccgttctcactaagccgctgccaacacttcgctggatggagtttgacctgcaggtaaagaaactatggaaattagggtattaattcttctggagttgcacgcaatcatcatcttggatcttcttatattgtttataagtgttccacgttaacagatcatcattaagacacaacatatcaagacagatcatcattaagacacaacatatcaaggcgcgtgtgctctactatacctctatctctggtctaggcctccaaaatattgttccaggcttggagcgctgaagacattggatgctgttctttccggtcgctgcggtgaaatgtgcagttgatatttgataaacctctgcagggcaaacaaacataccgatgaatagcaaatcaaagactatgtcagtggagtgtccgtgggtgcggctgtttgtgtacttacagctaattggtgaacgatttcaggacttgtgtcgatgtgccaatcaggttcgagttgccgaacgaaagatgtgcggccgttatctgtactacagaagagaacctgcagattttaagagatgtt

SEQ ID NO: 23975 - DNA, 2885 bp, Zea Mays
tttacttttctttctattgattaaaaaacattgaacagagaaaaacaatgggttacgcttttctttctcttgcttaaacattggaagagagaaaaccaaatggttacgctttcacttcctaacggcgtaaggtatatttacgtcttcatgtggcggatgcgtactaccgtctccgcacgccagaaccccaaaaccccagcggccagcaaaagcagcggcggcgcggccagggaccgacgtacccgccgcgagaagctccggttggcaccccaacggcatggatgctagcagcgtcagcccgtgcgatctagacagggagtttgcgctccaaatcgctcagctcctcgccacgcctcctctccaatcagcccaggaatactatggtgaactcatacggtccaagaagcttgatggcattagagtgagctacagtggcaagcatgggaaaggtgtttatgcaaatagggactttggtgaagacgaccttgttctgaaggaccaaatgttggtcggtgctcaggacagccttaacaagattgactgtgttgtgtgtagttactgcttccacttcattggttctatagagtaccaaattgggcgtagattgtatttgcaaagccttggtggtagtggtgatggcactaccgagagacactgccatgggagtgatgttgggtcaagtactggctgttccggtgcatcaaatggaaatagcaatgctgtgccacaagaggtcctgttgtcacttatggatggtaatacgctgttgcctttaaccgatcagttctgtttgccaccagttgttgcttgccctggtggatgtgagggagaactctactgcagccaatcatgtgcggattccgattgggattcttatcactctttgctgtgtgctggatccaagactgaaccattgcggaaatctgcccttcagaaatttgtggggcatgctaatgaaaccaatgatatttttttggttgctgccaaggtaagtggcagaagtatgcatactatatagtatgtttgcatccaaagatcagtctaatttactatatttgtttcgcatttctaatcttgttcaagtgatatcttctttttatattttaaaattgcagcttagtcttggtcaaatgcacatagaaatttgagcatcagacttaagagttgatatcagtcgccaatatttgtcaaaactgtgaacctgctatagaccaatgcaccaaaacagatcatttcatgataagacgattatatgaatttcatgaggctaaaaagagcaaacaaaaaaatcactctttgtcttctggcctctaggttgcaatccaataacacttcttgattctcattcacaaacatccgcttttatatgtcaggctatcactttcaccttgttgagatataggaaactcaaaagacagcatgtgtctcatgaatcaagctcttcgctcctcttggaagcatggaaaccactttcaatgggcttcaaaaagagatggtgggagtgtgttgctttgcctgaagatgttgattccagtgaagaagaattgtttagacagcagataagggatctggcgtttacgtcactgcagcttctcaaggatgcaatctttgatcctgagtgtgcgcctttgttttcgcttgacatctatggccatataattggcatgtttgagctgaacaatcttgatttagttgtcgcatcaccagttgaagactatttcatatacattgacggtcttccagagagcgacaaggaggaagcagagaaggtgacagggccattcctagatgctttaggagaagactacttagttccgtgcgagggaacggcattctttcctctgcagagctgcatgaaccattcatgccgtccaaatgctaaagcatttaagagagacgaggacaaggatggccatgcagtgataattgcccttaggcccatcagcaaggacgaagagattaccatcgcctacatcgatgaagaccttccttacgaggagaggcaggcgcagcttgcagattacgggttcacgtgtacatgcttgaaatgccaagaagagcgaccggtctgaaaggacaaatatgtttgaattttgcggcattcagcctatgtcactgggtagttttgaaagctcgcgagaagtgagtgcacaaaatgatgtttgttttcggctgtaacttgcaaaagttttgttgttgtccaatgaatatgaatagtgacgaacagacgatcagtcgtcgtaaccagcagcctcatgggactaacacaaccacaagagcgaatggcaatagcagcagattatgggggcactgcatatcgcacaacaacgtgtacatagcacaggcttttacacatggtacaggaaaaatgagttccatcactcgagccgagctgacgaaagaaggaaaaaaaaaacaatgatgtcctccgttctcactaagccgctgccaacacttcgctggatggagtttgacctgcagatcatcattaagacacaacatatcaagacagatcatcattaagacacaacatatcaaggcgcgtgtgctctactatacctctatctctggtctaggcctccaaaatattgttccaggcttggagcgctgaagacattggatgctgttctttccggtcgctgcggtgaaatgtgcagttgatatttgataaacctctgcagggcaaacaaacataccgatgaatagcaaatcaaagactatgtcagtggagtgtccgtgggtgcggctgtttgtgtacttacagctaattggtgaacgatttcaggacttgtgtcgatgtgccaatcaggttcgagttgccgaacgaaagatgtgcggccgttatctgtactacagaagagaacctgcagattttaagagatgtt

SEQ ID NO: 23976 - DNA, 3033 bp, Zea Mays
tttacttttctttctattgattaaaaaacattgaacagagaaaaacaatgggttacgcttttctttctcttgcttaaacattggaagagagaaaaccaaatggttacgctttcacttcctaacggcgtaaggtatatttacgtcttcatgtggcggatgcgtactaccgtctccgcacgccagaaccccaaaaccccagcggccagcaaaagcagcggcggcgcggccagggaccgacgtacccgccgcgagaagctccggttggcaccccaacggcatggatgctagcagcgtcagcccgtgcgatctagacagggagtttgcgctccaaatcgctcagctcctcgccacgcctcctctccaatcagcccaggaatactatggtgaactcatacggtccaagaagcttgatggcattagagtgagctacagtggcaagcatgggaaaggtgtttatgcaaatagggactttggtgaagacgaccttgttctgaaggaccaaatgttggtcggtgctcaggacagccttaacaagattgactgtgttgtgtgtagttactgcttccacttcattggttctatagagtaccaaattgggcgtagattgtatttgcaaagccttggtggtagtggtgatggcactaccgagagacactgccatgggagtgatgttgggtcaagtactggctgttccggtgcatcaaatggaaatagcaatgctgtgccacaagaggtcctgttgtcacttatggatggtaatacgctgttgcctttaaccgatcagttctgtttgccaccagttgttgcttgccctggtggatgtgagggagaactctactgcagccaatcatgtgcggattccgattgggattcttatcactctttgctgtgtgctggatccaagactgaaccattgcggaaatctgcccttcagaaatttgtggggcatgctaatggtaagccagcactaaatatttatggtctgcatcattatggcacaatgtccagcttccacttttcatttaagttggaaacctattttctgatgatagttgttctttatttcagaaaccaatgatatttttttggttgctgccaaggtaagtggcagaagtatgcatactatatagtatgtttgcatccaaagatcagtctaatttactatatttgtttcgcatttctaatcttgttcaagtgatatcttctttttatattttaaaattgcagcttagtcttggtcaaatgcacatagaaatttgagcatcagacttaagagttgatatcagtcgccaatatttgtcaaaactgtgaacctgctatagaccaatgcaccaaaacagatcatttcatgataagacgattatatgaatttcatgaggctaaaaagagcaaacaaaaaaatcactctttgtcttctggcctctaggttgcaatccaataacacttcttgattctcattcacaaacatccgcttttatatgtcaggctatcactttcaccttgttgagatataggaaactcaaaagacagcatgtgtctcatgaatcaagctcttcgctcctcttggaagcatggaaaccactttcaatgggcttcaaaaagagatggtgggagtgtgttgctttgcctgaagatgttgattccagtgaagaagaattgtttagacagcagataagggatctggcgtttacgtcactgcagcttctcaaggatgcaatctttgatcctgagtgtgcgcctttgttttcgcttgacatctatggccatataattggcatgtttgagctgaacaatcttgatttagttgtcgcatcaccagttgaagactatttcatatacattgacggtcttccagagagcgacaaggaggaagcagagaaggtgacagggccattcctagatgctttaggagaagactacttagttccgtgcgagggaacggcattctttcctctgcagagctgcatgaaccattcatgccgtccaaatgctaaagcatttaagagagacgaggacaaggatggccatgcagtgataattgcccttaggcccatcagcaaggacgaagagattaccatcgcctacatcgatgaagaccttccttacgaggagaggcaggcgcagcttgcagattacgggttcacgtgtacatgcttgaaatgccaagaagagcgaccggtctgaaaggacaaatatgtttgaattttgcggcattcagcctatgtcactgggtagttttgaaagctcgcgagaagtgagtgcacaaaatgatgtttgttttcggctgtaacttgcaaaagttttgttgttgtccaatgaatatgaatagtgacgaacagacgatcagtcgtcgtaaccagcagcctcatgggactaacacaaccacaagagcgaatggcaatagcagcaggaaaaatgagttccatcactcgagccgagctgacgaaagaaggaaaaaaaaaacaatgatgtcctccgttctcactaagccgctgccaacacttcgctggatggagtttgacctgcaggtaaagaaactatggaaattagggtattaattcttctggagttgcacgcaatcatcatcttggatcttcttatattgtttataagtgttccacgttaacagatcatcattaagacacaacatatcaagacagatcatcattaagacacaacatatcaaggcgcgtgtgctctactatacctctatctctggtctaggcctccaaaatattgttccaggcttggagcgctgaagacattggatgctgttctttccggtcgctgcggtgaaatgtgcagttgatatttgataaacctctgcagggcaaacaaacataccgatgaatagcaaatcaaagactatgtcagtggagtgtccgtgggtgcggctgtttgtgtacttacagctaattggtgaacgatttcaggacttgtgtcgatgtgccaatcaggttcgagttgccgaacgaaagatgtgcggccgttatctgtactacagaagagaacctgcagattttaagagatgtt

SEQ ID NO: 23977 - DNA, 2685 bp, Zea Mays
gcgccgggagatgggttacaacaaggcgacgccgcgccggaacgtgctatcggctctcaacaacgccgaggccaacggggggacgccgtccgtgccggcggatggcggcggcggcggcggcgcggcggaggcggcgcccgtgatcgagttcagtgggagggaggatgtggagcgcttgctcgccgagaaaatgaagggcaaaagcaagaacgatttcaaggggagagtcgatcagatgagcgactacatcaagaagctcagggcgtgcatccggtggtacatggagctggaggatggctatttggctgagcaggagaagctcctaggtgctatggattctgagaacacccgtcataccgagttggaggcccagctcagcactgctattgaagagctgaaagccactaacttggacttgacaaggcgttgtgagtctctagaggagagcttcaacaaggagaagtctgaaaaactgatcgctgtggagtcctacgagaaagaaaagcaggaaagggaatccgctgagagttcacgagatgtactaactgtggacctagaaagggtcactcatgatgctaagcggtttagcgagcagctaaaaatggtccaagacactaataaaaggcttcaagaatacaacaccagcctgcaacaatacaacagtaaccttcaggctgatgcctcgaagagtggtgagaccatctcaaaacttcagaaagagaagagtgccatgatggaaactatggctactctgagagagtgtaacagctcaatgggcaatcagcttgaatcttctagagtttctcaacaagaagctattagagtgaaggaagagctcaggaaagaagtggagtgccttagagttgagttgaagcaagttagagatgatcgtgatcattcagctattcaactgaacagtttgaacattgaacttggtaattacaaggaacagattggtaaaacttcaaaagaatgtgaaagattccgcaccaaagtatctgaacttgaggaaacatgcagtacacaacaagaacagattcggacatttcaaaagcagcttgcagttgcgactgagaagttgaagcttgctgatgtaactgcgatagaggcgatgactggttatgaagaacagaaggagaaaataaaataccttgaggagcgtttagcacaggcagagtctcaaattgttgaaggcgacgagttacggaaaaaactgcacaacactatattggaactgaaaggaaacattagggttttttgtagagttcgaccacttcttcgatttgagggtgattccaatggtccggaaggtgcctctatctcttttccaacatctgtagagtctactggacgtagcattgatttgataaaccaagggcaaaagctctccttctcatatgacaaggtttttgaccatggtgcgtcacaggaagatgtgtttgtggaaatatcgcaactagtccaaagtgcccttgatgggtacaaggaaatgatcaaaaagggataatacctcgttctttggagcaaattttcaagaccagtcggtttctagaatctcaaggatggaattattccatgcaagcatcaatgttggaaatatacaatgagaccattcgtgatttgttagcacctggtcggtctaacagttttgagtctagtaaacaatgcactataaagcatgaccctcatgggaatattgtgtcggaccttacaattattgatgtctttggtattgctgatgtgactagtctactagagaaagcatcccagagtaggtctgtgggtaagactcagatgaatgaacagtcgtccagaagtcattttgtattcacattaaagatatctggatctaacgagaacacaggccaaaatgtccaaggagtccttaacttgattgatttagctgggagtgagcgtcttgctaaaagtggctccacaggtgatcgcttgaaggaaactcagtcaatcaataaaagcttgtcggctttgagcgatgtaatcttcgcgatcgcaaaaggagatgaccacgttccgttcagaaattcaaaacttacatacctattgcagccttgccttggaggtgactcgaaagctctcatgtttgtcaacatttcaccggaggcatcctccgttggtgagacgatatgctcgttgaggtttgcttcaagggtgaatgcttgtgagattggaataccaagacgtcacacataagcccgtcccttcgttctaggctgaattatgggtgaaggtagctgtagggatcatggtaatgtgatatataatgtgttggtttgtgccgcatttggccacaaaggtgatgcccaacagaattcttgtaacttgtacagtgtaggtgatggtgttttgctgagagcagcatatgtacgagtgctgacatcttgtcatgctttccttactttttggtgtagcagacttgggtcatgttaattgtgatcgtgggttcgaatgtgaaactaccttttctctctctctctctgccaactagaattcatctgctggtttatggcaacaatgcaccaaattagttttgtactttgcaggttgtaacttaaatgttagtatgtgtagccacggaagcttgcattgagttgtgcagcctctgaaatgtttgtatttcttcatctctactccttagcacttatttgggccatgactggctgttct

SEQ ID NO: 23978 - DNA, 2667 bp, Zea Mays
gcgccgggagatgggttacaacaaggcgacgccgcgccggaacgtgctatcggctctcaacaacgccgaggccaacggggggacgccgtccgtgccggcggatggcggcggcggcggcggcgcggcggaggcggcgcccgtgatcgagttcagtgggagggaggatgtggagcgcttgctcgccgagaaaatgaagggcaaaagcaagaacgatttcaaggggagagtcgatcagatgagcgactacatcaagaagctcagggcgtgcatccggtggtacatggagctggaggatggctatttggctgagcaggagaagctcctaggtgctatggattctgagaacacccgtcataccgagttggaggcccagctcagcactgctattgaagagctgaaagccactaacttggacttgacaaggcgttgtgagtctctagaggagagcttcaacaaggagaagtctgaaaaactgatcgctgtggagtcctacgagaaagaaaagcaggaaagggaatccgctgagagttcacgagatgtactaactgtggacctagaaagggtcactcatgatgctaagcggtttagcgagcagctaaaaatggtccaagacactaataaaaggcttcaagaatacaacaccagcctgcaacaatacaacagtaaccttcaggctgatgcctcgaagagtggtgagaccatctcaaaacttcagaaagagaagagtgccatgatggaaactatggctactctgagagagtgtaacagctcaatgggcaatcagcttgaatcttctagagtttctcaacaagaagctattagagtgaaggaagagctcaggaaagaagtggagtgccttagagttgagttgaagcaagttagagatgatcgtgatcattcagctattcaactgaacagtttgaacattgaacttggtaattacaaggaacagattggtaaaacttcaaaagaatgtgaaagattccgcaccaaagtatctgaacttgaggaaacatgcagtacacaacaagaacagattcggacatttcaaaagcagcttgcagttgcgactgagaagttgaagcttgctgatgtaactgcgatagaggcgatgactggttatgaagaacagaaggagaaaataaaataccttgaggagcgtttagcacaggcagagtctcaaattgttgaaggcgacgagttacggaaaaaactgcacaacactatattggaactgaaaggaaacattagggttttttgtagagttcgaccacttcttcgatttgagggtgattccaatggtccggaaggtgcctctatctcttttccaacatctgtagagtctactggacgtagcattgatttgataaaccaagggcaaaagctctccttctcatatgacaaggtttttgaccatggtgcgtcacaggaagatgtgtttgtggaaatatcgcaactagtccaaagtgcccttgatgggtacaaggtatgcatatttgcatatggtcaaactggatctggtaaaacttatacaatgatgggtaaaccaggaaatgatcaaaaagggataatacctcgttctttggagcaaattttcaagaccagtcggtttctagaatctcaaggatggaattattccatgcaagcatcaatgttggaaatatacaatgagaccattcgtgatttgttagcacctggtcggtctaacagttttgagtctagtaaacaatgcactataaagcatgaccctcatgggaatattgtgtcggaccttacaattattgatgtctttggtattgctgatgtgactagtctactagagaaagcatcccagagtaggtctgtgggtaagactcagatgaatgaacagtcgtccagaagtcattttgtattcacattaaagatatctggatctaacgagaacacaggccaaaatgtccaaggagtccttaacttgattgatttagctgggagtgagcgtcttgctaaaagtggctccacaggtgatcgcttgaaggaaactcagtcaatcaataaaagcttgtcggctttgagcgatgtaatcttcgcgatcgcaaaaggagatgaccacgttccgttcagaaattcaaaacttacatacctattgcagccttgccttggaggtgactcgaaagctctcatgtttgtcaacatttcaccggaggcatcctccgttggtgagacgatatgctcgttgaggtttgcttcaagggtgaatgcttgtgagattggaataccaagacgtcacacataagcccgtcccttcgttctaggctgaattatgggtgaaggtagctgtagggatcatgtgtaggtgatggtgttttgctgagagcagcatatgtacgagtgctgacatcttgtcatgctttccttactttttggtgtagcagacttgggtcatgttaattgtgatcgtgggttcgaatgtgaaactaccttttctctctctctctctgccaactagaattcatctgctggtttatggcaacaatgcaccaaattagttttgtactttgcaggttgtaacttaaatgttagtatgtgtagccacggaagcttgcattgagttgtgcagcctctgaaatgtttgtatttcttcatctctactccttagcacttatttgggccatgactggctgttct

SEQ ID NO: 23979 - DNA, 2545 bp, Zea Mays
gcgccgggagatgggttacaacaaggcgacgccgcgccggaacgtgctatcggctctcaacaacgccgaggccaacggggggacgccgtccgtgccggcggatggcggcggcggcggcggcgcggcggaggcggcgcccgtgatcgagttcagtgggagggaggatgtggagcgcttgctcgccgagaaaatgaagggcaaaagcaagaacgatttcaaggggagagtcgatcagatgagcgactacatcaagaagctcagggcgtgcatccggtggtacatggagctggaggatggctatttggctgagcaggagaagctcctaggtgctatggattctgagaacacccgtcataccgagttggaggcccagctcagcactgctattgaagagctgaaagccactaacttggacttgacaaggcgttgtgagtctctagaggagagcttcaacaaggagaagtctgaaaaactgatcgctgtggagtcctacgagaaagaaaagcaggaaagggaatccgctgagagttcacgagatgtactaactgtggacctagaaagggtcactcatgatgctaagcggtttagcgagcaggtttctcaacaagaagctattagagtgaaggaagagctcaggaaagaagtggagtgccttagagttgagttgaagcaagttagagatgatcgtgatcattcagctattcaactgaacagtttgaacattgaacttggtaattacaaggaacagattggtaaaacttcaaaagaatgtgaaagattccgcaccaaagtatctgaacttgaggaaacatgcagtacacaacaagaacagattcggacatttcaaaagcagcttgcagttgcgactgagaagttgaagcttgctgatgtaactgcgatagaggcgatgactggttatgaagaacagaaggagaaaataaaataccttgaggagcgtttagcacaggcagagtctcaaattgttgaaggcgacgagttacggaaaaaactgcacaacactatattggaactgaaaggaaacattagggttttttgtagagttcgaccacttcttcgatttgagggtgattccaatggtccggaaggtgcctctatctcttttccaacatctgtagagtctactggacgtagcattgatttgataaaccaagggcaaaagctctccttctcatatgacaaggtttttgaccatggtgcgtcacaggaagatgtgtttgtggaaatatcgcaactagtccaaagtgcccttgatgggtacaaggtatgcatatttgcatatggtcaaactggatctggtaaaacttatacaatgatgggtaaaccaggaaatgatcaaaaagggataatacctcgttctttggagcaaattttcaagaccagtcggtttctagaatctcaaggatggaattattccatgcaagcatcaatgttggaaatatacaatgagaccattcgtgatttgttagcacctggtcggtctaacagttttgagtctagtaaacaatgcactataaagcatgaccctcatgggaatattgtgtcggaccttacaattattgatgtctttggtattgctgatgtgactagtctactagagaaagcatcccagagtaggtctgtgggtaagactcagatgaatgaacagtcgtccagaagtcattttgtattcacattaaagatatctggatctaacgagaacacaggccaaaatgtccaaggagtccttaacttgattgatttagctgggagtgagcgtcttgctaaaagtggctccacaggtgatcgcttgaaggaaactcagtcaatcaataaaagcttgtcggctttgagcgatgtaatcttcgcgatcgcaaaaggagatgaccacgttccgttcagaaattcaaaacttacatacctattgcagccttgccttggaggtgactcgaaagctctcatgtttgtcaacatttcaccggaggcatcctccgttggtgagacgatatgctcgttgaggtttgcttcaagggtgaatgcttgtgagattggaataccaagacgtcacacataagcccgtcccttcgttctaggctgaattatgggtgaaggtagctgtagggatcatggtaatgtgatatataatgtgttggtttgtgccgcatttggccacaaaggtgatgcccaacagaattcttgtaacttgtacagtgtaggtgatggtgttttgctgagagcagcatatgtacgagtgctgacatcttgtcatgctttccttactttttggtgtagcagacttgggtcatgttaattgtgatcgtgggttcgaatgtgaaactaccttttctctctctctctctgccaactagaattcatctgctggtttatggcaacaatgcaccaaattagttttgtactttgcaggttgtaacttaaatgttagtatgtgtagccacggaagcttgcattgagttgtgcagcctctgaaatgtttgtatttcttcatctctactccttagcacttatttgggccatgactggctgttct

SEQ ID NO: 23980 - DNA, 2465 bp, Zea Mays
atcaattggaggttctcttcagcttcttggtttctgcacctttgaggcttgtgttggcatattggccgtcaatcatgaagatgagatctcagtacattcctgaggaagcgagaagcacaatcatgaacttcttccgcataccactcaacttatttgtttgtgtggtgctttacatcgtgaatgcattccctatcactgtcatgtttgggatgtgttctatcttcctcttcatggcagccatcttgctgcacatgcaagggaggaacctgcttatagatatgtttctttactatcacaattatttgaaaccactggattatagggagaaaactgttattgcttgcctccttacgggatgactcatggtacaacgtcatttgaatacatatggtcgacaatgaagtttagtattgatttctgaatcatcaaaggctcgtgcagttgcccagccttggtgctcaacgtcagaaagaactcacttctcggtagcgcgcttgccgatttttgacggccataatggcaaagatgctgctcaatatgtctgtgataacttgccatgggtcatcatggaagatgatgatttatctcttgagcttaaaaagggtactccatgtgtggaagagttcaccccaaaaaattgtgaaatgttatgcaacaatacgaagcttgatcttgctactgtcgagaccgatgttgatgagaaagtcgaagataaggtatgttcttatgtggatcaacttcttgcagctatgcgagccaaagattctaccatgcacgtatgtcgccgccgcgagggtcatgtgctagcagatataaatctatacaaaaggtgtacttttggagtcttccaagttgtgctgggaactaggcatacaggaaaaggaaggagcctgatgtagagaagcaaaaggaaccaattctagagcatgtcacagtgttacttgccagtcattatcacctaaaatttacaactcgcgatgtgtttcttccctttgatttatttgtaagcaggaagcatctttgttgaatacaacaaatcaagcttgtgggctttataatgaagctgagagactccaaaaaatgattaagaaatctaaggaccaagatgccattggagaaatgaagagtcgtgtcacatggattgataagcagttgaagtctcatcctccaaagaacgttgaatcggaaatcttgcgtgagcatatcaagaaagagagggaggcagcaaaggctggaaaacgaccatactatctgaggaaacctgaacttcgcgaaaggaagctgatgaacaagtacaatgagctcaaggaagaatgcctccaaagatcatcggttcatgctgtaccgacgctcggcaacaacgagctgcgcggccgcctccccgccggcctctccggcctccgcgacctgcagtacctgatcttggagaacaaccccatgggcggcgtcccgctgccgcccgagctgggcaacatccccaggctccaggagctccggctggccaactccggctactcgggccccataccggacacgttcggcctcctgtccagcctcaccacgctgtcgctggagaacaacaacctcaccgggcggatcccgccggggctcagccgtctcaagcgcatgtaccacctcaacctgagcaagaacgggctggacggcgtcgtccctttcgacgccgcgttcctcaggcggctcggccggaacctggacctgagcggcaacccggggctgtgcgtcaccgaccgggccgtcatgccgggcgtgggcgtcggagtctgcggcgacgacgtcgtcgactgcgaacggtccgccgccgcggagagctcggtcgtcgggagagtggtcaggggagaggtgacgacgggtcgctggccggccgggctgctcaggcccgccgcggttgcgctgtgcagctgccttttgctatgagctcctctgatcatccagggtcggtgcattgcatgcaattgtttgcacccgttgatctctctgtacgtaggtgtgttgctgtaactcgcgatgttgattgtttgaggtgtgtagttgggattcgtgacaagaagtccaagtgaagcgtgaagaccggggagttaggatgacgttgtttcttttgtgcgtgattggcacacgtggggtttgtcggatcacttcattcacattcggttaaccgagcgcgtgacttctgacaataatacagtcgtcaaacacgctgtccgtggttataattgccataaaacacacgtagacggtcgaccgattagtaaaacttttccttcttacaggactttttgttcttttaaagttagtttgaaaactttattttctccaaagacatttttccctaaaaataagaaaaatagaggtttttgactaataaaatttacatatctagaatatttagcctataaatatatcataaccaagtaaatatcggatattcatcgtatctttggtctcac

SEQ ID NO: 23981 - DNA, 899 bp, Zea Mays
gttccttcttcctcgcaaccaccctctccactcgcatgccgccaatcgtgttgagcccccacgacgcgcacaaggagccgcccagtccagtgcacgtcgagttcctctacggatcgagctctcctctaatggcgtcgttgctccgtcattggaactgctccctgggcgcggccgactttcttccccctgttagccgacccgctcccaaccccactttctgcgcgcgcccgagcccagttcggccgggacctcgctgtccgaatcgcggcaaggaggcctgcgcgcggctgagccctcctgtgcgcgcgagccctatagcttggctgaccggggcccccttgctgcgcgcgcgccctaccgagccgtggccatggcgtccagccaggaaccgcccctgcccatgcgttcctccggtgaagtgcccccttgccgacagccatgcttctcccccactcgccatggccacctgctactctgcgtcctaccgttctgtgcagcagggcagcaggagagtagaccctccccctgcagctgttggtcgtgctctctccgtgtaatcaaatcaaccatggatgacccctttctcctggtcgtgcttttggctgaagaaagaagagaaatgcccatagccacactgatcccatccttccgggatctgttgtggtcttgcttcttgtgaccctttgtgcggccacttcgtcaccagtgagatgcactacatcatcggcagagactcagaattacaggtgaaaatcaagacagacatatctacattcatgatctcgttagctttattttttcctgaaaaatatttcgcgtgcttcaacatcagttcagttattttccaatatatgggacagtaggatacatttgtttggatgcaacaattccaattaatg

SEQ ID NO: 23982 - DNA, 1110 bp, Zea Mays
gttccttcttcctcgcaaccaccctctccactcgcatgccgccaatcgtgttgagcccccacgacgcgcacaaggagccgcccagtccagtgcacgtcgagttcctctacggatcgagctctcctctaatggcgtcgttgctccgtcattggaactgctccctgggcgcggccgactttcttccccctgttagccgacccgctcccaaccccactttctgcgcgcgcccgagcccagttcggccgggacctcgctgtccgaatcgcggcaaggaggcctgcgcgcggctgagccctcctgtgcgcgcgagccctatagcttggctgaccggggcccccttgctgcgcgcgcgccctaccgagccgtggccatggcgtccagccaggaaccgcccctgcccatgcgttcctccggtgaagtgcccccttgccgacagccatgcttctcccccactcgccatggccacctgctactctgcgtcctaccgttctgtgcagcagggcagcaggagagtagaccctccccctgcagctgttggtcgtgctctctccgtgtaatcaaatcaaccatggatgacccctttctcctggtcgtgcttttggctgaagaaagaagagaaatgcccatagccacactgatcccatccttccgggatctgttgtggtcttgcttcttgtgaccctttgtgcggccacttcgtcaccagtgagatgcactacatcatcgatcgcgatctgtttccgagcttcgaggaatcgacggtcaggcttcaatgaccaagtgatcaagctcttcgagttctacgaggctgaagaccctgagcatctgattggtgaaggcaagtgtcctctgacctattatgtccaatttactttataattcatcaacccgcataccatgatcaacctaaggattgactagctttctatttaccttgtccttgattaccttttgggttactatggttagcttcatgctattgctttactttaatcaatgaacatgatgagatacaatgatgatactatgattttattctggacatgatgatatacttgtggcatttaggggactcgggctgtttcccgagtacctctccgtaaggacctg

SEQ ID NO: 23983 - DNA, 934 bp, Zea Mays
gttccttcttcctcgcaaccaccctctccactcgcatgccgccaatcgtgttgagcccccacgacgcgcacaaggagccgcccagtccagtgcacgtcgagttcctctacggatcgagctctcctctaatggcgtcgttgctccgtcattggaactgctccctgggcgcggccgactttcttccccctgttagccgacccgctcccaaccccactttctgcgcgcgcccgagcccagttcggccgggacctcgctgtccgaatcgcggcaaggaggcctgcgcgcggctgagccctcctgtgcgcgcgagccctatagcttggctgaccggggcccccttgctgcgcgcgcgccctaccgagccgtggccatggcgtccagccaggaaccgcccctgcccatgcgttcctccggtgaagtgcccccttgccgacagccatgcttctcccccactcgccatggccacctgctactctgcgtcctaccgttctgtgcagcagggcagcaggagagtagaccctccccctgcagctgttggtcgtgctctctccgtgtaatcaaatcaaccatggatgacccctttctcctggtcgtgcttttggctgaagaaagaagagaaatgcccatagccacactgatcccatccttccgggatctgttgtggtcttgcttcttgtgaccctttgtgcggccacttcgtcaccagtgagatgcactacatcatcggtaatctgcgattaagtaattattccatgccttttgctttaattactcgtttcaatctgttttaagtgcattggatttgcaacgacgttgtcctcgtgttactaatactatttcatcatttcacatgttttaggtattttattaaatatttatttaactaaggttttaatattgttttccccattgaagctgatttaccgtttttaac

SEQ ID NO: 23984 - DNA, 714 bp, Zea Mays
ctcgaagtgcaacggtttccgtaatcctcgaagcggagtccgcatatgccccccagccattagtagccatgggctatcctgcgcccaccagtaccacctgccctgcccctcccctcccctccccttcgtcctgcctgagctgcccggcgcctctgccctcctccgagctccataggccttgccaggcatggggttggccttgttgaaaccaccagatttgtgcctcataggccccagttcctcggcaacaagaaggctaccatggagaacttccacatgaagcaaatggcagccaccgatgcgaaacagttcaacgacaggccccagctcatggccaaatacttggaagctatgagttcaaagcagcaggtgacgaccggcgccgaccatcaagcccccatcagtagttctagcgccgaggagaaggcgatccacgagagcaatgagctgaggaagagaggcctttgcttggtccctatctctatgctgataaactatctcggatgactgtttcttttagtttcatgtatacaccagtatatttcaatgcaactgtatacaacttctatagttaacacaatacatcacgctcttctgtcagctcagagaacctactcctctcatccagctgttgagatgtatgatcatatctatcattcaaacagatacaaaaaaatccaactattggaaaacaacaacaacaacaaaacaaag

SEQ ID NO: 23985 - DNA, 2637 bp, Zea Mays
gttttatcaaaattttgcgctcgacgccactatgtctagtctttggaccattttgcaattcttcttggattttggggaggctgttttgcatgatgctgatggtagcttgaaaaccttcttccgctcttgcttaagtagggagtttgcagatcctattgttgcagagcgcacagttgaattccttgtaacaaacaagacaaagatccttagctcctttcccaatttgattccacaggtgccaacacttgaaatatttacttacttggaattgacaattcccacatgtagctcctattattcatgctgttgcagatcattgctttgaaaaactgaaagatataaatccagcttccttctttgttttatagcatatttgtcaattttttatgtgaatggtgggggaggcccctacatgtatttcttcactaacagaagcaaagaaatatttacaatacaggaggctgtaggccaaaaaggtagagaaaaaacagaaaaaaccatatttgtatgataagctactcaaccaatcttttgtaagattctttatagaatatctctcttctcttcctattttccatattcgacttaatcttgttaacacatgccaatgcttgtgtatccttgtttatacacagttctatccattgttgttaaagcttattgcatcaaacggtgagaggtatgtgctcgtattgtcatgaacttcacatagctctatcatccatgttccctttaaatgactcagtacaggtaccataaatatccaatagcaatcccgttgaactacctaatttgttttctaacattctagactggagaataagttttcggaagtacttccattaatgatgtcagcaggatcttttcttcccctcttcctatcccttatggatttgccaatgttggtggtggcactggaaaaggtggaaagaagttctggaactcttattggtagtagtatagctacaatccagaagagcgctgctcctgagatgcttcttgcactgatggacgaggcatatactggttctgccgtagaagaacctagtggtaattcaggttctgatgatagtggtcccctagaccttactgacccaatgttcttagaccttctaaaagatgagaatgatggcattgccgcaaaacattggatatcccctacgatatcttcaacgttacaagcagcatttaacagcccacagtcggacagattgaaacagtcactggaaatggcacctcgctttcttactttatattttgcaacagcattgcgagacgttaatgactcactgctgtgtgctcttattccagtagttatgtcaagatatgctgcaatgttcccagacaaagttttctctttcaaggtgagggaaaggctttcagacttcattttggctgcattccagcggtctcccaacatcattgcagtactgaagaaacctattactgacagacttggtgaggctcatgataatcttgccaagacagagttagcattgcacttgtgctgggccattggtgagcatggagctggaggggtgggtcacaaggatgtagctcgtgaactatttgaaaatttggagttattattgtatgaaaacctggcaactagccgtttgggattaagccaagagccaggatctgattccatgggtgcatcatctagaaagtcatcccaagccaggcttctctgctttgtggtgactgctattgcaaaattagcaacatgccacagtgagttgcttccgagggcacgcgtgtcattgggtaaggtcgctcgttcccgaacctcagacaggagggtctggcaacgggcctgtgactatttagggctcatgaatgaaccagccatctgtttatctgtactgggaccgtccaccgcccaaggaaatggtcctggtattgtgaattggagtgaaggaggaacaaagatggtagctcatgttcctttttaccttttagcccagcaaaaaggtccaccgtctcataatttttcatttgccgacctcctcccaacagaatgaagaaaatatctgcatgagtgcattggtgcaggcatgatttctctagcagaaggccatataacgattttgttttgaagatccaagttcctttttaaaaaaggggctggtctgaacattcaggcttatttctctagcataatactcataaagagtcctgtacttttaggtcttgttcggttattcctataatacatggattgatggaattaaaaaaaatttagaagaactttgacttgcttaggaattcaacacatctaatcccactcaatccatatggattgagagctaatcgaacaagtcttacatggttgactatgcactcgagttatggaatgtatggtattacatttctaagtggtggatcgtagtgtaaaaaatgtacacgtctgaatttgttcgaaatgacaagtatctgttttgtttgaaatgacacgtctgaacttggcatagaagtgcatgaaaaatagaaggtcgaaaggttacattctttcgaaaacagcaggaatattaggccatggctctataagtaaactaactgagaatttaaaagctgcaaaatagcagtgaagacactcagcaataacgcaagtatgcaagcacaaggcaataactg

SEQ ID NO: 23986 - DNA, 2925 bp, Zea Mays
catgcgaatactgctggagttggcctaacccaacgaccagacgcaacacgacggcgacggccatggcttcgccggacctcgccgccggcgacggcagctacgactttcaccttcgctctctctccgcggcctcacgggactccgctgcggcctccgaccccgcctctgaccccaacctcctccaatctgttaggagggtgtgcgagatgtgccgaacggcgaaggaagcgaaggacgagatggtggcgcgggcgttccccgtgatgggcaagctatttcagcgatgcgccgccgctcccacgcaggccgttgcctccaccggcgtgctgctcctcaccattttgcaattcttcttggattttggggaggctgttttgcatgatgctgatggtagcttgaaaaccttcttccgctcttgcttaagtagggagtttgcagatcctattgttgcagagcgcacagttgaattccttgtaacaaacaagacaaagatccttagctcctttcccaatttgattccacaggtgccaacacttgaaatatttacttacttggaattgacaattcccacatgtagctcctattattcatgctgttgcagatcattgctttgaaaaactgaaagatataaatccagcttccttctttgttttatagcatatttgtcaattttttatgtgaatggtgggggaggcccctacatgtatttcttcactaacagaagcaaagaaatatttacaatacaggaggctgtaggccaaaaaggtagagaaaaaacagaaaaaaccatatttgtatgataagctactcaaccaatcttttgtaagattctttatagaatatctctcttctcttcctattttccatattcgacttaatcttgttaacacatgccaatgcttgtgtatccttgtttatacacagttctatccattgttgttaaagcttattgcatcaaacggtgagaggtatgtgctcgtattgtcatgaacttcacatagctctatcatccatgttccctttaaatgactcagtacaggtaccataaatatccaatagcaatcccgttgaactacctaatttgttttctaacattctagactggagaataagttttcggaagtacttccattaatgatgtcagcaggatcttttcttcccctcttcctatcccttatggatttgccaatgttggtggtggcactggaaaaggtggaaagaagttctggaactcttattggtagtagtatagctacaatccagaagagcgctgctcctgagatgcttcttgcactgatggacgaggcatatactggttctgccgtagaagaacctagtggtaattcaggttctgatgatagtggtcccctagaccttactgacccaatgttcttagaccttctaaaagatgagaatgatggcattgccgcaaaacattggatatcccctacgatatcttcaacgttacaagcagcatttaacagcccacagtcggacagattgaaacagtcactggaaatggcacctcgctttcttactttatattttgcaacagcattgcgagacgttaatgactcactgctgtgtgctcttattccagtagttatgtcaagatatgctgcaatgttcccagacaaagttttctctttcaaggtgagggaaaggctttcagacttcattttggctgcattccagcggtctcccaacatcattgcagtactgaagattatctttctcactgtaactgaaatttactgatggactgtggccagtgcagacagagttagcattgcacttgtgctgggccattggtgagcatggagctggaggggtgggtcacaaggatgtagctcgtgaactatttgaaaatttggagttattattgtatgaaaacctggcaactagccgtttgggattaagccaagagccaggatctgattccatgggtgcatcatctagaaagtcatcccaagccaggcttctctgctttgtggtgactgctattgcaaaattagcaacatgccacagtgagttgcttccgagggcacgcgtgtcattgggtcgctcgttcccgaacctcagacaggagggtctggcaacgggcctgtgactatttagggctcatgaatgaaccagccatctgtttatctgtactgggaccgtccaccgcccaaggaaatggtcctggtattgtgaattggagtgaaggaggaacaaagatggtagctcatgttcctttttaccttttagcccagcaaaaaggtccaccgtctcataatttttcatttgccgacctcctcccaacagaatgaagaaaatatctgcatgagtgcattggtgcaggcatgatttctctagcagaaggccatataacgattttgttttgaagatccaagttcctttttaaaaaaggggctggtctgaacattcaggcttatttctctagcataatactcataaagagtcctgtacttttaggtcttgttcggttattcctataatacatggattgatggaattaaaaaaaatttagaagaactttgacttgcttaggaattcaacacatctaatcccactcaatccatatggattgagagctaatcgaacaagtcttacatggttgactatgcactcgagttatggaatgtatggtattacatttctaagtggtggatcgtagtgtaaaaaatgtacacgtctgaatttgttcgaaatgacaagtatctgttttgtttgaaatgacacgtctgaacttggcatagaagtgcatgaaaaatagaaggtcgaaaggttacattctttcgaaaacagcaggaatattaggccatggctctataagtaaactaactgagaatttaaaagctgcaaaatagcagtgaagacactcagcaataacgcaagtatgcaagcacaaggcaataactg

SEQ ID NO: 23987 - DNA, 2089 bp, Zea Mays
catgcgaatactgctggagttggcctaacccaacgaccagacgcaacacgacggcgacggccatggcttcgccggacctcgccgccggcgacggcagctacgactttcaccttcgctctctctccgcggcctcacgggactccgctgcggcctccgaccccgcctctgaccccaacctcctccaatctgttaggagggtgtgcgagatgtgccgaacggcgaaggaagcgaaggacgagatggtggcgcgggcgttccccgtgatgggcaagctatttcagcgatgcgccgccgctcccacgcaggccgttgcctccaccggcgtgctgctcctctgttggtggtggcactggaaaaggtggaaagaagttctggaactcttattggtagtagtatagctacaatccagaagagcgctgctcctgagatgcttcttgcactgatggacgaggcatatactggttctgccgtagaagaacctagtggtaattcaggttctgatgatagtggtcccctagaccttactgacccaatgttcttagaccttctaaaagatgagaatgatggcattgccgcaaaacattggatatcccctacgatatcttcaacgttacaagcagcatttaacagcccacagtcggacagattgaaacagtcactggaaatggcacctcgctttcttactttatattttgcaacagcattgcgagacgttaatgactcactgctgtgtgctcttattccagtagttatgtcaagatatgctgcaatgttcccagacaaagttttctctttcaaggtgagggaaaggctttcagacttcattttggctgcattccagcggtctcccaacatcattgcagtactgaagaaacctattactgacagacttggtgaggctcatgataatcttgccaaggcaagtatatctttcaatgcagacagagttagcattgcacttgtgctgggccattggtgagcatggagctggaggggtgggtcacaaggatgtagctcgtgaactatttgaaaatttggagttattattgtatgaaaacctggcaactagccgtttgggattaagccaagagccaggatctgattccatgggtgcatcatctagaaagtcatcccaagccaggcttctctgctttgtggtgactgctattgcaaaattagcaacatgccacagtgagttgcttccgagggcacgcgtgtcattgggtcgctcgttcccgaacctcagacaggagggtctggcaacgggcctgtgactatttagggctcatgaatgaaccagccatctgtttatctgtactgggaccgtccaccgcccaaggaaatggtcctggtattgtgaattggagtgaaggaggaacaaagatggtagctcatgttcctttttaccttttagcccagcaaaaaggtccaccgtctcataatttttcatttgccgacctcctcccaacagaatgaagaaaatatctgcatgagtgcattggtgcaggcatgatttctctagcagaaggccatataacgattttgttttgaagatccaagttcctttttaaaaaaggggctggtctgaacattcaggcttatttctctagcataatactcataaagagtcctgtacttttaggtcttgttcggttattcctataatacatggattgatggaattaaaaaaaatttagaagaactttgacttgcttaggaattcaacacatctaatcccactcaatccatatggattgagagctaatcgaacaagtcttacatggttgactatgcactcgagttatggaatgtatggtattacatttctaagtggtggatcgtagtgtaaaaaatgtacacgtctgaatttgttcgaaatgacaagtatctgttttgtttgaaatgacacgtctgaacttggcatagaagtgcatgaaaaatagaaggtcgaaaggttacattctttcgaaaacagcaggaatattaggccatggctctataagtaaactaactgagaatttaaaagctgcaaaatagcagtgaagacactcagcaataacgcaagtatgcaagcacaaggcaataactg

SEQ ID NO: 23988 - DNA, 3010 bp, Zea Mays
catgcgaatactgctggagttggcctaacccaacgaccagacgcaacacgacggcgacggccatggcttcgccggacctcgccgccggcgacggcagctacgactttcaccttcgctctctctccgcggcctcacgggactccgctgcggcctccgaccccgcctctgaccccaacctcctccaatctgttaggagggtgtgcgagatgtgccgaacggcgaaggaagcgaaggacgagatggtggcgcgggcgttccccgtgatgggcaagctatttcagcgatgcgccgccgctcccacgcaggccgttgcctccaccggcgtgctgctcctcaccattttgcaattcttcttggattttggggaggctgttttgcatgatgctgatggtagcttgaaaaccttcttccgctcttgcttaaggagtttgcagatcctattgttgcagagcgcacagttgaattccttgtaacaaacaagacaaagatccttagctcctttcccaatttgattccacaggtgccaacacttgaaatatttacttacttggaattgacaattcccacatgtagctcctattattcatgctgttgcagatcattgctttgaaaaactgaaagatataaatccagcttccttctttgttttatagcatatttgtcaattttttatgtgaatggtgggggaggcccctacatgtatttcttcactaacagaagcaaagaaatatttacaatacaggaggctgtaggccaaaaaggtagagaaaaaacagaaaaaaccatatttgtatgataagctactcaaccaatcttttgtaagattctttatagaatatctctcttctcttcctattttccatattcgacttaatcttgttaacacatgccaatgcttgtgtatccttgtttatacacagttctatccattgttgttaaagcttattgcatcaaacggtgagaggtatgtgctcgtattgtcatgaacttcacatagctctatcatccatgttccctttaaatgactcagtacaggtaccataaatatccaatagcaatcccgttgaactacctaatttgttttctaacattctagactggagaataagttttcggaagtacttccattaatgatgtcagcaggatcttttcttcccctcttcctatcccttatggatttgccaatgttggtggtggcactggaaaaggtggaaagaagttctggaactcttattggtagtagtatagctacaatccagaagagcgctgctcctgagatgcttcttgcactgatggacgaggcatatactggttctgccgtagaagaacctagtggtaattcaggttctgatgatagtggtcccctagaccttactgacccaatgttcttagaccttctaaaagatgagaatgatggcattgccgtaagtagtttttcctatacgatggtctatatcccctctgaactcttagttctagtgatatcttcttctgtttcccccttcaggcaaaacattggatatcccctacgatatcttcaacgttacaagcagcatttaacagcccacagtcggacagattgaaacagtcactggaaatggcacctcgctttcttactttatattttgcaacagcattgcgagacgttaatgactcactgctgtgtgctcttattccagtagttatgtcaagatatgctgcaatgttcccagacaaagttttctctttcaaggtgagggaaaggctttcagacttcattttggctgcattccagcggtctcccaacatcattgcagtactgaagaaacctattactgacagacttggtgaggctcatgataatcttgccaagtgcagacagagttagcattgcacttgtgctgggccattggtgagcatggagctggaggggtgggtcacaaggatgtagctcgtgaactatttgaaaatttggagttattattgtatgaaaacctggcaactagccgtttgggattaagccaagagccaggatctgattccatgggtgcatcatctagaaagtcatcccaagccaggcttctctgctttgtggtgactgctattgcaaaattagcaacatgccacagtgagttgcttccgagggcacgcgtgtcattgggtaaggtcgctcgttcccgaacctcagacaggagggtctggcaacgggcctgtgactatttagggctcatgaatgaaccagccatctgtttatctgtactgggaccgtccaccgcccaaggaaatggtcctggtattgtgaattggagtgaaggaggaacaaagatggtagctcatgttcctttttaccttttagcccagcaaaaaggtccaccgtctcataatttttcatttgccgacctcctcccaacagaatgaagaaaatatctgcatgagtgcattggtgcaggcatgatttctctagcagaaggccatataacgattttgttttgaagatccaagttcctttttaaaaaaggggctggtctgaacattcaggcttatttctctagcataatactcataaagagtcctgtacttttaggtcttgttcggttattcctataatacatggattgatggaattaaaaaaaatttagaagaactttgacttgcttaggaattcaacacatctaatcccactcaatccatatggattgagagctaatcgaacaagtcttacatggttgactatgcactcgagttatggaatgtatggtattacatttctaagtggtggatcgtagtgtaaaaaatgtacacgtctgaatttgttcgaaatgacaagtatctgttttgtttgaaatgacacgtctgaacttggcatagaagtgcatgaaaaatagaaggtcgaaaggttacattctttcgaaaacagcaggaatattaggccatggctctataagtaaactaactgagaatttaaaagctgcaaaatagcagtgaagacactcagcaataacgcaagtatgcaagcacaaggcaataactg

SEQ ID NO: 23989 - DNA, 2512 bp, Zea Mays
catgcgaatactgctggagttggcctaacccaacgaccagacgcaacacgacggcgacggccatggcttcgccggacctcgccgccggcgacggcagctacgactttcaccttcgctctctctccgcggcctcacgggactccgctgcggcctccgaccccgcctctgaccccaacctcctccaatctgagggtgtgcgagatgtgccgaacggcgaaggaagcgaaggacgagatggtggcgcgggcgttccccgtgatgggcaagctatttcagcgatgcgccgccgctcccacgcaggccgttgcctccaccggcgtgctgctcctcaccattttgcaattcttcttggattttggggaggctgttttgcatgatgctgatggtagcttgaaaaccttcttccgctcttgcttaaggagtttgcagatcctattgttgcagagcgcacagttgaattccttgtaacaaacaagacaaagatccttagctcctttcccaatttgattccacagttctatccattgttgttaaagcttattgcatcaaacggtgagaggtatgtgctcgtattgtcatgaacttcacatagctctatcatccatgttccctttaaatgactcagtacaggtaccataaatatccaatagcaatcccgttgaactacctaatttgttttctaacattctagactggagaataagttttcggaagtacttccattaatgatgtcagcaggatcttttcttcccctcttcctatcccttatggatttgccaatgttggtggtggcactggaaaaggtggaaagaagttctggaactcttattggtagtagtatagctacaatccagaagagcgctgctcctgagatgcttcttgcactgatggacgaggcatatactggttctgccgtagaagaacctagtggtaattcaggttctgatgatagtggtcccctagaccttactgacccaatgttcttagaccttctaaaagatgagaatgatggcattgccgcaaaacattggatatcccctacgatatcttcaacgttacaagcagcatttaacagcccacagtcggacagattgaaacagtcactggaaatggcacctcgctttcttactttatattttgcaacagcattgcgagacgttaatgactcactgctgtgtgctcttattccagtagttatgtcaagatatgctgcaatgttcccagacaaagttttctctttcaaggtgagggaaaggctttcagacttcattttggctgcattccagcggtctcccaacatcattgcagtactgaagaaacctattactgacagacttggtgaggctcatgataatcttgccaagacagagttagcattgcacttgtgctgggccattggtgagcatggagctggaggggtgggtcacaaggatgtagctcgtgaactatttgaaaatttggagttattattgtatgaaaacctggcaactagccgtttgggattaagccaagagccaggatctgattccatgggtgcatcatctagaaagtcatcccaagccaggcttctctgctttgtggtgactgctattgcaaaattagcaacatgccacagtgagttgcttccgagggcacgcgtgtcattgggtcgctcgttcccgaacctcagacaggagggtctggcaacgggcctgtgactatttagggctcatgaatgaaccagccatctgtttatctgtactgggaccgtccaccgcccaaggaaatggtcctggtattgtgaattggagtgaaggaggaacaaagatggtagctcatgttcctttttaccttttagcccagcaaaaaggtccaccgtctcataatttttcatttgccgacctcctcccaacagaatgaagaaaatatctgcatgagtgcattggtgcaggcatgatttctctagcagaaggccatataacgattttgttttgaagatccaagttcctttttaaaaaaggggctggtctgaacattcaggcttatttctctagcataatactcataaagagtcctgtacttttaggtcttgttcggttattcctataatacatggattgatggaattaaaaaaaatttagaagaactttgacttgcttaggaattcaacacatctaatcccactcaatccatatggattgagagctaatcgaacaagtcttacatggttgactatgcactcgagttatggaatgtatggtattacatttctaagtggtggatcgtagtgtaaaaaatgtacacgtctgaatttgttcgaaatgacaagtatctgttttgtttgaaatgacacgtctgaacttggcatagaagtgcatgaaaaatagaaggtcgaaaggttacattctttcgaaaacagcaggaatattaggccatggctctataagtaaactaactgagaatttaaaagctgcaaaatagcagtgaagacactcagcaataacgcaagtatgcaagcacaaggcaataactg

SEQ ID NO: 23990 - DNA, 2501 bp, Zea Mays
catgcgaatactgctggagttggcctaacccaacgaccagacgcaacacgacggcgacggccatggcttcgccggacctcgccgccggcgacggcagctacgactttcaccttcgctctctctccgcggcctcacgggactccgctgcggcctccgaccccgcctctgaccccaacctcctccaatctgttaggagggtgtgcgagatgtgccgaacggcgaaggaagcgaaggacgagatggtggcgcgggcgttccccgtgatgggcaagctatttcagcgatgcgccgccgctcccacgcaggccgttgcctccaccggcgtgctgctcctcaccattttgcaattcttcttggattttggggaggctgttttgcatgatgctgatggtagcttgaaaaccttcttccgctcttgcttaagtagggagtttgcagatcctattgttgcagagcgcacagttgaattccttgtaacaaacaagacaaagatccttagctcctttcccaatttgattccacagttctatccattgttgttaaagcttattgcatcaaacggtgagagactggagaataagttttcggaagtacttccattaatgatgtcagcaggatcttttcttcccctcttcctatcccttatggatttgccaatgttggtggtggcactggaaaaggtggaaagaagttctggaactcttattggtagtagtatagctacaatccagaagagcgctgctcctgagatgcttcttgcactgatggacgaggcatatactggttctgccgtagaagaacctagtggtaattcaggttctgatgatagtggtcccctagaccttactgacccaatgttcttagaccttctaaaagatgagaatgatggcattgccgcaaaacattggatatcccctacgatatcttcaacgttacaagcagcatttaacagcccacagtcggacagattgaaacagtcactggaaatggcacctcgctttcttactttatattttgcaacagcattgcgagacgttaatgactgtaggttgcatacttttttttgcatgcttttttttgctacacatgttaagtgaccaacatattgttgatttgacaatctaagtttcttggttcagcactgctgtgtgctcttattccagtagttatgtcaagatatgctgcaatgttcccagacaaagttttctctttcaaggtgagggaaaggctttcagacttcattttggctgcattccagcggtctcccaacatcattgcagtactgaagaaacctattactgacagacttggtgaggctcatgataatcttgccaaggcaagtatatctttcaaacagagttagcattgcacttgtgctgggccattggtgagcatggagctggaggggtgggtcacaaggatgtagctcgtgaactatttgaaaatttggagttattattgtatgaaaacctggcaactagccgtttgggattaagccaagagccaggatctgattccatgggtgcatcatctagaaagtcatcccaagccaggcttctctgctttgtggtgactgctattgcaaaattagcaacatgccacagtgagttgcttccgagggcacgcgtgtcattgggtcgctcgttcccgaacctcagacaggagggtctggcaacgggcctgtgactatttagggctcatgaatgaaccagccatctgtttatctgtactgggaccgtccaccgcccaaggaaatggtcctggtattgtgaattggagtgaaggaggaacaaagatggtagctcatgttcctttttaccttttagcccagcaaaaaggtccaccgtctcataatttttcatttgccgacctcctcccaacagaatgaagaaaatatctgcatgagtgcattggtgcaggcatgatttctctagcagaaggccatataacgattttgttttgaagatccaagttcctttttaaaaaaggggctggtctgaacattcaggcttatttctctagcataatactcataaagagtcctgtacttttaggtcttgttcggttattcctataatacatggattgatggaattaaaaaaaatttagaagaactttgacttgcttaggaattcaacacatctaatcccactcaatccatatggattgagagctaatcgaacaagtcttacatggttgactatgcactcgagttatggaatgtatggtattacatttctaagtggtggatcgtagtgtaaaaaatgtacacgtctgaatttgttcgaaatgacaagtatctgttttgtttgaaatgacacgtctgaacttggcatagaagtgcatgaaaaatagaaggtcgaaaggttacattctttcgaaaacagcaggaatattaggccatggctctataagtaaactaactgagaatttaaaagctgcaaaatagcagtgaagacactcagcaataacgcaagtatgcaagcacaaggcaataactg

SEQ ID NO: 23991 - DNA, 2790 bp, Zea Mays
catgcgaatactgctggagttggcctaacccaacgaccagacgcaacacgacggcgacggccatggcttcgccggacctcgccgccggcgacggcagctacgactttcaccttcgctctctctccgcggcctcacgggactccgctgcggcctccgaccccgcctctgaccccaacctcctccaatctgttaggagggtgtgcgagatgtgccgaacggcgaaggaagcgaaggacgagatggtggcgcgggcgttccccgtgatgggcaagctatttcagcgatgcgccgccgctcccacgcaggccgttgcctccaccggcgtgctgctcctcaccattttgcaattcttcttggattttggggaggctgttttgcatgatgctgatggtagcttgaaaaccttcttccgctcttgcttaaggagtttgcagatcctattgttgcagagcgcacagttgaattccttgtaacaaacaagacaaagatccttagctcctttcccaatttgattccacaggtgccaacacttgaaatatttacttacttggaattgacaattcccacatgtagctcctattattcatgctgttgcagatcattgctttgaaaaactgaaagatataaatccagcttccttctttgttttatagcatatttgtcaattttttatgtgaatggtgggggaggcccctacatgtatttcttcactaacagaagcaaagaaatatttacaatacaggaggctgtaggccaaaaaggtagagaaaaaacagaaaaaaccatatttgtatgataagctactcaaccaatcttttgtaagattctttatagaatatctctcttctcttcctattttccatattcgacttaatcttgttaacacatgccaatgcttgtgtatccttgtttatacacagttctatccattgttgttaaagcttattgcatcaaacggtgagagactggagaataagttttcggaagtacttccattaatgatgtcagcaggatcttttcttcccctcttcctatcccttatggatttgccaatgttggtggtggcactggaaaaggtggaaagaagttctggaactcttattggtagtagtatagctacaatccagaagagcgctgctcctgagatgcttcttgcactgatggacgaggcatatactggttctgccgtagaagaacctagtggtaattcaggttctgatgatagtggtcccctagaccttactgacccaatgttcttagaccttctaaaagatgagaatgatggcattgccgcaaaacattggatatcccctacgatatcttcaacgttacaagcagcatttaacagcccacagtcggacagattgaaacagtcactggaaatggcacctcgctttcttactttatattttgcaacagcattgcgagacgttaatgactcactgctgtgtgctcttattccagtagttatgtcaagatatgctgcaatgttcccagacaaagttttctctttcaaggtgagggaaaggctttcagacttcattttggctgcattccagcggtctcccaacatcattgcagtactgaagaaacctattactgacagacttggtgaggctcatgataatcttgccaagacagagttagcattgcacttgtgctgggccattggtgagcatggagctggaggggtgggtcacaaggatgtagctcgtgaactatttgaaaatttggagttattattgtatgaaaacctggcaactagccgtttgggattaagccaagagccaggatctgattccatgggtgcatcatctagaaagtcatcccaagccaggcttctctgctttgtggtgactgctattgcaaaattagcaacatgccacagtgagttgcttccgagggcacgcgtgtcattgggtaaggtcgctcgttcccgaacctcagacaggagggtctggcaacgggcctgtgactatttagggctcatgaatgaaccagccatctgtttatctgtactgggaccgtccaccgcccaaggaaatggtcctggtattgtgaattggagtgaaggaggaacaaagatggtagctcatgttcctttttaccttttagcccagcaaaaaggtccaccgtctcataatttttcatttgccgacctcctcccaacagaatgaagaaaatatctgcatgagtgcattggtgcaggcatgatttctctagcagaaggccatataacgattttgttttgaagatccaagttcctttttaaaaaaggggctggtctgaacattcaggcttatttctctagcataatactcataaagagtcctgtacttttaggtcttgttcggttattcctataatacatggattgatggaattaaaaaaaatttagaagaactttgacttgcttaggaattcaacacatctaatcccactcaatccatatggattgagagctaatcgaacaagtcttacatggttgactatgcactcgagttatggaatgtatggtattacatttctaagtggtggatcgtagtgtaaaaaatgtacacgtctgaatttgttcgaaatgacaagtatctgttttgtttgaaatgacacgtctgaacttggcatagaagtgcatgaaaaatagaaggtcgaaaggttacattctttcgaaaacagcaggaatattaggccatggctctataagtaaactaactgagaatttaaaagctgcaaaatagcagtgaagacactcagcaataacgcaagtatgcaagcacaaggcaataactg

SEQ ID NO: 23992 - DNA, 2793 bp, Zea Mays
catgcgaatactgctggagttggcctaacccaacgaccagacgcaacacgacggcgacggccatggcttcgccggacctcgccgccggcgacggcagctacgactttcaccttcgctctctctccgcggcctcacgggactccgctgcggcctccgaccccgcctctgaccccaacctcctccaatctgttaggagggtgtgcgagatgtgccgaacggcgaaggaagcgaaggacgagatggtggcgcgggcgttccccgtgatgggcaagctatttcagcgatgcgccgccgctcccacgcaggccgttgcctccaccggcgtgctgctcctcaccattttgcaattcttcttggattttggggaggctgttttgcatgatgctgatggtagcttgaaaaccttcttccgctcttgcttaagtagggagtttgcagatcctattgttgcagagcgcacagttgaattccttgtaacaaacaagacaaagatccttagctcctttcccaatttgattccacaggtgccaacacttgaaatatttacttacttggaattgacaattcccacatgtagctcctattattcatgctgttgcagatcattgctttgaaaaactgaaagatataaatccagcttccttctttgttttatagcatatttgtcaattttttatgtgaatggtgggggaggcccctacatgtatttcttcactaacagaagcaaagaaatatttacaatacaggaggctgtaggccaaaaaggtagagaaaaaacagaaaaaaccatatttgtatgataagctactcaaccaatcttttgtaagattctttatagaatatctctcttctcttcctattttccatattcgacttaatcttgttaacacatgccaatgcttgtgtatccttgtttatacacagttctatccattgttgttaaagcttattgcatcaaacggtgagagactggagaataagttttcggaagtacttccattaatgatgtcagcaggatcttttcttcccctcttcctatcccttatggatttgccaatgttggtggtggcactggaaaaggtggaaagaagttctggaactcttattggtagtagtatagctacaatccagaagagcgctgctcctgagatgcttcttgcactgatggacgaggcatatactggttctgccgtagaagaacctagtggtaattcaggttctgatgatagtggtcccctagaccttactgacccaatgttcttagaccttctaaaagatgagaatgatggcattgccgcaaaacattggatatcccctacgatatcttcaacgttacaagcagcatttaacagcccacagtcggacagattgaaacagtcactggaaatggcacctcgctttcttactttatattttgcaacagcattgcgagacgttaatgactgtagcactgctgtgtgctcttattccagtagttatgtcaagatatgctgcaatgttcccagacaaagttttctctttcaaggtgagggaaaggctttcagacttcattttggctgcattccagcggtctcccaacatcattgcagtactgaagaaacctattactgacagacttggtgaggctcatgataatcttgccaagacagagttagcattgcacttgtgctgggccattggtgagcatggagctggaggggtgggtcacaaggatgtagctcgtgaactatttgaaaatttggagttattattgtatgaaaacctggcaactagccgtttgggattaagccaagagccaggatctgattccatgggtgcatcatctagaaagtcatcccaagccaggcttctctgctttgtggtgactgctattgcaaaattagcaacatgccacagtgagttgcttccgagggcacgcgtgtcattgggtcgctcgttcccgaacctcagacaggagggtctggcaacgggcctgtgactatttagggctcatgaatgaaccagccatctgtttatctgtactgggaccgtccaccgcccaaggaaatggtcctggtattgtgaattggagtgaaggaggaacaaagatggtagctcatgttcctttttaccttttagcccagcaaaaaggtccaccgtctcataatttttcatttgccgacctcctcccaacagaatgaagaaaatatctgcatgagtgcattggtgcaggcatgatttctctagcagaaggccatataacgattttgttttgaagatccaagttcctttttaaaaaaggggctggtctgaacattcaggcttatttctctagcataatactcataaagagtcctgtacttttaggtcttgttcggttattcctataatacatggattgatggaattaaaaaaaatttagaagaactttgacttgcttaggaattcaacacatctaatcccactcaatccatatggattgagagctaatcgaacaagtcttacatggttgactatgcactcgagttatggaatgtatggtattacatttctaagtggtggatcgtagtgtaaaaaatgtacacgtctgaatttgttcgaaatgacaagtatctgttttgtttgaaatgacacgtctgaacttggcatagaagtgcatgaaaaatagaaggtcgaaaggttacattctttcgaaaacagcaggaatattaggccatggctctataagtaaactaactgagaatttaaaagctgcaaaatagcagtgaagacactcagcaataacgcaagtatgcaagcacaaggcaataactg

SEQ ID NO: 23993 - DNA, 2922 bp, Zea Mays
catgcgaatactgctggagttggcctaacccaacgaccagacgcaacacgacggcgacggccatggcttcgccggacctcgccgccggcgacggcagctacgactttcaccttcgctctctctccgcggcctcacgggactccgctgcggcctccgaccccgcctctgaccccaacctcctccaatctgttaggagggtgtgcgagatgtgccgaacggcgaaggaagcgaaggacgagatggtggcgcgggcgttccccgtgatgggcaagctatttcagcgatgcgccgccgctcccacgcaggccgttgcctccaccggcgtgctgctcctcaccattttgcaattcttcttggattttggggaggctgttttgcatgatgctgatggtagcttgaaaaccttcttccgctcttgcttaaggagtttgcagatcctattgttgcagagcgcacagttgaattccttgtaacaaacaagacaaagatccttagctcctttcccaatttgattccacaggtgccaacacttgaaatatttacttacttggaattgacaattcccacatgtagctcctattattcatgctgttgcagatcattgctttgaaaaactgaaagatataaatccagcttccttctttgttttatagcatatttgtcaattttttatgtgaatggtgggggaggcccctacatgtatttcttcactaacagaagcaaagaaatatttacaatacaggaggctgtaggccaaaaaggtagagaaaaaacagaaaaaaccatatttgtatgataagctactcaaccaatcttttgtaagattctttatagaatatctctcttctcttcctattttccatattcgacttaatcttgttaacacatgccaatgcttgtgtatccttgtttatacacagttctatccattgttgttaaagcttattgcatcaaacggtgagaggtatgtgctcgtattgtcatgaacttcacatagctctatcatccatgttccctttaaatgactcagtacaggtaccataaatatccaatagcaatcccgttgaactacctaatttgttttctaacattctagactggagaataagttttcggaagtacttccattaatgatgtcagcaggatcttttcttcccctcttcctatcccttatggatttgccaatgttggtggtggcactggaaaaggtggaaagaagttctggaactcttattggtagtagtatagctacaatccagaagagcgctgctcctgagatgcttcttgcactgatggacgaggcatatactggttctgccgtagaagaacctagtggtaattcaggttctgatgatagtggtcccctagaccttactgacccaatgttcttagaccttctaaaagatgagaatgatggcattgccgcaaaacattggatatcccctacgatatcttcaacgttacaagcagcatttaacagcccacagtcggacagattgaaacagtcactggaaatggcacctcgctttcttactttatattttgcaacagcattgcgagacgttaatgactcactgctgtgtgctcttattccagtagttatgtcaagatatgctgcaatgttcccagacaaagttttctctttcaaggtgagggaaaggctttcagacttcattttggctgcattccagcggtctcccaacatcattgcagtactgaagaaacctattactgacagacttggtgaggctcatgataatcttgccaagtgcagacagagttagcattgcacttgtgctgggccattggtgagcatggagctggaggggtgggtcacaaggatgtagctcgtgaactatttgaaaatttggagttattattgtatgaaaacctggcaactagccgtttgggattaagccaagagccaggatctgattccatgggtgcatcatctagaaagtcatcccaagccaggcttctctgctttgtggtgactgctattgcaaaattagcaacatgccacagtgagttgcttccgagggcacgcgtgtcattgggtcgctcgttcccgaacctcagacaggagggtctggcaacgggcctgtgactatttagggctcatgaatgaaccagccatctgtttatctgtactgggaccgtccaccgcccaaggaaatggtcctggtattgtgaattggagtgaaggaggaacaaagatggtagctcatgttcctttttaccttttagcccagcaaaaaggtccaccgtctcataatttttcatttgccgacctcctcccaacagaatgaagaaaatatctgcatgagtgcattggtgcaggcatgatttctctagcagaaggccatataacgattttgttttgaagatccaagttcctttttaaaaaaggggctggtctgaacattcaggcttatttctctagcataatactcataaagagtcctgtacttttaggtcttgttcggttattcctataatacatggattgatggaattaaaaaaaatttagaagaactttgacttgcttaggaattcaacacatctaatcccactcaatccatatggattgagagctaatcgaacaagtcttacatggttgactatgcactcgagttatggaatgtatggtattacatttctaagtggtggatcgtagtgtaaaaaatgtacacgtctgaatttgttcgaaatgacaagtatctgttttgtttgaaatgacacgtctgaacttggcatagaagtgcatgaaaaatagaaggtcgaaaggttacattctttcgaaaacagcaggaatattaggccatggctctataagtaaactaactgagaatttaaaagctgcaaaatagcagtgaagacactcagcaataacgcaagtatgcaagcacaaggcaataactg

SEQ ID NO: 23994 - DNA, 2939 bp, Zea Mays
catgcgaatactgctggagttggcctaacccaacgaccagacgcaacacgacggcgacggccatggcttcgccggacctcgccgccggcgacggcagctacgactttcaccttcgctctctctccgcggcctcacgggactccgctgcggcctccgaccccgcctctgaccccaacctcctccaatctgttaggagggtgtgcgagatgtgccgaacggcgaaggaagcgaaggacgagatggtggcgcgggcgttccccgtgatgggcaagctatttcagcgatgcgccgccgctcccacgcaggccgttgcctccaccggcgtgctgctcctcaccattttgcaattcttcttggattttggggaggctgttttgcatgatgctgatggtagcttgaaaaccttcttccgctcttgcttaaggagtttgcagatcctattgttgcagagcgcacagttgaattccttgtaacaaacaagacaaagatccttagctcctttcccaatttgattccacaggtgccaacacttgaaatatttacttacttggaattgacaattcccacatgtagctcctattattcatgctgttgcagatcattgctttgaaaaactgaaagatataaatccagcttccttctttgttttatagcatatttgtcaattttttatgtgaatggtgggggaggcccctacatgtatttcttcactaacagaagcaaagaaatatttacaatacaggaggctgtaggccaaaaaggtagagaaaaaacagaaaaaaccatatttgtatgataagctactcaaccaatcttttgtaagattctttatagaatatctctcttctcttcctattttccatattcgacttaatcttgttaacacatgccaatgcttgtgtatccttgtttatacacagttctatccattgttgttaaagcttattgcatcaaacggtgagaggtatgtgctcgtattgtcatgaacttcacatagctctatcatccatgttccctttaaatgactcagtacaggtaccataaatatccaatagcaatcccgttgaactacctaatttgttttctaacattctagactggagaataagttttcggaagtacttccattaatgatgtcagcaggatcttttcttcccctcttcctatcccttatggatttgccaatgttggtggtggcactggaaaaggtggaaagaagttctggaactcttattggtagtagtatagctacaatccagaagagcgctgctcctgagatgcttcttgcactgatggacgaggcatatactggttctgccgtagaagaacctagtggtaattcaggttctgatgatagtggtcccctagaccttactgacccaatgttcttagaccttctaaaagatgagaatgatggcattgccgcaaaacattggatatcccctacgatatcttcaacgttacaagcagcatttaacagcccacagtcggacagattgaaacagtcactggaaatggcacctcgctttcttactttatattttgcaacagcattgcgagacgttaatgactcactgctgtgtgctcttattccagtagttatgtcaagatatgctgcaatgttcccagacaaagttttctctttcaaggtgagggaaaggctttcagacttcattttggctgcattccagcggtctcccaacatcattgcagtactgaagaaacctattactgacagacttggtgaggctcatgataatcttgccaaggcaagtatatctttcaaacagagttagcattgcacttgtgctgggccattggtgagcatggagctggaggggtgggtcacaaggatgtagctcgtgaactatttgaaaatttggagttattattgtatgaaaacctggcaactagccgtttgggattaagccaagagccaggatctgattccatgggtgcatcatctagaaagtcatcccaagccaggcttctctgctttgtggtgactgctattgcaaaattagcaacatgccacagtgagttgcttccgagggcacgcgtgtcattgggtaaggtcgctcgttcccgaacctcagacaggagggtctggcaacgggcctgtgactatttagggctcatgaatgaaccagccatctgtttatctgtactgggaccgtccaccgcccaaggaaatggtcctggtattgtgaattggagtgaaggaggaacaaagatggtagctcatgttcctttttaccttttagcccagcaaaaaggtccaccgtctcataatttttcatttgccgacctcctcccaacagaatgaagaaaatatctgcatgagtgcattggtgcaggcatgatttctctagcagaaggccatataacgattttgttttgaagatccaagttcctttttaaaaaaggggctggtctgaacattcaggcttatttctctagcataatactcataaagagtcctgtacttttaggtcttgttcggttattcctataatacatggattgatggaattaaaaaaaatttagaagaactttgacttgcttaggaattcaacacatctaatcccactcaatccatatggattgagagctaatcgaacaagtcttacatggttgactatgcactcgagttatggaatgtatggtattacatttctaagtggtggatcgtagtgtaaaaaatgtacacgtctgaatttgttcgaaatgacaagtatctgttttgtttgaaatgacacgtctgaacttggcatagaagtgcatgaaaaatagaaggtcgaaaggttacattctttcgaaaacagcaggaatattaggccatggctctataagtaaactaactgagaatttaaaagctgcaaaatagcagtgaagacactcagcaataacgcaagtatgcaagcacaaggcaataactg

SEQ ID NO: 23995 - DNA, 2943 bp, Zea Mays
catgcgaatactgctggagttggcctaacccaacgaccagacgcaacacgacggcgacggccatggcttcgccggacctcgccgccggcgacggcagctacgactttcaccttcgctctctctccgcggcctcacgggactccgctgcggcctccgaccccgcctctgaccccaacctcctccaatctgttaggagggtgtgcgagatgtgccgaacggcgaaggaagcgaaggacgagatggtggcgcgggcgttccccgtgatgggcaagctatttcagcgatgcgccgccgctcccacgcaggccgttgcctccaccggcgtgctgctcctcaccattttgcaattcttcttggattttggggaggctgttttgcatgatgctgatggtagcttgaaaaccttcttccgctcttgcttaaggagtttgcagatcctattgttgcagagcgcacagttgaattccttgtaacaaacaagacaaagatccttagctcctttcccaatttgattccacaggtgccaacacttgaaatatttacttacttggaattgacaattcccacatgtagctcctattattcatgctgttgcagatcattgctttgaaaaactgaaagatataaatccagcttccttctttgttttatagcatatttgtcaattttttatgtgaatggtgggggaggcccctacatgtatttcttcactaacagaagcaaagaaatatttacaatacaggaggctgtaggccaaaaaggtagagaaaaaacagaaaaaaccatatttgtatgataagctactcaaccaatcttttgtaagattctttatagaatatctctcttctcttcctattttccatattcgacttaatcttgttaacacatgccaatgcttgtgtatccttgtttatacacagttctatccattgttgttaaagcttattgcatcaaacggtgagaggtatgtgctcgtattgtcatgaacttcacatagctctatcatccatgttccctttaaatgactcagtacaggtaccataaatatccaatagcaatcccgttgaactacctaatttgttttctaacattctagactggagaataagttttcggaagtacttccattaatgatgtcagcaggatcttttcttcccctcttcctatcccttatggatttgccaatgttggtggtggcactggaaaaggtggaaagaagttctggaactcttattggtagtagtatagctacaatccagaagagcgctgctcctgagatgcttcttgcactgatggacgaggcatatactggttctgccgtagaagaacctagtggtaattcaggttctgatgatagtggtcccctagaccttactgacccaatgttcttagaccttctaaaagatgagaatgatggcattgccgcaaaacattggatatcccctacgatatcttcaacgttacaagcagcatttaacagcccacagtcggacagattgaaacagtcactggaaatggcacctcgctttcttactttatattttgcaacagcattgcgagacgttaatgactgtagcactgctgtgtgctcttattccagtagttatgtcaagatatgctgcaatgttcccagacaaagttttctctttcaaggtgagggaaaggctttcagacttcattttggctgcattccagcggtctcccaacatcattgcagtactgaagaaacctattactgacagacttggtgaggctcatgataatcttgccaaggcaagtatatctttcaaacagagttagcattgcacttgtgctgggccattggtgagcatggagctggaggggtgggtcacaaggatgtagctcgtgaactatttgaaaatttggagttattattgtatgaaaacctggcaactagccgtttgggattaagccaagagccaggatctgattccatgggtgcatcatctagaaagtcatcccaagccaggcttctctgctttgtggtgactgctattgcaaaattagcaacatgccacagtgagttgcttccgagggcacgcgtgtcattgggtaaggtcgctcgttcccgaacctcagacaggagggtctggcaacgggcctgtgactatttagggctcatgaatgaaccagccatctgtttatctgtactgggaccgtccaccgcccaaggaaatggtcctggtattgtgaattggagtgaaggaggaacaaagatggtagctcatgttcctttttaccttttagcccagcaaaaaggtccaccgtctcataatttttcatttgccgacctcctcccaacagaatgaagaaaatatctgcatgagtgcattggtgcaggcatgatttctctagcagaaggccatataacgattttgttttgaagatccaagttcctttttaaaaaaggggctggtctgaacattcaggcttatttctctagcataatactcataaagagtcctgtacttttaggtcttgttcggttattcctataatacatggattgatggaattaaaaaaaatttagaagaactttgacttgcttaggaattcaacacatctaatcccactcaatccatatggattgagagctaatcgaacaagtcttacatggttgactatgcactcgagttatggaatgtatggtattacatttctaagtggtggatcgtagtgtaaaaaatgtacacgtctgaatttgttcgaaatgacaagtatctgttttgtttgaaatgacacgtctgaacttggcatagaagtgcatgaaaaatagaaggtcgaaaggttacattctttcgaaaacagcaggaatattaggccatggctctataagtaaactaactgagaatttaaaagctgcaaaatagcagtgaagacactcagcaataacgcaagtatgcaagcacaaggcaataactg

SEQ ID NO: 23996 - DNA, 2400 bp, Zea Mays
tggggatgagcatgcgaatactgctggagttggcctaacccaacgaccagacgcaacacgacggcgacggccatggcttcgccggacctcgccgccggcgacggcagctacgactttcaccttcgctctctctccgcggcctcacgggactccgctgcggcctccgaccccgcctctgaccccaacctcctccaatctgttaggagggtgtgcgagatgtgccgaacggcgaaggaagcgaaggacgagatggtggcgcgggcgttccccgtgatgggcaagctatttcagcgatgcgccgccgctcccacgcaggccgttgcctccaccggcgtgctgctcctcaccattttgcaattcttcttggattttggggaggctgttttgcatgatgctgatggtagcttgaaaaccttcttccgctcttgcttaaggagtttgcagatcctattgttgcagagcgcacagttgaattccttgtaacaaacaagacaaagatccttagctcctttcccaatttgattccacagttctatccattgttgttaaagcttattgcatcaaacggtgagagactggagaataagttttcggaagtacttccattaatgatgtcagcaggatcttttcttcccctcttcctatcccttatggatttgccaatgttggtggtggcactggaaaaggtggaaagaagttctggaactcttattggtagtagtatagctacaatccagaagagcgctgctcctgagatgcttcttgcactgatggacgaggcatatactggttctgccgtagaagaacctagtggtaattcaggttctgatgatagtggtcccctagaccttactgacccaatgttcttagaccttctaaaagatgagaatgatggcattgccgcaaaacattggatatcccctacgatatcttcaacgttacaagcagcatttaacagcccacagtcggacagattgaaacagtcactggaaatggcacctcgctttcttactttatattttgcaacagcattgcgagacgttaatgactcactgctgtgtgctcttattccagtagttatgtcaagatatgctgcaatgttcccagacaaagttttctctttcaaggtgagggaaaggctttcagacttcattttggctgcattccagcggtctcccaacatcattgcagtactgaagaaacctattactgacagacttggtgaggctcatgataatcttgccaagacagagttagcattgcacttgtgctgggccattggtgagcatggagctggaggggtgggtcacaaggatgtagctcgtgaactatttgaaaatttggagttattattgtatgaaaacctggcaactagccgtttgggattaagccaagagccaggatctgattccatgggtgcatcatctagaaagtcatcccaagccaggcttctctgctttgtggtgactgctattgcaaaattagcaacatgccacagtgagttgcttccgagggcacgcgtgtcattgggtaaggtcgctcgttcccgaacctcagacaggagggtctggcaacgggcctgtgactatttagggctcatgaatgaaccagccatctgtttatctgtactgggaccgtccaccgcccaaggaaatggtcctggtattgtgaattggagtgaaggaggaacaaagatggtagctcatgttcctttttaccttttagcccagcaaaaaggtccaccgtctcataatttttcatttgccgacctcctcccaacagaatgaagaaaatatctgcatgagtgcattggtgcaggcatgatttctctagcagaaggccatataacgattttgttttgaagatccaagttcctttttaaaaaaggggctggtctgaacattcaggcttatttctctagcataatactcataaagagtcctgtacttttaggtcttgttcggttattcctataatacatggattgatggaattaaaaaaaatttagaagaactttgacttgcttaggaattcaacacatctaatcccactcaatccatatggattgagagctaatcgaacaagtcttacatggttgactatgcactcgagttatggaatgtatggtattacatttctaagtggtggatcgtagtgtaaaaaatgtacacgtctgaatttgttcgaaatgacaagtatctgttttgtttgaaatgacacgtctgaacttggcatagaagtgcatgaaaaatagaaggtcgaaaggttacattctttcgaaaacagcaggaatattaggccatggctctataagtaaactaactgagaatttaaaagctgcaaaatagcagtgaagacactcagcaataacgcaagtatgcaagcacaaggcaataactg

SEQ ID NO: 23997 - DNA, 2431 bp, Zea Mays
ttcggtttggtaaaccatgcctgtgaatggggatgagcatgcgaatactgctggagttggcctaacccaacgaccagacgcaacacgacggcgacggccatggcttcgccggacctcgccgccggcgacggcagctacgactttcaccttcgctctctctccgcggcctcacgggactccgctgcggcctccgaccccgcctctgaccccaacctcctccaatctgttaggagggtgtgcgagatgtgccgaacggcgaaggaagcgaaggacgagatggtggcgcgggcgttccccgtgatgggcaagctatttcagcgatgcgccgccgctcccacgcaggccgttgcctccaccggcgtgctgctcctcaccattttgcaattcttcttggattttggggaggctgttttgcatgatgctgatggtagcttgaaaaccttcttccgctcttgcttaagtagggagtttgcagatcctattgttgcagagcgcacagttgaattccttgtaacaaacaagacaaagatccttagctcctttcccaatttgattccacagttctatccattgttgttaaagcttattgcatcaaacggtgagagactggagaataagttttcggaagtacttccattaatgatgtcagcaggatcttttcttcccctcttcctatcccttatggatttgccaatgttggtggtggcactggaaaaggtggaaagaagttctggaactcttattggtagtagtatagctacaatccagaagagcgctgctcctgagatgcttcttgcactgatggacgaggcatatactggttctgccgtagaagaacctagtggtaattcaggttctgatgatagtggtcccctagaccttactgacccaatgttcttagaccttctaaaagatgagaatgatggcattgccgcaaaacattggatatcccctacgatatcttcaacgttacaagcagcatttaacagcccacagtcggacagattgaaacagtcactggaaatggcacctcgctttcttactttatattttgcaacagcattgcgagacgttaatgactcactgctgtgtgctcttattccagtagttatgtcaagatatgctgcaatgttcccagacaaagttttctctttcaaggtgagggaaaggctttcagacttcattttggctgcattccagcggtctcccaacatcattgcagtactgaagaaacctattactgacagacttggtgaggctcatgataatcttgccaagacagagttagcattgcacttgtgctgggccattggtgagcatggagctggaggggtgggtcacaaggatgtagctcgtgaactatttgaaaatttggagttattattgtatgaaaacctggcaactagccgtttgggattaagccaagagccaggatctgattccatgggtgcatcatctagaaagtcatcccaagccaggcttctctgctttgtggtgactgctattgcaaaattagcaacatgccacagtgagttgcttccgagggcacgcgtgtcattgggtaaggtcgctcgttcccgaacctcagacaggagggtctggcaacgggcctgtgactatttagggctcatgaatgaaccagccatctgtttatctgtactgggaccgtccaccgcccaaggaaatggtcctggtattgtgaattggagtgaaggaggaacaaagatggtagctcatgttcctttttaccttttagcccagcaaaaaggtccaccgtctcataatttttcatttgccgacctcctcccaacagaatgaagaaaatatctgcatgagtgcattggtgcaggcatgatttctctagcagaaggccatataacgattttgttttgaagatccaagttcctttttaaaaaaggggctggtctgaacattcaggcttatttctctagcataatactcataaagagtcctgtacttttaggtcttgttcggttattcctataatacatggattgatggaattaaaaaaaatttagaagaactttgacttgcttaggaattcaacacatctaatcccactcaatccatatggattgagagctaatcgaacaagtcttacatggttgactatgcactcgagttatggaatgtatggtattacatttctaagtggtggatcgtagtgtaaaaaatgtacacgtctgaatttgttcgaaatgacaagtatctgttttgtttgaaatgacacgtctgaacttggcatagaagtgcatgaaaaatagaaggtcgaaaggttacattctttcgaaaacagcaggaatattaggccatggctctataagtaaactaactgagaatttaaaagctgcaaaatagcagtgaagacactcagcaataacgcaagtatgcaagcacaaggcaataactg

SEQ ID NO: 23998 - DNA, 1701 bp, Zea Mays
catgcgaatactgctggagttggcctaacccaacgaccagacgcaacacgacggcgacggccatggcttcgccggacctcgccgccggcgacggcagctacgactttcaccttcgctctctctccgcggcctcacgggactccgctgcggcctccgaccccgcctctgaccccaacctcctccaatctgttaggagggtgtgcgagatgtgccgaacggcgaaggaagcgaaggacgagatggtggcgcgggcgttccccgtgatgggcaagctatttcagcgatgcgccgccgctcccacgcaggccgttgcctccaccggcgtgctgctcctcaccattttgcaattcttcttggattttggggaggctgttttgcatgatgctgatggtagcttgaaaaccttcttccgctcttgcttaaggagtttgcagatcctattgttgcagagcgcacagttgaattccttgtaacaaacaagacaaagatccttagctcctttcccaatttgattccacaggaggctgtaggccaaaaaggtagagaaaaaacagaaaaaaccatatttgtatgataagctactcaaccaatcttttgtaagattctttatagaatatctctcttctcttcctattttccatattcgacttaatcttgttaacacatgccaatgcttgtgtatccttgtttatacacagttctatccattgttgttaaagcttattgcatcaaacggtgagaggtatgtgctcgtattgtcatgaacttcacatagctctatcatccatgttccctttaaatgactcagtacaggtaccataaatatccaatagcaatcccgttgaactacctaatttgttttctaacattctagactggagaataagttttcggaagtacttccattaatgatgtcagcaggatcttttcttcccctcttcctatcccttatggatttgccaatgttggtggtggcactggaaaaggtggaaagaagttctggaactcttattggtagtagtatagctacaatccagaagagcgctgctcctgagatgcttcttgcactgatggacgaggcatatactggttctgccgtagaagaacctagtggtaattcaggttctgatgatagtggtcccctagaccttactgacccaatgttcttagaccttctaaaagatgagaatgatggcattgccgtaagtagtttttcctatacgatggtctatatcccctctgaactcttagttctagtgatatcttcttctgtttcccccttcaggcaaaacattggatatcccctacgatatcttcaacgttacaagcagcatttaacagcccacagtcggacagattgaaacagtcactggaaatggcacctcgctttcttactttatattttgcaacagcattgcgagacgttaatgactgtaggttgcatacttttttttgcatgcttttttttgctacacatgttaagtgaccaacatattgttgatttgacaatctaagtttcttggttcagcactgctgtgtgctcttattccagtagttatgtcaagatatgctgcaatgttcccagacaaagttttctctttcaaggtgagggaaaggctttcagacttcattttggctgcattccagcggtctcccaacatcattgcagtactgaagattatctttctcactgtaactgaa

SEQ ID NO: 23999 - DNA, 2134 bp, Zea Mays
ataaaatttaacaggttttgaatcgaatcagaccgtgtcacaaatactatcgaccctttgattatcgctataaatctcgatccaaatatcttcgaattatgttaaacaaaaaacaaagaaaaagggaaagaaaataaaaaagatctcagcctgcccttatcccaacgccgctcagccgccctacccttttgccgtacgcagattttttcaagcaccagctttatctcctggaagcagccgcatcacctcttcatctccctctgtcgcggccgctgctggagcttctctgcttcacacggccccaatctccttcgctcctctccatggcgtgccctgcgctcgccggatctccttctgctagcgcccagctgctccctgcgtgctcctcccgtgcagctcgccgagcgccctctgcctgctagcgccagcagccacgccgctgcttgctccccttccttctcccttctctgcttcccctgctcgccatggaactccctgcgtcgagctcggctcctgctccagattgctcagctgcttcgggcagatgctggggcgctcgattccccagcaaaagttatccgctgcatgcccctatttgccgagcacttcaggtgggggcgccaggaggatgcacacgagttcctccgctatgtcgtagatgcctgtcacactgctgacctccgcatgcacaagcggttacgtgcagcagctgccagtggaaactgtggtgaggatgtccgggggcagggggtttgtctggttatgagggagacatttggcggggcattactgcgtcaagtgaagtgccttgagtgcaagggagaatctaacgagactgatgagataatggatatcagtctcgatctacctgggagcagttctgttgctgatgcccttgctcggctctgtcctatgctccagctcaccccctctgtttgttctcactactgggtcgggtctgcttggcgggcacaccaccatgcccgtggaattcctcggacctctctcctccgtgttggccgaagccatagaaattccttgctgcgcccagccgagttcgcccaggtcacaagcatctatgtcctcgcctcgtcgtgctcgctggtcgtgcatccttgcagttccttgcttgtgatcgcaagcgctcgaagtggaaaaacagagttgataaagaagaaagcaaaaccgtatagttcgtgcattcatttagtgtggaattggtgctatgaattttggggaaggaattccgagaaattagtggacggtgatgatgatgttcgtgcgatactcgtcagacgctcgaccaaaaagcctaattcgggagtggctactccgtctttttcgtcatgtgggaatcgtcgtgctgacacgtcaataccgtcgatcgtcatcccctgttcgatctcgtcgtcaagcttcgcctcagccctagtcgtcgtctttcacccagcagctcgtcatgagacctcacccagcagctcgtcatgagacctggtgtcgagctcctttcctaacaaatgccgaacctatccctgctcctgcgttcgccaacagtcttaactcgtcaatcacgctcgccagatgttcaattgaggacttcagcggaaagccatcgtcgttcaggcaactaccaagtcgaattgcgacgtggtgagccgattcatattttcgttagtttaattattgaattagttcgatgaatgcgatgtgattattttcataattttggagtaatcgcgtaggataggtttaagatgttaatgatatgacgtacggtaaaattagtgaaggaagtttaaatttagtattttaaaatgtctaaacaataatattgtaagatagattaaataaatatgtatgatgcgaaataaaattaaattagttcttggtaagcaaagtgatataatttatagagcgagagataaattagcatttaattaagtagctgatgaattgtgtttaggctaattatgtttaaagtgtatgatttgttgtttgtgatgtttgtgttaggttcgtttaatttagagaagcgtaattattacgcgtagtcgtatattaataactagtgtttccatataagatagtttaacgcctcgctgctaggtgttttattcgctatcgcgtagcgcta

SEQ ID NO: 24000 - DNA, 1905 bp, Zea Mays
cacgggagtacgggacacggctgcttgcctgcgccccttggtcctttccccgcttgcctttgcctttttcgggtgggctcctcccctccacccccctctctctctctctctctctcatggcccgccccaggaaggcgaaaccgccgccgccgccgcctagggcggcggcgccgtccatcgccgaggcgctgctgatggccacgatctgcatggtgggtctgcccgtggaggtgcgggtccgcgacggatccacctactccggcgtcctccacaccgcctgcgtcgatgccggttacggtgtcgtgctaaagaaagcaaagaagattgcaaacggaaagggagatgcgaatctgtcgctgggatcgtttgtggacactcttgttgttcatccagatgaccttgttcaagtgattgctaagggcctttcactccccgttaaaggtgtttgtaaacctcttgactccaacgtggtggcttccaatgggtccttgaagcgtcaaaattcacatgcaaatgaccccaaaatgtctaaacctgaaaatatatctccacttatgcaaactgagaaatgcacctctgtgggccaggggaaaaatacttctgttaagaaaaatggtcaaaatagtggtagcgctacaagtttaagttcttctaccggacttatggggccatgtttctccatgaatggggtttctggatcagcaactatggtgcctaaagttgatgctgctacaagttcagctatagctgcgcccttggtagcttcagatgttaaaccctctcagccggtcagtaattcagctaccaagatgattatgtcaagcaaatccactgctaaggaatttaaactcaatccttgtgcaagggttttctctccatcttttgcaagttctaggcaagtacttgcagctatggcccctgttgacacatactacatttcacactctgcccctgaagtaccaatgggcgtacctgtatatgagtcaaagtctgtgcctggcgtttcacctctaaccaacaagatcgtggggcataatacatccagactagacccagctagagtaggcacaccataccatcccatgcaggtgggggcaacctacactacccctagtcctcagcctgcaatgactgggaagttcagtcctgttgtttatgttcacccagttcctcaggatccattgcatggaacaccctctggttttcaaggatggcctcgccctgtgcttttgaattcatatcaagctagcatgcagaagttccaaggcaacaccccggtgtatttggcccctccaatcatggcaactgggaacctgccattggtggtaccaagccctgcaccacttgtgcagccgttccaggccattcatcccatcatggttcctgctgcaagcagcgtggtcccaggaaaatacatgtgaacttgtcataccaatgacaatctccttctgttggaagagtcctggctttccagttacccctttggtttggggtatacgtctgaaaggactccgcgattttgcctggtctgttgattcacttgtcagttgctggtctgtgtccgtattttagttggaagggctttgcaacttcgtcattcttcatgctctgtgtgggttttcgaaatattctttttagaggggggaggcatggtgcagtaaaatgaaatagagagaaattgcagcaattctttgttatcttagcaacaccttttcttcttccgagagcactatgtacaaggtgacattataaaagattaagatagtgaaggccttattttcgcgaggctaatgtacattcatcttgcaagtgttgcaacttttttgaagtttgtttaagtaaaaaaagacatgaagtttgtttcgacagtattatttctcttatagatcgaaattgttttatggc

SEQ ID NO: 24001 - DNA, 1338 bp, Zea Mays
atttcttgtttaatgcgtggcctcatttagtaccaaattctcaaggagctcagtctgagaatgatcctaacaataccactatatttgttggtgggcttgaccccaatgtcactgaagataccctaaaacaagttttttctccttacggtgaagtcgtccatgttaagatccctgttgggaagagatgtggttttgttcagttcgttaccaggggccttgattggtgcacagaatgttcgactttcatggggtagaagcctgtcgaacaagcaggctcagcctcagcaggaatccaatcaatggggtgcggctgctggtgctggtggctactatgggggctatggacaaggttatgaggcttatggcagtgggtatgcacaaccccaggatcctaacatgtatggttatggcgcttatggcggttatcccaattaccaacagcaaccagctgcacagcagcaacagcaacaacagtgatgcctgtttgctcgggtaggtcattgggttgtcgcgacggaattaattaaatattatttcaggacactctcatattgcattcttgtcaattgaggtggttttgaaaggctcctgattttgatggccccatggcacggtttcatctatttattagtatatgacatatatgcgctgtgaacaagtggcgctctactgtgattgctgtgttgagacatgctttcttagtttctttccatgtttctcggatctgttgtgttacctttattactgtgtatttgcatatctactgtgatgctatatatgcactgtgccgtttgtttcctattccatttttttctcgttactttattatagcgttggattctttcttctatcacaacgaacagccgtgggcacatgggcatgcacgatgtcatgacagaatgtgtcgatggcaacatgggctccatcttttatctgtttcgagtccttgacatcaggataatgtaatgtgggttttgttgccgctgtgactgatatggaagcatgagctgccatcgttttcatggccgtccgagtctgaaaaatacatttacagtacgatgaatccttttcattcggtctattattcggtctattaggttaattcggtttggtttatttgggtttgtgaaattttgggttttgaaaaatgagaatcgaaattttcaaaattattttagaaaccgaatctgaatagactcacaattttagtttggtctatttagtccaccgaatagacccaaatagtagagagactaatatcttttgttaaaatatataataaataattaattgaaagtactattattaaaaaaattataaaaatatcatacaaagata

SEQ ID NO: 24002 - DNA, 2340 bp, Zea Mays
ccgaattttccttctccccgtctcctcgccgtcgctccttcggcccttcctctctcccatctcggctagggttaggtcgtctcgccaagtcgccatgatgcagcagcccccgccgcagcagccgcagccgggcatggcgccgcctccgcctccgcaggctgctggcgggcagccaccgcagtggggtgggatcccgccgccgatggcgcagcagtacggcgcaccgcctccgcagcagcctccggcgatgtggggccagcctccgccgcaggcgcactacgggcaggcaccaacccctcagcagtactacgccgcgccgccggtgccggtgcaggcgccagccgcccccgctgcggcggacgaggtcaggacgctctggatcggggacctgcaatactggatggacgagaactacgtcttcgggtgcttttcgaacactggggaggttcaaaatgtgaagctcatccgtgacaagaattcagggcagcttcagggttatggttttgttgagtttacaagccgtgcagctgcagaacgagttcttcagacatacaatggacaaatgatgccaaatgttgacttgacatttcggctgaattgggccagtgctggtgaaaagcgcgatgatactcctgaatatactatttttgttggggatttggctgcagatgttacagattacttgttacaagagacattcagggttcattatccctctgtcaagggtgcaaaagttgtgactgataaattgacaatgcgcacaaagggttatggatttgtgaaatttggtgatcctacagagcaagctcgtgcaatgactgaaatgaatggaatgccttgttcttccaggcctatgcgtattggtcctgcagcaagtaggaaaaatacaggaggtgttgttcaagagagaggataccaatgggctctattcatataggagccttggaactgacctgagctgcaatgcatttcttgtttaatgcgtggcctcatttagtaccaaattctcaaggagctcagtctgagaatgatcctaacaataccactatatttgttggtgggcttgaccccaatgtcactgaagataccctaaaacaagttttttctccttacggtgaagtcgtccatgttaagatccctgttgggaagagatgtggttttgttcagttcgttaccagaccttctgctgaacaagcgctgctaatgctgcaaggggccttgattggtgcacagaatgttcgactttcatggggtagaagcctgtcgaacaagcaggctcagcctcagcaggaatccaatcaatggggtgcggctgctggtgctggtggctactatgggggctatggacaaggttatgaggcttatggcagtgggtatgcacaaccccaggatcctaacatgtatggttatggcgcttatggcggttatcccaattaccaacagcaaccagctgcacagcagcaacagcaacaacagtgatgcctgtttgctcgggtaggtcattgggttgtcgcgacggaattaattaaatattatttcaggacactctcatattgcattcttgtcaattgaggtggttttgaaaggctcctgattttgatggccccatggcacggtttcatctatttattagtatatgacatatatgcgctgtgaacaagtggcgctctactgtgattgctgtgttgagacatgctttcttagtttctttccatgtttctcggatctgttgtgttacctttattactgtgtatttgcatatctactgtgatgctatatatgcactgtgccgtttgtttcctattccatttttttctcgttactttattatagcgttggattctttcttctatcacaacgaacagccgtgggcacatgggcatgcacgatgtcatgacagaatgtgtcgatggcaacatgggctccatcttttatctgtttcgagtccttgacatcaggataatgtaatgtgggttttgttgccgctgtgactgatatggaagcatgagctgccatcgttttcatggccgtccgagtctgaaaaatacatttacagtacgatgaatccttttcattcggtctattattcggtctattaggttaattcggtttggtttatttgggtttgtgaaattttgggttttgaaaaatgagaatcgaaattttcaaaattattttagaaaccgaatctgaatagactcacaattttagtttggtctatttagtccaccgaatagacccaaatagtagagagactaatatcttttgttaaaatatataataaataattaattgaaagtactattattaaaaaaattataaaaatatcatacaaagata

SEQ ID NO: 24003 - DNA, 2169 bp, Zea Mays
ccgaattttccttctccccgtctcctcgccgtcgctccttcggcccttcctctctcccatctcggctagggttaggtcgtctcgccaagtcgccatgatgcagcagcccccgccgcagcagccgcagccgggcatggcgccgcctccgcctccgcaggctgctggcgggcagccaccgcagtggggtgggatcccgccgccgatggcgcagcagtacggcgcaccgcctccgcagcagcctccggcgatgtggggccagcctccgccgcaggcgcactacgggcaggcaccaacccctcagcagtactacgccgcgccgccggtgccggtgcaggcgccagccgcccccgctgcggcggacgaggtcaggacgctctggatcggggacctgcaatactggatggacgagaactacgtcttcgggtgcttttcgaacactggggaggttcaaaatgtgaagctcatccgtgacaagaattcagggcagcttcagggttatggttttgttgagtttacaagccgtgcagctgcagaacgagttcttcagacatacaatggacaaatgatgccaaatgttgacttgacatttcggctgaattgggccagtgctggtgaaaagcgcgatgatactcctgaatatactatttttgttggggatttggctgcagatgttacagattacttgttacaagagacattcagggttcattatccctctgtcaagggtgcaaaagttgtgactgataaattgacaatgcgcacaaagggttatggatttgtgaaatttggtgatcctacagagcaagctcgtgcaatgactgaaatgaatggaatgccttgttcttccaggcctatgcgtattggtcctgcagcaagtaggaaaaatacaggaggtgttgttcaagagagagatatttgttggtgggcttgaccccaatgtcactgaagataccctaaaacaagttttttctccttacggtgaagtcgtccatgttaagatccctgttgggaagagatgtggttttgttcagttcgttaccaggggccttgattggtgcacagaatgttcgactttcatggggtagaagcctgtcgaacaagcaggctcagcctcagcaggaatccaatcaatggggtgcggctgctggtgctggtggctactatgggggctatggacaaggttatgaggcttatggcagtgggtatgcacaaccccaggatcctaacatgtatggttatggcgcttatggcggttatcccaattaccaacagcaaccagctgcacagcagcaacagcaacaacagtgatgcctgtttgctcgggtaggtcattgggttgtcgcgacggaattaattaaatattatttcaggacactctcatattgcattcttgtcaattgaggtggttttgaaaggctcctgattttgatggccccatggcacggtttcatctatttattagtatatgacatatatgcgctgtgaacaagtggcgctctactgtgattgctgtgttgagacatgctttcttagtttctttccatgtttctcggatctgttgtgttacctttattactgtgtatttgcatatctactgtgatgctatatatgcactgtgccgtttgtttcctattccatttttttctcgttactttattatagcgttggattctttcttctatcacaacgaacagccgtgggcacatgggcatgcacgatgtcatgacagaatgtgtcgatggcaacatgggctccatcttttatctgtttcgagtccttgacatcaggataatgtaatgtgggttttgttgccgctgtgactgatatggaagcatgagctgccatcgttttcatggccgtccgagtctgaaaaatacatttacagtacgatgaatccttttcattcggtctattattcggtctattaggttaattcggtttggtttatttgggtttgtgaaattttgggttttgaaaaatgagaatcgaaattttcaaaattattttagaaaccgaatctgaatagactcacaattttagtttggtctatttagtccaccgaatagacccaaatagtagagagactaatatcttttgttaaaatatataataaataattaattgaaagtactattattaaaaaaattataaaaatatcatacaaagata

SEQ ID NO: 24004 - DNA, 2199 bp, Zea Mays
ccgaattttccttctccccgtctcctcgccgtcgctccttcggcccttcctctctcccatctcggctagggttaggtcgtctcgccaagtcgccatgatgcagcagcccccgccgcagcagccgcagccgggcatggcgccgcctccgcctccgcaggctgctggcgggcagccaccgcagtggggtgggatcccgccgccgatggcgcagcagtacggcgcaccgcctccgcagcagcctccggcgatgtggggccagcctccgccgcaggcgcactacgggcaggcaccaacccctcagcagtactacgccgcgccgccggtgccggtgcaggcgccagccgcccccgctgcggcggacgaggtcaggacgctctggatcggggacctgcaatactggatggacgagaactacgtcttcgggtgcttttcgaacactggggaggttcaaaatgtgaagctcatccgtgacaagaattcagggcagcttcagggttatggttttgttgagtttacaagccgtgcagctgcagaacgagttcttcagacatacaatggacaaatgatgccaaatgttgacttgacatttcggctgaattgggccagtgctggtgaaaagcgcgatgatactcctgaatatactatttttgttggggatttggctgcagatgttacagattacttgttacaagagacattcagggttcattatccctctgtcaagggtgcaaaagttgtgactgataaattgacaatgcgcacaaagggttatggatttgtgaaatttggtgatcctacagagcaagctcgtgcaatgactgaaatgaatggaatgccttgttcttccaggcctatgcgtattggtcctgcagcaagtaggaaaaatacaggaggtgttgttcaagagagagtaccaaattctcaaggagctcagtctgagaatgatcctaacaataccactatatttgttggtgggcttgaccccaatgtcactgaagataccctaaaacaagttttttctccttacggtgaagtcgtccatgttaagatccctgttgggaagagatgtggttttgttcagttcgttaccagaatgttcgactttcatggggtagaagcctgtcgaacaagcaggctcagcctcagcaggaatccaatcaatggggtgcggctgctggtgctggtggctactatgggggctatggacaaggttatgaggcttatggcagtgggtatgcacaaccccaggatcctaacatgtatggttatggcgcttatggcggttatcccaattaccaacagcaaccagctgcacagcagcaacagcaacaacagtgatgcctgtttgctcgggtaggtcattgggttgtcgcgacggaattaattaaatattatttcaggacactctcatattgcattcttgtcaattgaggtggttttgaaaggctcctgattttgatggccccatggcacggtttcatctatttattagtatatgacatatatgcgctgtgaacaagtggcgctctactgtgattgctgtgttgagacatgctttcttagtttctttccatgtttctcggatctgttgtgttacctttattactgtgtatttgcatatctactgtgatgctatatatgcactgtgccgtttgtttcctattccatttttttctcgttactttattatagcgttggattctttcttctatcacaacgaacagccgtgggcacatgggcatgcacgatgtcatgacagaatgtgtcgatggcaacatgggctccatcttttatctgtttcgagtccttgacatcaggataatgtaatgtgggttttgttgccgctgtgactgatatggaagcatgagctgccatcgttttcatggccgtccgagtctgaaaaatacatttacagtacgatgaatccttttcattcggtctattattcggtctattaggttaattcggtttggtttatttgggtttgtgaaattttgggttttgaaaaatgagaatcgaaattttcaaaattattttagaaaccgaatctgaatagactcacaattttagtttggtctatttagtccaccgaatagacccaaatagtagagagactaatatcttttgttaaaatatataataaataattaattgaaagtactattattaaaaaaattataaaaatatcatacaaagata

SEQ ID NO: 24005 - DNA, 2219 bp, Zea Mays
ccgaattttccttctccccgtctcctcgccgtcgctccttcggcccttcctctctcccatctcggctagggttaggtcgtctcgccaagtcgccatgatgcagcagcccccgccgcagcagccgcagccgggcatggcgccgcctccgcctccgcaggctgctggcgggcagccaccgcagtggggtgggatcccgccgccgatggcgcagcagtacggcgcaccgcctccgcagcagcctccggcgatgtggggccagcctccgccgcaggcgcactacgggcaggcaccaacccctcagcagtactacgccgcgccgccggtgccggtgcaggcgccagccgcccccgctgcggcggacgaggtcaggacgctctggatcggggacctgcaatactggatggacgagaactacgtcttcgggtgcttttcgaacactggggaggttcaaaatgtgaagctcatccgtgacaagaattcagggcagcttcagggttatggttttgttgagtttacaagccgtgcagctgcagaacgagttcttcagacatacaatggacaaatgatgccaaatgttgacttgacatttcggctgaattgggccagtgctggtgaaaagcgcgatgatactcctgaatatactatttttgttggggatttggctgcagatgttacagattacttgttacaagagacattcagggttcattatccctctgtcaagggtgcaaaagttgtgactgataaattgacaatgcgcacaaagggttatggatttgtgaaatttggtgatcctacagagcaagctcgtgcaatgactgaaatgaatggaatgccttgttcttccaggcctatgcgtattggtcctgcagcaagtaggaaaaatacaggaggtgttgttcaagagagagtaccaaattctcaaggagctcagtctgagaatgatcctaacaataccactatatttgttggtgggcttgaccccaatgtcactgaagataccctaaaacaagttttttctccttacggtgaagtcgtccatgttaagatccctgttgggaagagatgtggttttgttcagttcgttaccaggggccttgattggtgcacagaatgttcgactttcatggggtagaagcctgtcgaacaagcaggctcagcctcagcaggaatccaatcaatggggtgcggctgctggtgctggtggctactatgggggctatggacaaggttatgaggcttatggcagtgggtatgcacaaccccaggatcctaacatgtatggttatggcgcttatggcggttatcccaattaccaacagcaaccagctgcacagcagcaacagcaacaacagtgatgcctgtttgctcgggtaggtcattgggttgtcgcgacggaattaattaaatattatttcaggacactctcatattgcattcttgtcaattgaggtggttttgaaaggctcctgattttgatggccccatggcacggtttcatctatttattagtatatgacatatatgcgctgtgaacaagtggcgctctactgtgattgctgtgttgagacatgctttcttagtttctttccatgtttctcggatctgttgtgttacctttattactgtgtatttgcatatctactgtgatgctatatatgcactgtgccgtttgtttcctattccatttttttctcgttactttattatagcgttggattctttcttctatcacaacgaacagccgtgggcacatgggcatgcacgatgtcatgacagaatgtgtcgatggcaacatgggctccatcttttatctgtttcgagtccttgacatcaggataatgtaatgtgggttttgttgccgctgtgactgatatggaagcatgagctgccatcgttttcatggccgtccgagtctgaaaaatacatttacagtacgatgaatccttttcattcggtctattattcggtctattaggttaattcggtttggtttatttgggtttgtgaaattttgggttttgaaaaatgagaatcgaaattttcaaaattattttagaaaccgaatctgaatagactcacaattttagtttggtctatttagtccaccgaatagacccaaatagtagagagactaatatcttttgttaaaatatataataaataattaattgaaagtactattattaaaaaaattataaaaatatcatacaaagata

SEQ ID NO: 24006 - DNA, 2245 bp, Zea Mays
ccgaattttccttctccccgtctcctcgccgtcgctccttcggcccttcctctctcccatctcggctagggttaggtcgtctcgccaagtcgccatgatgcagcagcccccgccgcagcagccgcagccgggcatggcgccgcctccgcctccgcaggctgctggcgggcagccaccgcagtggggtgggatcccgccgccgatggcgcagcagtacggcgcaccgcctccgcagcagcctccggcgatgtggggccagcctccgccgcaggcgcactacgggcaggcaccaacccctcagcagtactacgccgcgccgccggtgccggtgcaggcgccagccgcccccgctgcggcggacgaggtcaggacgctctggatcggggacctgcaatactggatggacgagaactacgtcttcgggtgcttttcgaacactggggaggttcaaaatgtgaagctcatccgtgacaagaattcagggcagcttcagggttatggttttgttgagtttacaagccgtgcagctgcagaacgagttcttcagacatacaatggacaaatgatgccaaatgttgacttgacatttcggctgaattgggccagtgctggtgaaaagcgcgatgatactcctgaatatactatttttgttggggatttggctgcagatgttacagattacttgttacaagagacattcagggttcattatccctctgtcaagggtgcaaaagttgtgactgataaattgacaatgcgcacaaagggttatggatttgtgaaatttggtgatcctacagagcaagctcgtgcaatgactgaaatgaatggaatgccttgttcttccaggcctatgcgtattggtcctgcagcaagtaggaaaaatacaggaggtgttgttcaagagagagtaccaaattctcaaggagctcagtctgagaatgatcctaacaataccactatatttgttggtgggcttgaccccaatgtcactgaagataccctaaaacaagttttttctccttacggtgaagtcgtccatgttaagatccctgttgggaagagatgtggttttgttcagttcgttaccagaccttctgctgaacaagcgctgctaatgctgcaaggggccttgattggtgcacagaatgttcgactttcatggggtagaagcctgtcgaacaagcaggctcaggaatccaatcaatggggtgcggctgctggtgctggtggctactatgggggctatggacaaggttatgaggcttatggcagtgggtatgcacaaccccaggatcctaacatgtatggttatggcgcttatggcggttatcccaattaccaacagcaaccagctgcacagcagcaacagcaacaacagtgatgcctgtttgctcgggtaggtcattgggttgtcgcgacggaattaattaaatattatttcaggacactctcatattgcattcttgtcaattgaggtggttttgaaaggctcctgattttgatggccccatggcacggtttcatctatttattagtatatgacatatatgcgctgtgaacaagtggcgctctactgtgattgctgtgttgagacatgctttcttagtttctttccatgtttctcggatctgttgtgttacctttattactgtgtatttgcatatctactgtgatgctatatatgcactgtgccgtttgtttcctattccatttttttctcgttactttattatagcgttggattctttcttctatcacaacgaacagccgtgggcacatgggcatgcacgatgtcatgacagaatgtgtcgatggcaacatgggctccatcttttatctgtttcgagtccttgacatcaggataatgtaatgtgggttttgttgccgctgtgactgatatggaagcatgagctgccatcgttttcatggccgtccgagtctgaaaaatacatttacagtacgatgaatccttttcattcggtctattattcggtctattaggttaattcggtttggtttatttgggtttgtgaaattttgggttttgaaaaatgagaatcgaaattttcaaaattattttagaaaccgaatctgaatagactcacaattttagtttggtctatttagtccaccgaatagacccaaatagtagagagactaatatcttttgttaaaatatataataaataattaattgaaagtactattattaaaaaaattataaaaatatcatacaaagata

SEQ ID NO: 24007 - DNA, 1953 bp, Zea Mays
gaagacgtagttctcgtccatccagtattgcaggcgccagccgcccccgctgcggcggacgaggtcaggacgctctggatcggggacctgcaatactggatggacgagaactacgtcttcgggtgcttttcgaacactggggaggttcaaaatgtgaagctcatccgtgacaagaattcagggcagcttcagggttatggttttgttgagtttacaagccgtgcagctgcagaacgagttcttcagacatacaatggacaaatgatgccaaatgttgacttgacatttcggctgaattgggccagtgctggtgaaaagcgcgatgatactcctgaatatactatttttgttggggatttggctgcagatgttacagattacttgttacaagagacattcagggttcattatccctctgtcaagggtgcaaaagttgtgactgataaattgacaatgcgcacaaagggttatggatttgtgaaatttggtgatcctacagagcaagctcgtgcaatgactgaaatgaatggaatgccttgttcttccaggcctatgcgtattggtcctgcagcaagtaggaaaaatacaggaggtgttgttcaagagagagtaccaaattctcaaggagctcagtctgagaatgatcctaacaataccactatatttgttggtgggcttgaccccaatgtcactgaagataccctaaaacaagttttttctccttacggtgaagtcgtccatgttaagatccctgttgggaagagatgtggttttgttcagttcgttaccagaccttctgctgaacaagcgctgctaatgctgcaaggggccttgattggtgcacagaatgttcgactttcatggggtagaagcctgtcgaacaagcaggctcagcctcagcaggaatccaatcaatggggtgcggctgctggtgctggtggctactatgggggctatggacaaggttatgaggcttatggcagtgggtatgcacaaccccaggatcctaacatgtatggttatggcgcttatggcggttatcccaattaccaacagcaaccagctgcacagcagcaacagcaacaacagtgatgcctgtttgctcgggtaggtcattgggttgtcgcgacggaattaattaaatattatttcaggacactctcatattgcattcttgtcaattgaggtggttttgaaaggctcctgattttgatggccccatggcacggtttcatctatttattagtatatgacatatatgcgctgtgaacaagtggcgctctactgtgattgctgtgttgagacatgctttcttagtttctttccatgtttctcggatctgttgtgttacctttattactgtgtatttgcatatctactgtgatgctatatatgcactgtgccgtttgtttcctattccatttttttctcgttactttattatagcgttggattctttcttctatcacaacgaacagccgtgggcacatgggcatgcacgatgtcatgacagaatgtgtcgatggcaacatgggctccatcttttatctgtttcgagtccttgacatcaggataatgtaatgtgggttttgttgccgctgtgactgatatggaagcatgagctgccatcgttttcatggccgtccgagtctgaaaaatacatttacagtacgatgaatccttttcattcggtctattattcggtctattaggttaattcggtttggtttatttgggtttgtgaaattttgggttttgaaaaatgagaatcgaaattttcaaaattattttagaaaccgaatctgaatagactcacaattttagtttggtctatttagtccaccgaatagacccaaatagtagagagactaatatcttttgttaaaatatataataaataattaattgaaagtactattattaaaaaaattataaaaatatcatacaaagata

SEQ ID NO: 24008 - DNA, 3022 bp, Zea Mays
aaagaatacaaactaaaaagcatgaaagagataataaaaaaaatttgtaacgaattgtttgaaacagtgaacgggcccatatgcaggagaagaaggcccggttgtggtgcgctccctcgaccgaacagccccgactgggctatattcgttctcccggcgtgctccgtctctcctctcagcgcgacgattacggtaacgccgtcgccgccctacggctcagatcttcgtcgtcatcttctccggcaacgagcacccaaagatggtggtccttcaaccagatcggttcctgagcgagctgacgagcatgtacgagcggagcacggagaagggctccgtctgggtcaccatgaagcgatcaactctcaagggcaaggcacagttgcggaagatggagaataaggggcaggaggtagagcacaggtgcctcgtccgcgcctccaatggcaagaagaacatctccacctcggtttctctaaaggagtacacaaagtttcaagcttcatacgcaacagttcttaaggcccatatgcatgctctgaagaaaagggagaggaaagacaagaagaagactgcagatgctgagaaggcaattgagaccgcacccaagaagcagaagaaagcatcttcaaagaaatcttcagggtccaagtcataaggcgctcacagaactcagtgtgtcttctcctttatgttgtttaccgccagactaattagagtgtcgtgaagttttacttatctggtttttattcgaattcgtgtctggaagatgaaagcctgtgaatacacctttatagagccgtgtcatcgatgctaacattttttgaagcagagttttgaggtgaatgtgaggcgctgtgctgccctgattggcattaacgaaaatgcacaagtttgaacttttattgcataaaggtaatggagtttgttagggaacatcttcgtcgctggaatgggaatagaatggattactatgtgatttgtttggttcacccgtggtagcagggtggacggtagtgcaaatgcgcaatcgtttgcagctcaaatcgggcgtaatcggagtgcttgatgatctggatgatcaacatcccaagcaagatattagaagccttgatgaatacctacaagcacgtgcaaaagtccaaggcataagataaaactaaggaccacaactcaactgaacaatggctccaatcaaacttttttatcccgatccgagagctccacagcttggatggaaccgagtgggtgaggtttggttagtcgaggatccgtcacgatccaccaccaaacgcgacaaaagacttggcaaaaaaattgggacccacaaacagcaaagccgagcactgataactcgctgatccgtcagcaccccaccaaacctgctgctcgagctcgacctacgagcgcgcgcaccaccaccaccatccaccacccacacccccacggccccacccccacccccacccgatcccgatctcaccgtctccaccccgaccccctcccaccagtctccaacagaccaacagcatctaatcaatcaagacagccccgtgctagctcacccgccggggctcgccacgatgagaggcctcctcgcgtgcgccaccctcgcccgccgcgccgccgcctcctccgcgcccgcgcgcgtccgccacctggcgggcgccgcggaggcggcggaggccgagctcaagaggacggcgctctacgacttccacgtcgcccacggcggcaagatggtgccgttcgccggctggagcatgcccatccagtacagggactccatcatggactccaccgtcaactgccgcgccaacggcagcctcttcgacgtcgcccacatgtgcggcctcagcctcaagggccgcggggccatccccttcctcgagtccctcgtcgtcgccgacgtcgccgcgctcagggacggcaccggcaccctcaccgtcttcaccaacgagcagggcggcgccatcgacgactccgtcatcgccaaggtcaccgaccaccacatctacctcgtcgtcaacgccggatgcagggacaaggacctcgcccacatcgaggcgcacatggaggccttcaacaagaagggcggggacgtcaagtggcacatccacgacgaccgatcgctgctcgcattgcagggtcctcttgctgcacctactctgcagttgctgacgaaagaagatttgagcaaaatgtacttcagtgacttcaagatgattgacatcaatggatatgcatgctttctgacgagaactggctacaccggcgaagatggttttgagatctctgttccgtcagagaatgcagtggatcttgcagaggccatcctagagagatcggaaggcaaggtgcggctgaccggcttgggcgcccgtgacagtctccgactggaggcaggcctgtgcctgtacggcaacgacatggagcagcacatcacgccggtggaagccggcctctcatgggcgatcggcaagaggaggagggcagagggcggtttcctgggcgcagacgtgatcctgaagcagctccaggaagggccaaagatcaggcgcgtgggcatggtcacgcaggggccgcccgcgcggagccacagcgagctggtgagcggctcgggggagaggatcggcgaggtgaccagcggagggttcagcccgtgcctgaagaagaacatcgctatgggctacgtgaagtcgggaatgcacaaggctgggacggagttgaaggtggtcgttcgcgggaagtcctacgacgccgtggtcaccaagatgccgttcgtgcccaccaagtactacaagccctcgtagattatattcttgtacagagggacgccttgcgtttctcttttgtcgttgcggcttgttcttggcagattggttaagcattgcaactgtaacttctgtgagattgtcttacggttcacatttcatgtatgcctgcctaataagccttcttttcccaaatacaaagcatgcatgtgcctatgtgaagaatcgaatcttgctggttggacaattca

SEQ ID NO: 24009 - DNA, 1878 bp, Zea Mays
gcgaactcgtccccgatgggcgatagtctacagctacagagcgtcgaattccacagccgaacagcagggcgaacagttttgctacaaatttacttcgagcacaggtgcttttgtctgatactaagtctgaacacgcattattgcaggagatattttagaaagcctactgcactgtcactgtaggccactgctgatagatcagatattcagataccaatcacactatcctcgatttttcatatgcacgcagaagacgaaattggttgagtggttacaaaaaaaccaaacactttccagcatatgcatgcaagggacgaaattagttaccagttaccaacactttcagcatatgcacgcaagggacgagattgattacccattaccaaaccaacagtttccagttcagcggtaggaacaggccgtcacggcgtcatccgccaaaggacaatccatttgctcacacaggcacaaacgctgagcgcctgagcctgctctcgcggtctaggagatggcgttgatcacgaatgtctctgactatgaggagcttgcaaagcagaagctgcctaagatggtttatgacttctatgccgggggtgcagaagaccagtggacactcaaggagaataaggaggcattctccaagattctgtttcgaccacgggtgctgattgatgtgtctcatattgacatgtctacaagtatattgggttacaaaatttccatgcctattatggtggctcccactgctttgcacaaactagcccaccaagaaggagaggttgcttctgcccaggcagcagctgctgcaggaactataatgacgttgtcttcatggtcatcttgcagcattgaggaagttagctcaattgcaccaggactccgtttcttccaactttcagtattcaaggatagggatatcgtgcaacagcttgtcagaagggctgaaaatgctggctataaggcaatcgccgtcactgtcgacgctccacgccttggtcgcagggaagccgatgtcaggaacagattcaggctgcctgaaaatgtggtgttgaagtgctttgaaggactggatctcagcaagatggacaagactaagggttcaggccttgctgcttacgccactagccagattgacagctctctttcttggaaggatatcaagtggctacagacgattaccgggctgcctatcttagtgaaaggagtcataacagcagaagatgctcgaattgctatcgaatgcggtgtcgccggcattatcgtgtccaaccacgggggccgccagctagactatcttcctgcaaccatcagctgcctggaagaggggaaacttcaggttgtgagagaagcgaagggccgccgtgtgcctgtgttcctcgacggcggcatccgccgtggcactgacgtgttcaaggccttggcgctgggagcctcaggagtgtttattggaaggcccgtactgttcgccctcgccgtggacggcagggcaggggtgaggaatgcgctgcggatgctgagggatgagctcgagatcaccatggcgctgagcggctgcgcgtcgctgaaagatatcacccgcgatcgcgttatcactgagcgcgacatgatccgtcgctctcggatataggcttcgattcgtttgctgttgtgttgtgcggggctgaaagtctgttgttgccctggcatgactgtcatattcgaaactgaccggaccatcagattggttttgacttttgacctattggctaacgatgtgctaggttttctcatttgtctgcgtctcagcctaattttgcccagctgtgattgataatatatgcttcaataagtcataaaatagcatatcaaacaggtcttacttgagtgttgacaccggcc

SEQ ID NO: 24010 - DNA, 1498 bp, Zea Mays
attcgttcccccgtccggctggtctttgtaatcaattcgtattcgtattcggcatggagctgatcacaaatgtcaccgagtacgagaagctcgcgaaggagaggctgccgaagatggtgtacgactactacgcctccggcgcagaagatcagtggacgctcaaggagaaccgggaggccttctccagaattctgtttaggccacgggtactgatcgacgtctcccgtatcgacatggccacaaacattctgggcttcagcatttccatgcctatcatgatcgctccttcagccatgcagaaaatggctcatcctgatggagagcttgccacggcaagagctgcagcttccgcaggaacaataatgacattgtcctcatggtctacttccagcgttgaagaggtcaactcagttgggccgggcatacgtttcttccagctctatgtctacaaggacaggaatatcgtacggcaactcgtgaaaagggctgagatggctggcttcaaggccattgcactcacggtagacactccaatacttggccgcagggaagctgacattaagaacaggttcgccttacctccacatctggtgttgaaaaacttccaagcgctggatcttggcacgatggacaagacaaatgattccggccttgcttcctacgttgctggtcaagttgaccgcaccctttcctggaaggacgtcaagtggctgcagacaattacctcgttgccgatcctagtcaaagggatcgtgactgcagaagacactaggcttgcgatcgaatatggcgctgctgggatcatcgtgtccaaccacggcgcgcgccagctagattatgttcctgcgactatcagctgcctggaagaggtcgtcagggaagcgaaaggccggctaccggtgttcctcgacggcggcgtccgccgtggcacggacgtcttcaaggccctggcgttgggagcttcaggagtgttcatcggccggcccgtgctgttctcgctggcggtggacggcgaggccggcgtgcggaaggtgctgcagatgctgagggacgagctggagctcaccatggcgctcagcggctgcacgtcgctgagggagataacccgcgcacacgtcatcaccgacagcgaccggatcggccgctcgcggctgtagaatcattgtgcagttcacctcaggaatgatgttggtctcgactgaactgtcctgattcgggatctatttgtagctcttgtgctctcattttacgttaggcaaataaggaagctgcgtgcgtatgtgtgactgctgctgacgtttgtttgcgccgctgtcgtggttgcctggttggcacttggcagtgttgattggcgttagtggttggtttgggtgaaaggagtttatgagatctggtgccggtttctaagatactagcccatcaacgtttgttcgtgtgttgcccgtgctaatgcttcgggaaaatataaaataaaataatatttattttaaaaataaaa

SEQ ID NO: 24011 - DNA, 1741 bp, Zea Mays
gaaacattttttttcttctgaatccctggtctgcttgttcattcctcattcctctacacgcatattcctacatgccatgcccacacgcaaatatgtcagatgctcagcgctcgacttagccctcgatcacgggcgcacaacaacacagcgacgctatctgaccgagtgttcaaataaatacccacacgggcacgccacgagacgatgagacccctctgctccaatccgccgctccactccaagtcacacggaggcagccatcgtagcctcgcccgactccgcttcccctgttctttgggcatggagctgatcacaaatgtcaccgagtacgagaagctcgcgaaggagaggctgccgaagatggtgtacgactactacgcctccggcgcagaagatcagtggacgctcaaggagaaccgggaggccttctccagaattctgtttaggccacgggtactgatcgacgtctcccgtatcgacatggccacaaacattctgggcttcagcatttccatgcctatcatgatcgctccttcagccatgcagaaaatggctcatcctgatggagagcttgccacggcaagagctgcagcttccgcaggaacaataatgacattgtcctcatggtctacttccagcgttgaagaggtcaactcagttgggccgggcatacgtttcttccagctctatgtctacaaggacaggaatatcgtacggcaactcgtgaaaagggctgagatggctggcttcaaggccattgcactcacggtagacactccaatacttggccgcagggaagctgacattaagaacaggttcgccttacctccacatctggtgttgaaaaacttccaagcgctggatcttggcacgatggacaagacaaatgattccggccttgcttcctacgttgctggtcaagttgaccgcaccctttcctggaaggacgtcaagtggctgcagacaattacctcgttgccgatcctagtcaaagggatcgtgactgcagaagacagcttgcgatcgaatatggcgctgctgggatcatcgtgtccaaccacggcgcgcgccagctagattatgttcctgcgactatcagctgcctggaagaggtcgtcagggaagcgaaaggccggctaccggtgttcctcgacggcggcgtccgccgtggcacggacgtcttcaaggccctggcgttgggagcttcaggagtgttcatcggccggcccgtgctgttctcgctggcggtggacggcgaggccggcgtgcggaaggtgctgcagatgctgagggacgagctggagctcaccatggcgctcagcggctgcacgtcgctgagggagataacccgcgcacacgtcatcaccgacagcgaccggatcggccgctcgcggctgtagaatcattgtgcagttcacctcaggaatgatgttggtctcgactgaactgtcctgattcgggatctatttgtagctcttgtgctctcattttacgttaggcaaataaggaagctgcgtgcgtatgtgtgactgctgctgacgtttgtttgcgccgctgtcgtggttgcctggttggcacttggcagtgttgattggcgttagtggttggtttgggtgaaaggagtttatgagatctggtgccggtttctaagatactagcccatcaacgtttgttcgtgtgttgcccgtgctaatgcttcgggaaaatataaaataaaataatatttattttaaaaataaaa

SEQ ID NO: 24012 - DNA, 1428 bp, Zea Mays
ctcttggatactgtggcttgggaaatggttgcaaggccttgagggggtcaaaataaaactgacaaggccactgatgcattgttgacatagcatgccccatagggccaccgatgctacacaagcttcttcctaatatcatttattaactgttgtttaatctatatactatctcgctagtctacatgccgagtgtttataaactagaggcccgtatttttactgtgtttttttctaaaaaaagcaaacaatacaacaaaagtaggaaaatcctgttagattcaaaccacaaaaaagcaactataatgcaagcaaacaaatggtatataaccaaaaaaatccaatcatttgtgaccttgaaaaggagaaactttcagagtaacacttactttttaaaagcagctataatgctggtggttatgatctgctttcattgtatactcatgctatgctggtggtcccaccattcatcctatggtttctttctagaaggagatctagacaggtgatagataggagtattgtatttcttttgtgtttcctggtaccagcaaactctgcaatatagatagaagctaatcctatcttcagctcttctctttgcctgacaaggcgcctttccttgtccactttattttaattttaccaatataatattattggctagtttggggaaatcctcccaaatcagggctaacaaaaagattttttttgcaggttcagctaattgctactctaaagatggttgccctccctaaaagaatacatatagagcatgcgaaagagcgattagatatgattgttctgtaatatcaccttgaattctgttaccggagtattcatgaacttttcaagtaaaccataagctattagggaccatttttctttaggattcagaaatagaagaattaacagataattgacttaccaaaaagcgagtcccacatgttgtatgtagaaggaaagatccctacagttggcccactaagcatccttgcgtcattgaatgagccagatttcgttgagcttgcactgcatgagtacaagtctgcgactaacatgacagagcagtttgctgcattagcagcattatcccaaaatccaggccaagttcgtgatgatgccctcttggatttctataacaagtggcagcatgaatacttggttgtaagcaagttgtttgctcttcaagctacttcagagattcctggaaatgttgcaaatgttcagaagctgctgtctcaccctgctttcgacctgaggaatcccaacaaggtgtactcactaatcgggggattctgtggctcacctgtgaacttccacgcgaaagatggttctgggtacaagttcttgggtgagatcgttttgcagcttgacaagataaaccctcaggttaatgccaagtacttgttctcctgggtatttacctag

SEQ ID NO: 24013 - DNA, 240 bp, Zea Mays
atgggccagtacctgctgctcctccaccgcgcgctgctgctggcgcaggtctacctcgccatctacttcgcgacgctcgcgctcgccgtggccgccactgggctggagccgctgcgcttcttccgcgcggcctcccccgccgcatacgcctggtcgcaggctgcgcagtcccttggcctcggcgtgcgtctgcggcggcgaccacacggaggcgacggcaagcggctctggcggctttga

SEQ ID NO: 24014 - DNA, 701 bp, Zea Mays
caatgatgaaagaaaatcaagttacatatgcaagtctagatggatgctaaatatagcttcttgtcaaggcaatttcagacacagtgccatcgaacattaaaaaagtaaaacctgtcctgacaagtcaggacgacaatgtcaacatttgaacacatgttctctacttcaaaggctcacttcttttccctggctaactgagataacatgttgatttttcttgagacgtctgtagtttgtgaattgtgctgcaaagctgtctaaaatgcagctattgcctatatgaagggaaaagtaaattccaaatcagactaatatccatttactggagggaaaaataaaaaaaaaagagtttgtatagatattgcctcggatgctagaatgaaagagggcatcaattgccactcaaactattcagaaaatacaggaattatacgtgggaagaccgctccgtgtccgttcgatgaagatcctgtgacccataagaatagccacgagatgggctgatcgacgaggattgctccccgctctatatatagtaactagtacaatgccagtacacacacaaattacaaaagacttaaatatttcaatttgcagcttgctaatgtccaaaacatcacaacattattacaataagactgggacagtgacaacgagcacaaacatcagaaaatttagcagaacacatcttttaatttgac

SEQ ID NO: 24015 - DNA, 2195 bp, Zea Mays
cactgagtttatcagaaagcaattgcttctcttactgtgaaaggccttgcgtataccattctattggttgtgggtaaaacagcactgctgcttgccattgccaggattctcctgaggttcatgcaaatgctgctgaaatcctttgtgcagtaactagatatgcccctccagcacttgctgcaaagatttccagtccaagctttgtggggagattatttcaacatgcttttgaagattcaaggccaaaatcggtgctggtccactcattatcagtgtgcatatcgttgttagatcctaagagacttgtatcggcttcctatcaggctttccgtagtcagttgagccatggaacacttgtcaccgcaagtccagagacagtaaatggcatgctggatagcctaggggatttattgaagctgctggatgtttcatctgctgaaaatgttctgccaacaacatacggtagcttacaacctccactcgggaaacatcgcttgaagattgttgagttcatctctgttcttctatcaattggtagtgcagctgccgaaacacgactgattcaactaggagcaatcaagcatgctatagatctattttttgagtacccgtttaacaacttcttgcaccaccatgtcgagaatatcatcggctcatgtttggagagtaagcaggatcgactgattggccatgtccttgatgactgtaaacttgttacaagaattctggaagcagagaagaactctgctctgtcgtcagatttaactaagcatactatgtcttcagagggaagatctcccccaaggataggaattgttggtcatatgacacggatagctaacaggctccttcagctggtcaacacaaacatcatggttcaatcacatttgcaggcttaatttgattgcagcaaaattctgattggattgagtggcatgccagtaccctgacgaagcgtaatgcattagaaaatgtttaccagtgggcttgcggtcgaccaacatcactgcaggatcgtggtagggatagcgatgatgaagacttccgagatagggactacgatgtggctgcacttgctagcaatttaagccaagcatttaaatatggtatttacagtagtgaggatattgacgaggctcaagcatcacttgagcgggatgatgaggatgtatattttgatgatgaatctgcagaggttgtaatctcctcccttcgccttggagacgaccaagaaagtggttcgctctttacaaattccaattggtttgcatttgacgaggacaaggcactgaatgatggtttggttagctcagaagcatccccatctccaaattcggaaatatccgcactaaaagaggatgatgaacatgatgaagtcattcttggcgaaattatagatgaaataaaaggttctgaaccaactctaccagtcttcaacaaagatgcaaacaaagaatctggttccaccggcttggcaaatggtaccgttgacaaattcgaagatgatatcagaccaccaactccggatgtaaaagagagtcaacctgagtttgttgaatggaaggaggaagaagctgaacctggtgatattgccgagaaggataccgcagttcctgatattgaggttgaaaatgagaagcagctggattccatggatgatgttatgctttgcgatgcaaagttaggagaggaaaagaagagtgatgagcttggcatatgaagtgaatttcagaggagcagaatttcagaggaagcacttggaactggtcagaccattattgcacaagcagtctgaggatcatatgtgagttctctgttgtacacttgaaggtggtcccggaccgtgcatctgatggagcctcaaagattcaacttgtctgatggatagatgtgtaacatgatttggtggtggttattgttatgtgcctatagtctgggctacatcgagacgcaaaattctgaaagtagtcttccttgtcctttcggggttctagttgtgacccaggtaaataactgataggtgaataggtgatgctatttgtacgaaaattttggctcaaatgcagtcgattgttggcatatttagaacttgtttcaaatttgtgtaaactaaagaatatagtttctatttttttccaggtacttaatgcataattcatttgttataatataaacgacctttggtacatgtcaca

SEQ ID NO: 24016 - DNA, 2887 bp, Zea Mays
ggaagctcacaatgggggatttcgattcggtgcctgactggatgataccagctcatgatgtggaaatctcagctctaaatccgcttgggttgtgatatcgtgacagtgtgggtactgacataactggcactgtgcaagatgttttggcatgtgccgggactctccgctgcatcaccggttgatactattttggacaaggaaaattttaagttggaatgtcttcttgatgaggatgaaataattcaggagtgcaaagcactgaatacccgcttaatcaattttttgcgggacaaggttcaagtggaacaattactccgctacattgtagaggaggctcctgaagatgcagaaaagaaaaggatatttagatttccgtttatagcttgtgaaatatttacatgtgaagtggatgtcatcatgaagacattagtggaggatgaagatcttatgaatttacttttctccttcctgaaacctgaccacccccatgggacattgtcggctggttactttgccaaggtagtgatttgcttgatgatcaggaagacactcccactagttagttatgtgcagggccatcctgaaatagttagccaacttgtcgatcttattgggattacttctatcatggaggttttgattcgcttaatcggtgcagatgaaactatgtattcaagctatgcagattctatgcaatggttagatgacatacaagtccttgagatgattgttgacaagttcagcacatcagattctcctgaggttcatgcaaatgctgctgaaatcctttgtgcagtaactagatatgcccctccagcacttgctgcaaagatttccagtccaagctttgtggggagattatttcaacatgcttttgaagattcaaggccaaaatcggtgctggtccactcattatcagtgtgcatatcgttgttagatcctaagagacttgtatcggcttcctatcaggctttccgtagtcagttgagccatggaacacttgtcaccgcaagtccagagacagtaaatggcatgctggatagcctaggggatttattgaagctgctggatgtttcatctgctgaaaatgttctgccaacaacatacggtagcttacaacctccactcgggaaacatcgcttgaagattgttgagttcatctctgttcttctatcaattggtagtgcagctgccgaaacacgactgattcaactaggagcaatcaagcatgctatagatctattttttgagtaagttagatattggaatctgcatataaaaattattgaaatcctgacagatttcatcattaggtacccgtttaacaacttcttgcaccaccatgtcgagaatatcatcggctcatgtttggagagtaagcaggatcgactgattggccatgtccttgatgactgtaaacttgttacaagaattctggaagcagagaagaactctgctctgtcgtcagatttaactaagcatactatgtcttcagagggaagatctcccccaaggataggaattgttggtcatatgacacggatagctaacaggctccttcagctggtcaacacaaacatcatggttcaatcacatttgcagcaaaattctgattggattgagtggcatgccagtaccctgacgaagcgtaatgcattagaaaatgtttaccagtgggcttgcggtcgaccaacatcactgcaggatcgtggtagggatagcgatgatgaagacttccgagatagggactacgatgtggctgcacttgctagcaatttaagccaagcatttaaatatggtatttacagtagtgaggatattgacgaggctcaagcatcacttgagcgggatgatgaggatgtatattttgatgatgaatctgcagaggttgtaatctcctcccttcgccttggagacgaccaagaaagtggttcgctctttacaaattccaattggtttgcatttgacgaggacaaggcactgaatgatggtttggttagctcagaagcatccccatctccaaattcggaaatatccgcactaaaagaggatgatgaacatgatgaagtcattcttggcgaaattatagatgaaataaaaggttctgaaccaactctaccagtcttcaacaaagatgcaaacaaagaatctggttccaccggcttggcaaatggtaccgttgacaaattcgaagatgatatcagaccaccaactccggatgtaaaagagagtcaacctgagtttgttgaatggaaggaggaagaagctgaacctggtgatattgccgagaaggataccgcagttcctgatattgaggttgaaaatgagaagcagctggattccatggatgatgttatgctttgcgatgcaaagttaggagaggaaaagaagagtgatgagcttggcatatgaagtgaatttcagaggagcagaatttcagaggaagcacttggaactggtcagaccattattgcacaagcagtctgaggatcatatgtgagttctctgttgtacacttgaaggtggtcccggaccgtgcatctgatggagcctcaaagattcaacttgtctgatggatagatgtgtaacatgatttggtggtggttattgttatgtgcctatagtctgggctacatcgagacgcaaaattctgaaagtagtcttccttgtcctttcggggttctagttgtgacccaggtaaataactgataggtgaataggtgatgctatttgtacgaaaattttggctcaaatgcagtcgattgttggcatatttagaacttgtttcaaatttgtgtaaactaaagaatatagtttctatttttttccaggtacttaatgcataattcatttgttataatataaacgacctttggtacatgtcaca

SEQ ID NO: 24017 - DNA, 2807 bp, Zea Mays
ctcaattgttgcttctgagtgtagccgataccagctcatgatgtggaaatctcagctctaaatccgcttgggttgtgatatcgtgacagtgtgggtactgacataactggcactgtgcaagatgttttggcatgtgccgggactctccgctgcatcaccggttgatactattttggacaaggaaaattttaagttggaatgtcttcttgatgaggatgaaataattcaggagtgcaaagcactgaatacccgcttaatcaattttttgcgggacaaggttcaagtggaacaattactccgctacattgtagaggaggctcctgaagatgcagaaaagaaaaggatatttagatttccgtttatagcttgtgaaatatttacatgtgaagtggatgtcatcatgaagacattagtggaggatgaagatcttatgaatttacttttctccttcctgaaacctgaccacccccatgggacattgtcggctggttactttgccaaggtagtgatttgcttgatgatcaggaagacactcccactagttagttatgtgcagggccatcctgaaatagttagccaacttgtcgatcttattgggattacttctatcatggaggttttgattcgcttaatcggtgcagatgaaactatgtattcaagctatgcagattctatgcaatggttagatgacatacaagtccttgagatgattgttgacaagttcagcacatcagattctcctgaggttcatgcaaatgctgctgaaatcctttgtgcagtaactagatatgcccctccagcacttgctgcaaagatttccagtccaagctttgtggggagattatttcaacatgcttttgaagattcaaggccaaaatcggtgctggtccactcattatcagtgtgcatatcgttgttagatcctaagagacttgtatcggcttcctatcaggctttccgtagtcagttgagccatggaacacttgtcaccgcaagtccagagacagtaaatggcatgctggatagcctaggggatttattgaagctgctggatgtttcatctgctgaaaatgttctgccaacaacatacggtagcttacaacctccactcgggaaacatcgcttgaagattgttgagttcatctctgttcttctatcaattggtagtgcagctgccgaaacacgactgattcaactaggagcaatcaagcatgctatagatctattttttgagtacccgtttaacaacttcttgcaccaccatgtcgagaatatcatcggctcatgtttggagagtaagcaggatcgactgattggccatgtccttgatgactgtaaacttgttacaagaattctggaagcagagaagaactctgctctgtcgtcagatttaactaagcatactatgtcttcagagggaagatctcccccaaggataggaattgttggtcatatgacacggatagctaacaggctccttcagctggtcaacacaaacatcatggttcaatcacatttgcagcaaaattctgattggattgagtggcatgccagtaccctgacgaagcgtaatgcattagaaaatgtttaccagtgggcttgcggtcgaccaacatcactgcaggatcgtggtagggatagcgatgatgaagacttccgagatagggactacgatgtggctgcacttgctagcaatttaagccaagcatttaaatatggtatttacagtagtgaggatattgacgaggctcaagcatcacttgagcgggatgatgaggatgtatattttgatgatgaatctgcagaggttgtaatctcctcccttcgccttggagacgaccaagaaagtggttcgctctttacaaattccaattggtttgcatttgacgaggacaaggcactgaatgatggtttggttagctcagaagcatccccatctccaaattcggaaatatccgcactaaaagaggatgatgaacatgatgaagtcattcttggcgaaattatagatgaaataaaaggttctgaaccaactctaccagtcttcaacaaagatgcaaacaaagaatctggttccaccggcttggcaaatggtaccgttgacaaattcgaagatgatatcagaccaccaactccggatgtaaaagagagtcaacctgagtttgttgaatggaaggaggaagaagctgaacctggtgatattgccgagaaggataccgcagttcctgatattgaggttgaaaatgagaagcagctggattccatggatgatgttatgctttgcgatgcaaagttaggagaggaaaagaagagtgatgagcttggcatatgaagtgaatttcagaggagcagaatttcagaggaagcacttggaactggtcagaccattattgcacaagcagtctgaggatcatatgtgagttctctgttgtacacttgaaggtggtcccggaccgtgcatctgatggagcctcaaagattcaacttgtctgatggatagatgtgtaacatgatttggtggtggttattgttatgtgcctatagtctgggctacatcgagacgcaaaattctgaaagtagtcttccttgtcctttcggggttctagttgtgacccaggtaaataactgataggtgaataggtgatgctatttgtacgaaaattttggctcaaatgcagtcgattgttggcatatttagaacttgtttcaaatttgtgtaaactaaagaatatagtttctatttttttccaggtacttaatgcataattcatttgttataatataaacgacctttggtacatgtcaca

SEQ ID NO: 24018 - DNA, 3145 bp, Zea Mays
tagacgaagccttctcgttagattattctccccaaagtcgctccctgcctctcctccatctcagcctcgcgatcgaaccctcgccctcttgcttcccttcccccacctccgcctccgcgccgttccgtcctcccactcctcatctcgcgattggcaaattctagggtttcgcggcggccacccggatccagctcggcttcgcgagcgcctctaaagcttcaggtcacgagagggcgctttgctctctccctgtcccgccctcaccgcggccgccgccacgacgacgacgacctgcggtgcgcctgtgcctgggttcggatcgtccggcgcctctccgttggccactggataccagctcatgatgtggaaatctcagctctaaatccgcttgggttgtgatatcgtgacagtgtgggtactgacataactggcactgtgcaagatgttttggcatgtgccgggactctccgctgcatcaccggttgatactattttggacaaggaaaattttaagttggaatgtcttcttgatgaggatgaaataattcaggagtgcaaagcactgaatacccgcttaatcaattttttgcgggacaaggttcaagtggaacaattactccgctacattgtagaggaggctcctgaagatgcagaaaagaaaaggatatttagatttccgtttatagcttgtgaaatatttacatgtgaagtggatgtcatcatgaagacattagtggaggatgaagatttgtgatctctgtgcagcttatgaatttacttttctccttcctgaaacctgaccacccccatgggacattgtcggctggttactttgccaaggtagtgatttgcttgatgatcaggaagacactcccactagttagttatgtgcagggccatcctgaaatagttagccaacttgtcgatcttattgggattacttctatcatggaggttttgattcgcttaatcggtgcagatgaaactatgtattcaagctatgcagattctatgcaatggttagatgacatacaagtccttgagatgattgttgacaagttcagcacatcagattctcctgaggttcatgcaaatgctgctgaaatcctttgtgcagtaactagatatgcccctccagcacttgctgcaaagatttccagtccaagctttgtggggagattatttcaacatgcttttgaagattcaaggccaaaatcggtgctggtccactcattatcagtgtgcatatcgttgttagatcctaagagacttgtatcggcttcctatcaggctttccgtagtcagttgagccatggaacacttgtcaccgcaagtccagagacagtaaatggcatgctggatagcctaggggatttattgaagctgctggatgtttcatctgctgaaaatgttctgccaacaacatacggtagcttacaacctccactcgggaaacatcgcttgaagattgttgagttcatctctgttcttctatcaattggtagtgcagctgccgaaacacgactgattcaactaggagcaatcaagcatgctatagatctattttttgagtacccgtttaacaacttcttgcaccaccatgtcgagaatatcatcggctcatgtttggagagtaagcaggatcgactgattggccatgtccttgatgactgtaaacttgttacaagaattctggaagcagagaagaactctgctctgtcgtcagatttaactaagcatactatgtcttcagagggaagatctcccccaaggataggaattgttggtcatatgacacggatagctaacaggctccttcagctggtcaacacaaacatcatggttcaatcacatttgcagcaaaattctgattggattgagtggcatgccagtaccctgacgaagcgtaatgcattagaaaatgtttaccagtgggcttgcggtcgaccaacatcactgcaggatcgtggtagggatagcgatgatgaagacttccgagatagggactacgatgtggctgcacttgctagcaatttaagccaagcatttaaatatggtatttacagtagtgaggatattgacgaggctcaagcatcacttgagcgggatgatgaggatgtatattttgatgatgaatctgcagaggttgtaatctcctcccttcgccttggagacgaccaagaaagtggttcgctctttacaaattccaattggtttgcatttgacgaggacaaggcactgaatgatggtttggttagctcagaagcatccccatctccaaattcggaaatatccgcactaaaagaggatgatgaacatgatgaagtcattcttggcgaaattatagatgaaataaaaggttctgaaccaactctaccagtcttcaacaaagatgcaaacaaagaatctggttccaccggcttggcaaatggtaccgttgacaaattcgaagatgatatcagaccaccaactccggatgtaaaagagagtcaacctgagtttgttgaatggaaggaggaagaagctgaacctggtgatattgccgagaaggataccgcagttcctgatattgaggttgaaaatgagaagcagctggattccatggatgatgttatgctttgcgatgcaaagttaggagaggaaaagaagagtgatgagcttggcatatgaagtgaatttcagaggagcagaatttcagaggaagcacttggaactggtcagaccattattgcacaagcagtctgaggatcatatgtgagttctctgttgtacacttgaaggtggtcccggaccgtgcatctgatggagcctcaaagattcaacttgtctgatggatagatgtgtaacatgatttggtggtggttattgttatgtgcctatagtctgggctacatcgagacgcaaaattctgaaagtagtcttccttgtcctttcggggttctagttgtgacccaggtaaataactgataggtgaataggtgatgctatttgtacgaaaattttggctcaaatgcagtcgattgttggcatatttagaacttgtttcaaatttgtgtaaactaaagaatatagtttctatttttttccaggtacttaatgcataattcatttgttataatataaacgacctttggtacatgtcaca

SEQ ID NO: 24019 - DNA, 3066 bp, Zea Mays
gtcgcatctagacgaagccttctcgttagattattctccccaaagtcgctccctgcctctcctccatctcagcctcgcgatcgaaccctcgccctcttgcttcccttcccccacctccgcctccgcgccgttccgtcctcccactcctcatctcgcgattggcaaattctagggtttcgcggcggccacccggatccagctcggcttcgcgagcgcctctaaagcttcaggtcacgagagggcgctttgctctctccctgtcccgccctcaccgcggccgccgccacgacgacgacgacctgcggtgcgcctgtgcctgggttcggatcgtccggcgcctctccgttggccactggataccagctcatgatgtggaaatctcagctctaaatccgcttgggttgtgatatcgtgacagtgtgggtactgacataactggcactgtgcaagatgttttggcatgtgccgggactctccgctgcatcaccggttgatactattttggacaaggaaaattttaagttggaatgtcttcttgatgaggatgaaataattcaggagtgcaaagcactgaatacccgcttaatcaattttttgcgggacaaggttcaagtggaacaattactccgctacattgtagaggaggctcctgaagatgcagaaaagaaaaggatatttagatttccgtttatagcttgtgaaatatttacatgtgaagtggatgtcatcatgaagacattagtggaggatgaagatcttatgaatttacttttctccttcctgaaacctgaccacccccatgggacattgtcggctggttactttgccaaggtagtgatttgcttgatgatcaggaagacactcccactagttagttatgtgcagggccatcctgaaatagttagccaacttgtcgatcttattgggattacttctatcatggaggttttgattcgcttaatcggtgcagatgaaactatgtattcaagctatgcagattctatgcaatggttagatgacatacaagtccttgagatgattgttgacaagttcagcacatcagattctcctgaggttcatgcaaatgctgctgaaatcctttgtgcagtaactagatatgcccctccagcacttgctgcaaagatttccagtccaagctttgtggggagattatttcaacatgcttttgaagattcaaggccaaaatcggtgctggtccactcattatcagtgtgcatatcgttgttagatcctaagagacttgtatcggcttcctatcaggctttccgtagtcagttgagccatggaacacttgtcaccgcaagtccagagacagtaaatggcatgctggatagcctaggggatttattgaagctgctggatgtttcatctgctgaaaatgttctgccaacaacatacggtagcttacaacctccactcgggaaacatcgcttgaagattgttgagttcatctctgttcttctatcaattggtagtgcagctgccgaaacacgactgattcaactaggagcaatcaagcatgctatagatctattttttgagatcgactgattggccatgtccttgatgactgtaaacttgttacaagaattctggaagcagagaagaactctgctctgtcgtcagatttaactaagcatactatgtcttcagagggaagatctcccccaaggataggaattgttggtcatatgacacggatagctaacaggctccttcagctggtcaacacaaacatcatggttcaatcacatttgcagcaaaattctgattggattgagtggcatgccagtaccctgacgaagcgtaatgcattagaaaatgtttaccagtgggcttgcggtcgaccaacatcactgcaggatcgtggtagggatagcgatgatgaagacttccgagatagggactacgatgtggctgcacttgctagcaatttaagccaagcatttaaatatggtatttacagtagtgaggatattgacgaggctcaagcatcacttgagcgggatgatgaggatgtatattttgatgatgaatctgcagaggttgtaatctcctcccttcgccttggagacgaccaagaaagtggttcgctctttacaaattccaattggtttgcatttgacgaggacaaggcactgaatgatggtttggttagctcagaagcatccccatctccaaattcggaaatatccgcactaaaagaggatgatgaacatgatgaagtcattcttggcgaaattatagatgaaataaaaggttctgaaccaactctaccagtcttcaacaaagatgcaaacaaagaatctggttccaccggcttggcaaatggtaccgttgacaaattcgaagatgatatcagaccaccaactccggatgtaaaagagagtcaacctgagtttgttgaatggaaggaggaagaagctgaacctggtgatattgccgagaaggataccgcagttcctgatattgaggttgaaaatgagaagcagctggattccatggatgatgttatgctttgcgatgcaaagttaggagaggaaaagaagagtgatgagcttggcatatgaagtgaatttcagaggagcagaatttcagaggaagcacttggaactggtcagaccattattgcacaagcagtctgaggatcatatgtgagttctctgttgtacacttgaaggtggtcccggaccgtgcatctgatggagcctcaaagattcaacttgtctgatggatagatgtgtaacatgatttggtggtggttattgttatgtgcctatagtctgggctacatcgagacgcaaaattctgaaagtagtcttccttgtcctttcggggttctagttgtgacccaggtaaataactgataggtgaataggtgatgctatttgtacgaaaattttggctcaaatgcagtcgattgttggcatatttagaacttgtttcaaatttgtgtaaactaaagaatatagtttctatttttttccaggtacttaatgcataattcatttgttataatataaacgacctttggtacatgtcaca

SEQ ID NO: 24020 - DNA, 3207 bp, Zea Mays
gacaagagaggcaaccgtatatacccgcacccggatcgagactcccaccccagtccagctccccatgtcgcatctagacgaagccttctcgttagattattctccccaaagtcgctccctgcctctcctccatctcagcctcgcgatcgaaccctcgccctcttgcttcccttcccccacctccgcctccgcgccgttccgtcctcccactcctcatctcgcgattggcaaattctagggtttcgcggcggccacccggatccagctcggcttcgcgagcgcctctaaagcttcaggtcacgagagggcgctttgctctctccctgtcccgccctcaccgcggccgccgccacgacgacgacgacctgcggtgcgcctgtgcctgggttcggatcgtccggcgcctctccgttggccactggataccagctcatgatgtggaaatctcagctctaaatccgcttgggttgtgatatcgtgacagtgtgggtactgacataactggcactgtgcaagatgttttggcatgtgccgggactctccgctgcatcaccggttgatactattttggacaaggaaaattttaagttggaatgtcttcttgatgaggatgaaataattcaggagtgcaaagcactgaatacccgcttaatcaatttcgcagtttgcgggacaaggttcaagtggaacaattactccgctacattgtagaggaggctcctgaagatgcagaaaagaaaaggatatttagatttccgtttatagcttgtgaaatatttacatgtgaagtggatgtcatcatgaagacattagtggaggatgaagatcttatgaatttacttttctccttcctgaaacctgaccacccccatgggacattgtcggctggttactttgccaaggtagtgatttgcttgatgatcaggaagacactcccactagttagttatgtgcagggccatcctgaaatagttagccaacttgtcgatcttattgggattacttctatcatggaggttttgattcgcttaatcggtgcagatgaaactatgtattcaagctatgcagattctatgcaatggttagatgacatacaagtccttgagatgattgttgacaagttcagcacatcagattctcctgaggttcatgcaaatgctgctgaaatcctttgtgcagtaactagatatgcccctccagcacttgctgcaaagatttccagtccaagctttgtggggagattatttcaacatgcttttgaagattcaaggccaaaatcggtgctggtccactcattatcagtgtgcatatcgttgttagatcctaagagacttgtatcggcttcctatcaggctttccgtagtcagttgagccatggaacacttgtcaccgcaagtccagagacagtaaatggcatgctggatagcctaggggatttattgaagctgctggatgtttcatctgctgaaaatgttctgccaacaacatacggtagcttacaacctccactcgggaaacatcgcttgaagattgttgagttcatctctgttcttctatcaattggtagtgcagctgccgaaacacgactgattcaactaggagcaatcaagcatgctatagatctattttttgagtacccgtttaacaacttcttgcaccaccatgtcgagaatatcatcggctcatgtttggagagtaagcaggatcgactgattggccatgtccttgatgactgtaaacttgttacaagaattctggaagcagagaagaactctgctctgtcgtcagatttaactaagcatactatgtcttcagagggaagatctcccccaaggataggaattgttggtcatatgacacggatagctaacaggctccttcagctggtcaacacaaacatcatggttcaatcacatttgcagcaaaattctgattggattgagtggcatgccagtaccctgacgaagcgtaatgcattagaaaatgtttaccagtgggcttgcggtcgaccaacatcactgcaggatcgtggtagggatagcgatgatgaagacttccgagatagggactacgatgtggctgcacttgctagcaatttaagccaagcatttaaatatggtatttacagtagtgaggatattgacgaggctcaagcatcacttgagcgggatgatgaggatgtatattttgatgatgaatctgcagaggttgtaatctcctcccttcgccttggagacgaccaagaaagtggttcgctctttacaaattccaattggtttgcatttgacgaggacaaggcactgaatgatggtttggttagctcagaagcatccccatctccaaattcggaaatatccgcactaaaagaggatgatgaacatgatgaagtcattcttggcgaaattatagatgaaataaaaggttctgaaccaactctaccagtcttcaacaaagatgcaaacaaagaatctggttccaccggcttggcaaatggtaccgttgacaaattcgaagatgatatcagaccaccaactccggatgtaaaagagagtcaacctgagtttgttgaatggaaggaggaagaagctgaacctggtgatattgccgagaaggataccgcagttcctgatattgaggttgaaaatgagaagcagctggattccatggatgatgttatgctttgcgatgcaaagttaggagaggaaaagaagagtgatgagcttggcatatgaagtgaatttcagaggagcagaatttcagaggaagcacttggaactggtcagaccattattgcacaagcagtctgaggatcatatgtgagttctctgttgtacacttgaaggtggtcccggaccgtgcatctgatggagcctcaaagattcaacttgtctgatggatagatgtgtaacatgatttggtggtggttattgttatgtgcctatagtctgggctacatcgagacgcaaaattctgaaagtagtcttccttgtcctttcggggttctagttgtgacccaggtaaataactgataggtgaataggtgatgctatttgtacgaaaattttggctcaaatgcagtcgattgttggcatatttagaacttgtttcaaatttgtgtaaactaaagaatatagtttctatttttttccaggtacttaatgcataattcatttgttataatataaacgacctttggtacatgtcaca

SEQ ID NO: 24021 - DNA, 3069 bp, Zea Mays
tgacaagagaggcaaccgtatatacccgcacccggatcgagactcccaccccagtccagctccccatgtcgcatctagacgaagccttctcgttagattattctccccaaagtcgctccctgcctctcctccatctcagcctcgcgatcgaaccctcgccctcttgcttcccttcccccacctccgcctccgcgccgttccgtcctcccactcctcatctcgcgattggcaaattctagggtttcgcggcggccacccggatccagctcggcttcgcgagcgcctctaaagcttcaggtcacgagagggcgctttgctctctccctgtcccgccctcaccgcggccgccgccacgacgacgacgacctgcggtgcgcctgtgcctgggttcggatcgtccggcgcctctccgttggccactggataccagctcatgatgtggaaatctcagctctaaatccgcttgggttgtgatatcgtgacagtgtgggtactgacataactggcactgtgcaagatgttttggcatgtgccgggactctccgctgcatcaccggttgatactattttggacaaggaaaattttaagttggaatgtcttcttgatgaggatgaaataattcaggagtgcaaagcactgaatacccgcttaatcaattttttgcgggacaaggttcaagtggaacaattactccgctacattgtagaggaggctcctgaagatgcagaaaagaaaaggatatttagatttccgtttatagcttgtgaaatatttacatgtgaagtggatgtcatcatgaagacattagtggaggatgaagatcttatgaatttacttttctccttcctgaaacctgaccacccccatgggacattgtcggctggttactttgccaaggtagtgatttgcttgatgatcaggaagacactcccactagttagttatgtgcagggccatcctgaaatagttagccaacttgtcgatcttattgggattacttctatcatggaggttttgattcgcttaatcggtgcagatgaaactatgtattcaagctatgcagattctatgcaatggttagatgacatacaagtccttgagatgattgttgacaagttcagcacatcagattctcctgaggttcatgcaaatgctgctgaaatcctttgtgcagtaactagatatgcccctccagcacttgctgcaaagatttccagtccaagctttgtggggagattatttcaacatgcttttgaagattcaaggccaaaatcggtgctggtccactcattatcagtgtgcatatcgttgttagatcctaagagacttgtatcggcttcctatcaggctttccgtagtcagttgagccatggaacacttgtcaccgcaagtccagagacagtaaatggcatgctggatagcctaggggatttattgaagctgctggatgtttcatctgctgaaaatgttctgccaacaacatacggtagcttacaacctccactcgggaaacatcgcttgaagattgttgagttcatctctgttcttctatcaattggtagtgcagctgccgaaacacgactgattcaactaggagcaatcaagcatgctatagatctattttttgagtacccgtttaacaacttcttgcaccaccatgtcgagaatatcatcggctcatgtttggagagtaagcaggatcgactgattggccatgtccttgatgactgtaaacttgttacaagaattctggaagcagagaagaactctgctctgtcgtcagatttaactaagcatactatgtcttcagagggaagatctcccccaaggataggaattgttggtcatatgacacggatagctaacaggctccttcagctggtcaacacaaacatcatggttcaatcacatttgcagcaaaattctgattggattgagtggcatgccagtaccctgacgaagcgtaatgcattagaaaatgtttaccagtgggcttgcggtcgaccaacatcactgcaggatcgtggtagggatagcgatgatgaagacttccgagatagggactacgatgtggctgcacttgctagcaatttaagccaagcatttaaatatggtatttacagtagtgaggatattgacgaggctcaagcatcacttgagcgggatgatgaggatgtatattttgatgatgaatctgcagaggttgtaatctcctcccttcgccttggagacgaccaagaaagtggttcgctctttacaaattccaattggtttgcatttgacgaggacaaggcactgaatgatggtttggttagctcagaagcatccccatctccaaattcggaaatatccgcactaaaagaggatgatgaacatgatgaagtcattcttggcgaaattatagatgaaataaaaggttctgaaccaactctaccagtcttcaacaaagatgcaaacaaagaatctggttccaccggcttggcaaatggtaccgttgacaaattcgaagatgatatcagaccaccaactccggatgtaaaagagagtcaacctgagtttgttgaatggaaggaggaagaagctgaacctggtgatattgccgagaaggataccgcagttcctgatattgaggttgaaaatgagaagcagctggattccatggatgatgttatgctttgcgatgcaaagttaggagaggaaaagaagagtgatgagcttggcatatgaagtgaatttcagaggagcagaatttcagaggaagcacttggaactggtcagaccattattgcacaagcagtctgaggatcatatgtgagttctctgttgtacacttgaaggtggtcccggaccgtgcatctgatggagcctcaaagattcaacttgtctgatggatagatgtgtaacatgatttggtggtggttattgttatgtgcctatagtctgggctacatcgagacgcaaaattctgaaagtagtcttccttgtcctttcggggttctagttgtgacccaggtacttaatgcataattcatttgttataatataaacgacctttggtacatgtcaca

SEQ ID NO: 24022 - DNA, 1958 bp, Zea Mays
cgaagccttctcgttagattattctccccaaagtcgctccctgcctctcctccatctcagcctcgcgatcgaaccctcgccctcttgcttcccttcccccacctccgcctccgcgccgttccgtcctcccactcctcatctcgcgattggcaaattctagggtttcgcggcggccacccggatccagctcggcttcgcgagcgcctctaaagcttcaggtcacgagagggcgctttgctctctccctgtcccgccctcaccgcggccgccgccacgacgacgacgacctgcggtgcgcctgtgcctgggttcggatcgtccggcgcctctccgttggccactggataccagctcatgatgtggaaatctcagctctaaatccgcttgggttgtgatatcgtgacagtgtgggtactgacataactggcactgtgcaagatgttttggcatgtgccgggactctccgctgcatcaccggttgatactattttggacaaggaaaattttaagttggaatgtcttcttgatgaggatgaaataattcaggagtgcaaagcactgaatacccgcttaatcaattttttgcgggacaaggttcaagtggaacaattactccgctacattgtagaggaggctcctgaagatgcagaaaagaaaaggatatttagatttccgtttatagcttgtgaaatatttacatgtgaagtggatgtcatcatgaagacattagtggaggatgaagatcttatgaatttacttttctccttcctgaaacctgaccacccccatgggacattgtcggctggttactttgccaaggtagtgatttgcttgatgatcaggaagacactcccactagttagttatgtgcagggccatcctgaaatagttagccaacttgtcgatcttattgggattacttctatcatggaggttttgattcgcttaatcggtgcagatgaaactatgtattcaagctatgcagattctatgcaatggttagatgacatacaagtccttgagatgattgttgacaagttcagcacatcagattctcctgaggttcatgcaaatgctgctgaaatcctttgtgcagtaactagatatgcccctccagcacttgctgcaaagatttccagtccaagctttgtggggagattatttcaacatgcttttgaagattcaaggccaaaatcggtgctggtccactcattatcagtgtgcatatcgttgttagatcctaagagacttgtatcggcttcctatcaggctttccgtagtcagttgagccatggaacacttgtcaccgcaagtccagagacagtaaatggcatgctggatagcctaggggatttattgaagctgctggatgtttcatctgctgaaaatgttctgccaacaacatacggtagcttacaacctccactcgggaaacatcgcttgaagattgttgagttcatctctgttcttctatcaattggtagtgcagctgccgaaacacgactgattcaactaggagcaatcaagcatgctatagatctattttttgagtacccgtttaacaacttcttgcaccaccatgtcgagaatatcatcggctcatgtttggagagtaagcaggatcgactgattggccatgtccttgatgactgtaaacttgttacaagaattctggaagcagagaagaactctgctctgtcgtcagatttaactaagcatactatgtcttcagagggaagatctcccccaaggataggaattgttggtcatatgacacggatagctaacaggctccttcagctggtcaacacaaacatcatggttcaatcacatttgcagcaaaattctgattggattgagtggcatgccagtaccctgacgaagcgtaatgcattagaaaatgtttaccagtgggcttgcggagtttccctcatgttgcgctatcggcttggtccaga

SEQ ID NO: 24023 - DNA, 1472 bp, Zea Mays
gaagccttctcgttagattattctccccaaagtcgctccctgcctctcctccatctcagcctcgcgatcgaaccctcgccctcttgcttcccttcccccacctccgcctccgcgccgttccgtcctcccactcctcatctcgcgattggcaaattctagggtttcgcggcggccacccggatccagctcggcttcgcgagcgcctctaaagcttcaggtcacgagagggcgctttgctctctccctgtcccgccctcaccgcggccgccgccacgacgacgacgacctgcggtgcgcctgtgcctgggttcggatcgtccggcgcctctccgttggccactggataccagctcatgatgtggaaatctcagctctaaatccgcttgggttgtgatatcgtgacagtgtgggtactgacataactggcactgtgcaagatgttttggcatgtgccgggactctccgctgcatcaccggttgatactattttggacaaggaaaattttaagttggaatgtcttcttgatgaggatgaaataattcaggagtgcaaagcactgaatacccgcttaatcaattttttgcgggacaaggttcaagtggaacaattactccgctacattgtagaggaggctcctgaagatgcagaaaagaaaaggatatttagatttccgtttatagcttgtgaaatatttacatgtgaagtggatgtcatcatgaagacattagtggaggatgaagatcttatgaatttacttttctccttcctgaaacctgaccacccccatgggacattgtcggctggttactttgccaagggccatcctgaaatagttagccaacttgtcgatcttattgggattacttctatcatggaggttttgattcgcttaatcggtgcagatgaaactatgtattcaagctatgcagattctatgcaatggttagatgacatacaagtccttgagatgattgttgacaagttcagcacatcagattctcctgaggttcatgcaaatgctgctgaaatcctttgtgcagtaactagatatgcccctccagcacttgctgcaaagatttccagtccaagctttgtggggagattatttcaacatgcttttgaagattcaaggccaaaatcggtgctggtccactcattatcagtgtgcatatcgttgttagatcctaagagacttgtatcggcttcctatcaggctttccgtagtcagttgagccatggaacacttgtcaccgcaagtccagagacagtaaatggcatgctggatagcctaggggatttattgaagctgctggatgtttcatctgctgaaaatgttctgccaacaacatacggtagcttacaacctccactcgggaaacatcgcttgaagattgttgagttcatctctgttcttctatcaattggtagtgcagctgccgaaacacgactgattcaactaggagcaatcaag

SEQ ID NO: 24024 - DNA, 2477 bp, Zea Mays
cctacttgtctagtagcaactagcagtaggcactaggcagtagactttagctctgatgatgaatggaggggtaaaaaaacgcgaggcaggcaggccatcgtgttgctagatctcagctgtaccagtgcctcttcctgctatctggtcactggtattttgaccactggtgcccactgcccagacccggtgctcgccttctcccctcccctcaatctccagcctctctttctcgctcgctggccacccgccgcaccctccccatcaggccagcagcgaggaagaatggagtacgagaggattcatcagaaagcccagcctggtgctctttctccaacaaagctgaggatgaagatcctgggagcccacaatcgagttagagtcatcaccagcaactcgtcatcgcggacgtcgcctgcgaaaaccatcgaggcttcacaggcgcagaacaggctactagtttgtgatgttcttgaagaagacagcgcagatagcacaaaacacccgtcggcaactaacaaaaccgaagccgtagaaaaggttcaaaaggatccagcagtggacatcagtcaagtgcagaacgcttccaccagttcggctgctaagccagcgacaggcagctcgagtatgatacagatacacccactgagacccgcggaagaagacagcactaccgaatgcgacagtggtctcgacaacgccagcactagcagcttcgagttccacggagtggagaaggcggcggcgacgcagaatccagcagccgggtacttgtccaggcagacttccatttcctccaagtggaatgacgcagagaaatggatcgtgagccgccagaatgtcagtcagaagaacaacgtcgccaagggcgcgttgcagaaccagacagtaaaccagatgagctccgccgcagccaggggcgccgttgtgcccaaaatctctgctcgtcccgtgcagaaaatgaagagagtgaatccagctttgtctgctccgcgcagcatactggagaggttgtccttcgcttcgtatcagcctaagttggttaggcatgcagatgtctgtccagttagtaacgctggtgctaactcagagcatcacaaggcaactgatactggttcatcgattgaagtgaagccctgcaacgatacgaatgatattccaacagtccagtcgtcggtgtccgtgagagatgtgggcacagagatgactccaatacctagccaggaaccttcaagaactggaactccactagggtcaaggacaccaactcgaagccctaactgttcagtaccgtcaacacctgtaggggggaggtcaatagcatctcctcctggagaagactgcacagacgatggcccatttttccacaggaaatgcggcgtacatgcaaatgaattgtcagatactgagacgaggcttaaaacaaggcaagaaatcgctgcgcttggcatacagctaggaaagatgaacattgctacgtgggccagcaaagaggagctagagctagtctctgcggcaccgagcatcgctgatttggagcgcatcaggaaggaatatgctgctcgtgctgcatcgtatgaggaggcagaaaatactaaacatacagcaaggtattattattctccgaaatatttgatcatttctgtttgttagtccaggccttctgaatcaggcctgcgtgcctggctggaaacactgtttgttagtccagtaggttgcgcaacatgttcaactgcatgtctcgtttaagtctgatttgtaatcctgctatgctactttaacctctgctgtatttctattatgaaagtaatagaaatggggaacccccttataaaagaaatgatcattctcgtattgttcatttcaacatgtaacggagattgtatttcctcagattcaaaaaagaagaggtgaagattgaagcttgggagggtcgtcaaagagcaaaaattgaatatgaaatgagaagaatagaggaatttgctgagagaatgagaagtgaggccatggaaaagatggccgaaaagctagagatgacgcgccgcatagccgaagagaaacgagcttcggccaacgccaaaatgaaccagcaagcagctatagcggttcagaaggccgagaagattcgccaaacgggacgagtcccaggatcgagtatcctacgctgcggtggctgcttctgtggaccgtagtagatcatacataggattcgacagctagtatgttggtctgggatatatagtggtgggaaacctgaactccaccctctacaagtcagcattccttgattttagcatgaaaaaaggaatgtctctaaggtattcagatgcaaacgtgttcttgtttgtcatgtatgtaaattattccaatgattttaacttgggtcggtgtacaaggtaaccagctgttcgttggttaacgaagaagtcacgaatcgttcaaacattatgtttattattatgcctaaaattctaaccgta

SEQ ID NO: 24025 - DNA, 477 bp, Zea Mays
agaaaccatgccgcatgggtatagttgattggttggagatagtgaaagaagtgcaagtacttttatcattgtctgtgatggtctccaaaagagaccaagatataggatgcaaaagcgaagcgggtgcagaagtgcgtggagacgctggacgtgctcaaggtgtccaacgcgcggctgcaggcggtggtggtgacgaccaaatgggagacgttcgacgcggcggccaccacgacgaagtgggagctcttcgactgagatctgtgcagtgcagcagggcactgcagccaagaggatacgtgtatacgtgcatggtgttttatttccttgtctctcccggttttatttggtgcacattattgaattcgcgcgttgtaatcaatcatgtacggtgagacgacgacgctaggttagaacatgctataagggccgatcgaaacgaccccactgttaaccgtttgtaatcacagcaccactccc

SEQ ID NO: 24026 - DNA, 421 bp, Zea Mays
caccagctctgtttctgacgatgatatatcctctctgcaaagggtgtgcccttattaggcgaagcgggtgcagaagtgcgtggagacgctggacgtgctcaaggtgtccaacgcgcggctgcaggcggtggtggtgacgaccaaatgggagacgttcgacgcggcggccaccacgacgaagtgggagctcttcgactgagatctgtgcagtgcagcagggcactgcagccaagaggatacgtgtatacgtgcatggtgttttatttccttgtctctcccggttttatttggtgcacattattgaattcgcgcgttgtaatcaatcatgtacggtgagacgacgacgctaggttagaacatgctataagggccgatcgaaacgaccccactgttaaccgtttgtaatcacagcaccactccc

SEQ ID NO: 24027 - DNA, 1071 bp, Zea Mays
gtcatttcaacgtttcagcgggaaaacaatttatgattttagccttgtacatgtatgagaaggatgatggtttgcctcgatcaaagctggactcaaaactccgtatcaggggaagagcacctggcctcgcgggggctaatcacaaataccaagcaccagcagcgtggggtttattttgtaaaatcgtgggaaccattgatttcggaatgtacgcatcagatagaacttgtgcaccagggatggtttctgcacccgatacgctgcaaacaaaacgagagcgaagcgaagaagcgcgtcttccacgggcagctgaagaagctgctggcgccgaggacggggctgcagccggcggaccagcagctgagctaccggggcagggcgcggggcaacgccgagtacctggacgcatgcggcgtcaagaacaagtccaaggtggcgctcgccgaggaccccgccagcgtcgagcgccgctacatcgagcgccagaggaacgccacggccgagagcgccaaccgcgccatcggcgccgtcgcgctcgaggtggacaagctcgccgatcaggtaactagcatcgagaaatcgatttccagagggaacaaggtgccggaggtgcagatcacgacgctgatcgagctgctgatgcggcacgcggtgaagctggagagcatacctgcggccggggactcctcttcgcagaagaacattcaggcgaagcgggtgcagaagtgcgtggagacgctggacgtgctcaaggtgtccaacgcgcggctgcaggcggtggtggtgacgaccaaatgggagacgttcgacgcggcggccaccacgacgaagtgggagctcttcgactgagatctgtgcagtgcagcagggcactgcagccaagaggatacgtgtatacgtgcatggtgttttatttccttgtctctcccggttttatttggtgcacattattgaattcgcgcgttgtaatcaatcatgtacggtgagacgacgacgctaggttagaacatgctataagggccgatcgaaacgaccccactgttaaccgtttgtaatcacagcaccactccc

SEQ ID NO: 24028 - DNA, 1219 bp, Zea Mays
ctctctctctcactctctctctctctctctctctcttcatgctgtgctcttccaaagtcccaaccatggtcattctagctagcttcgttctcactccaggctccaccacgcacagacaacgagctctgcccccacaggaatcactggagccgagcgagcgtgtataaaaggccggcgcttggtcctccgaagcctgaaccttgaagcgccccgtagtgcagtgcagtgcagcagtgtgctacctcctcagtcctctcactccatcacaaacgctagtcttcctctaaagagatctttggcaacgaccgacagctcggagcgagtctcagaagcgatggcgtccaagaggctgctgctggcggcgctgtgcgtggtggcggcggcgctgctcgccgtgcggtcggaggcccacggcctggaggacttcgcaagcagcgacgcgacgccggagatgcagaccttcttcaagcccgaggccgcggcgctcccggaggccctggacgcgtcctccatgcccgccgccaccatggccgcgaagccggaggccacgtcgatcccgaccaccaccaccggcaccacggcggcggcggcgggcacctccgccgcggcaggcactactgctgcgtcgccgccgcgcaggtccgtgtccgtggccgccggcgtggcctgcggcgtggctgccgtggccgtggtcggcatcgcggccgccgtggcgtacgtggtgcgcggcaggcgcagcagggaggtgcagctcggctcctccccgtgagcacgcgcccagcgccccggcccgctttacagacaggccgtcatcgccattaggatctggttaagcgcgtcgtctagctctgcgatttgtgtggcttttgggttagtggttgaattctttttttcgcgtggggttgtcggtgaagatcacgctaccgggtacggaccagcagtggtgcatgtaacataaataacgctggtggtattagcgtcattgttgttgtggcctgtgtgtatggtgtctagacctttgctatatattttgatttcaggattttgttgttgtattgtatgttggcatgttgccgtgtgagctactagctagctccggacgcctgaactctgtaccttgcttggtggagcctacctaccatgaacatccacgcggcctgtcagagtcccagagatggaacaatgtggcttgatgatgatgattagttgattgattgtt

SEQ ID NO: 24029 - DNA, 1204 bp, Zea Mays
ctctctctctcactctctctctctctctctctctcttcatgctgtgctcttccaaagtcccaaccatggtcattctagctagcttcgttctcactccaggctccaccacgcacagacaacgagctctgcccccacaggccagcaggaatcactggagccgagcgagcgtgtataaaaggccggcgcttggtcctccgaagcctgaaccttgaagcgccccgtagtgcagtgcagtgcagcagtgtgctacctcctcagtcctctcactccatcacaaacgctagtcttcctctaaagctcggagcgagtctcagaagcgatggcgtccaagaggctgctgctggcggcgctgtgcgtggtggcggcggcgctgctcgccgtgcggtcggaggcccacggcctggaggacttcgcaagcagcgacgcgacgccggagatgcagaccttcttcaagcccgaggccgcggcgctcccggaggccctggacgcgtcctccatgcccgccgccaccatggccgcgaagccggaggccacgtcgatcccgaccaccaccaccggcaccacggcggcggcggcgggcacctccgccgcggcaggcactactgctgcgtcgccgccgcgcaggtccgtgtccgtggccgccggcgtggcctgcggcgtggctgccgtggccgtggtcggcatcgcggccgccgtggcgtacgtggtgcgcggcaggcgcagcagggaggtgcagctcggctcctccccgtgagcacgcgcccagcgccccggcccgctttacagacaggccgtcatcgccattaggatctggttaagcgcgtcgtctagctctgcgatttgtgtggcttttgggttagtggttgaattctttttttcgcgtggggttgtcggtgaagatcacgctaccgggtacggaccagcagtggtgcatgtaacataaataacgctggtggtattagcgtcattgttgttgtggcctgtgtgtatggtgtctagacctttgctatatattttgatttcaggattttgttgttgtattgtatgttggcatgttgccgtgtgagctactagctagctccggacgcctgaactctgtaccttgcttggtggagcctacctaccatgaacatccacgcggcctgtcagagtcccagagatggaacaatgtggcttgatgatgatgattagttgattgattgtt

SEQ ID NO: 24030 - DNA, 3462 bp, Zea Mays
ttttttaacgcaactggctggttttcgagataacagtgggggttaagcatggtaaccgaggtgacagtaaaagcgttagaaaaagggtaaaggtaacttgcgagccatttggcactcgagcaccaccccccgggcttatgcacatgggtctccctccctctcccgtccatatccacatatataaatacgccttcccccccccaccgctccaggcctcgcccccccgtgccctcccccgtcccactgacggtggcccccaccgcccggccccgctcgtcggcgagcgccccttccccacgctgcaccgctgtcctgggcttcctgcccaagagatccgcccgactccggtcgctcggaggccggcgagccgcgcgtgctgggcgccgggatgcaggcggccggcgccagccggtggcccggatctcgctggcggcgcgtctcggcgaggtgaggcagctcaattctctcgtgctcacctcttccgtttccgttccaaagcggggtgctgtttttttttgttcttgtctgttattgttatcttttcccttttcactcatcggtttcagagtttgtgcaaaccgtagtggcgagctgccaaacaaactttacttttgctggtggcgtagttccatctggtggaggtctgggctctggagacaatggcagtgaattcgtcggggaaaggttcttgtttccttcctcctttgggaggtggagtgggttggagccagagagtccctgatttttttagtgcattttgttgcagagcagccacatggtatgcgctgttttctgctggctgatggcccgatttccagtttgaataggctggtatttttgccggcatctggtaattattcgctagtttactccctgttcgtagagtgaaggcttttggccttttgccttgcgtctgcaacaaataataatgaataatggaatcagcggggcatcatccgtacattttatatattttttcttctgttttgagataatgcagataacagggatgcgcctagtaaatgcctctccgtgtttctcgcgcgaaacttgtttacgagttaaggcagtatgcgcatcaagctttgttaaatcaggaaaaggtcgagttagcttggtgttgattttgttttaatcttgtcgcatcagttttgttacaattgttgcttagtcatggtaacgactcatcaagtgcttgttcttgtgtggtttattagtttatttgtatggttatggttgattgatatgatattttagctggctgaattaggagtctgccgtgcagcagtattcttgccgccttggcgatactggtatcaacaacgaaagaagagtagttttacctcaaacagaatttctacaagggagtatctttgagatttttagcactgtagtttatgattttagtagattctggatactgcaaagcttcagatcagcaatgaagatattccttagcaagagttcaaatatgaagttgaatgtctcactgtggtctagtatctgccatttgtgtgaaaattatcaaagaacatcatgcatttcctgatagtttgtcccttgattttttccagaggagacctctgaactttctgacctcaagtcctcgattttgtcatagatcagacaaataatggaagagttacaagattgcaactcaagaagcctggttgcccttccgggctctttggttctgcgtctctttaggctgtttggccagcaggatcagagttcatggcagaagtacatactagcttactttctgttggtcaggaatgagtacttctctggggagtcgaagaaacactcagatgtgttctgtgatatttcagaattagatttctttctatatgctacagatttggatagtgaagaacttgaactgaaggagcagaaacccattacgaaggctcaatcaggaggtgattcaagtggcaacagatcgaatgattgctacttccccggccttcatgatgatctgtctcaagactgccttgcttgggcaagcagatcagactacccttccctttcttgtctgaacaaaagattcaatttgttaattaacagtggatatttgtacagactgcgaaggaaatatgacattgttgagcactgggtctatcttgcttgtagcttgatgccctgggaagcatttgatccttcacgaaagcgctggatgaggctaccgagaatgccatgcgacgagtgcttctcctgtgcagacaaggaatcacttgccgtcggaacacagctgcttgtcttcggccgtgaatatactggccttgctatttggatgtacaacttactgactcgcagttggtccccatgcactccaatgaatctgccccgctgcctttttgcctcgggaagctcagagattgggcactgggagactatcccagacatgaacctgcccaggcggctctcttcaggtttcttcatggatggcaagttttatgtcattgggggcgtgtccagtcagagggattcattaacttgtggagaggaatataaccttgaaacaaggacctggagaagaatacttgatatgtaccctggtggaaccagtgcatctcaatcgcctcctcttgttgctgttgtgaataaccagctctacgccgctgaccagtcgacaaatgtggtcaagaagtatgacaaggcaaacaatgcctggaacatactgaagccattgcctgttagagctgactcatccaatggttggggtctagctttcaaagcttgtggcgatcgattgctggtaatcgggggccatagaggacctcgtggcgaggtaatattgctgcattcctggtgccctgaaggtggggaagatggtgctgactgggaggttctctcggtgaaggaacgtgcaggcgtcttcgtttacaactgtgcaataatggggtgctgagttacctttgcttcagtacatgccactggtttagcaagccaaccatttcttgctgccatttagctgccctttataatgacttgtaattcagaaatgacaccccctcccctcatttcgcggagctctcaattgattgaatgttttgtagagagcaaagagcattcagttcagtttacctggaactacttttttttcttcttctgttaaactcgttcagaattctttgttcttgtccagtacgaattttatgcagtattcgttattcatcatttttgcaaagcttgtctgccccattgttctgagacaaatctaaggcctcgattttcaatgcaccgtacttgcgtactggtgttcagagatcttgggtcagctcaaacagttcaggaagatagtcagaagtcagaactttgttgtgtataatacttaaaaatgtactgcatattagccataccttaatattattctgtactgatattcagaaatcttgtagtcagctcaaacagttcagcaaggcagtcagaagtcagaacattgttttgtataaatattcc

SEQ ID NO: 24031 - DNA, 2200 bp, Zea Mays
catatcatgcgcaggggctgaaagcctgaaactgctcaagacgccaccgtcttcctccgcgatcttcagttctctgtctctccctctctctttcctctagctcccaaccaagccaagagtacgtcgtcaagcgcgccgcgcgtgtgtgtgtcagtaggctacagggctcggaggaacgccgtcatgagcttgatcagcatgatggaggcgcggctgccgccggggttccggttccacccgagggacgacgagctcgtgctcgactacctctgccgcaagctctccggcaaaggcggcggcggagcgtacggcggcatcgccatggtcgacgtcgacctcaacaagtgcgagccgtgggatcttccagacgaggcgtgcgtgggcggccgcgagtggtacttcttcagcctgcacgaccgcaagtacgccacggggcagcggaccaaccgcgccacgcgcaccgggtactggaaggccacgggcaaggaccgccccatctccgtctccggccgccgcggggccggcgacaccgccgcgctggtcgggatgcgcaagacgctggtgttctaccagggcagggcgccccgcgggagcaagaccgagtgggtcatgcacgagttccgcgtggacggcccgcccgttgccgaccgccccggctcacctctcctccagctccagctccaggtacgtacgtacgtacacgcccgtttcatgggtgccctcgctcgtccgtccctgtctgcatctgtttcctgtgatttattagagtgcagtattgatgtactaataacaccacgcatgcactttgtcagagagcatgtaaaaaacacctgaattacgtaccaggttgcaaacttctctcgttcaggcagggaactaatgaaatgaagcttctctcgttttgttgaaacattttgcccatcacacacgtctctgttaataactggcagctggaagaagacaacaacaacaacaacaaaaaatgcaatcttttcgatttcgctgaggctagcaatggatcggatcgatcctgctctgaacattccgatgtgataagctagtcgacccggcccacttggcaatcattgcagctgacctggtccgttcccaatgactccaaacctggtacacatcgccaatccgttacaaggtagtaagtagttcagtggttcctttcagtcgccatgcatcagcgccagtgcagtaaacgtccccgtgcatgtatgcctgttctttacacgccaagttggcctttcgttttcatcgatccacgtaaacgtctagcggatgctccagcgcgtgtattcaaccgtacgacgagttccaaacctgccgacgatcgatcaagcaacgagctgctgatgcgttcatcagacaccagagacggagttcagacgtgaggctaggctacccaccaccatagcagtagtgtctgacttttttttttaccccattgcaggaggattgggtcctgtgcagggtgttctacaagagccgaactgccagcacaagaccagcagcaggccccgacgaggccgggccgctgtccagccagctgatcggcggcctgccgatgccgcgaatggccgcccctgctgacgccgcctacctgtccttcgacgtcacacctgccgctggcggctactaccaccaccaagactccggccccgcggacgcgcgccaccacctgccgccgccgccggcgcagcctttcagcaggagtagcctgtccagcttgcgggacttgctcagcagcatggttgaaggcagcgacgccgccgccgccgttcgggagacggagctccacctgcagctggagggctggaccgaggcggcctacgcgcagcagcagggcggcgccatgccggcgcacccgcagcagacgtggagcccgtttctgagctcgggatgacggcacgcggctgggggctcacgtgtgcgtggcgccctggcgcctggcgggcatcgcgtgcgtagtgaatagtcaacaatttgcttgtctttcttgcaatgtaacgttgacttggttagtgcatgcgatctctgccgtttgttaggcgtagggtaaaaacccacgcagcggataggtggaatgccttggtgattattggtgcagtaacttttgtacagttgattgttgcagaaaattactctctctttgtctgccttctaccaaattttcagtagtccttggaattgt

SEQ ID NO: 24032 - DNA, 1310 bp, Zea Mays
cgtttaacgacttggaagagagggcggtaacagtgtcatctccgatgtcctggtggaagtggcggaaggggaagaagaagaagtaagctctgaacccctgatgtgctttcagcagctttggtgattggaacctgttccatctccatctccacccccttcagaagcgtgtgcttcgcaaaattcagacttgcgcacttgattctactggtcctgttgcaccatccatcaccgagaagcgtcagcgatgcaggaattaatatgcgaaaaaaaagggtacagccgcggagatcctagctagctattagaagcagctgactactaactagctggaggcatgccaggcagccagccaaggagccttgcctcactgcgttcgtcaagcttacgatcggatggataccccgcacgaggagcagtgctatctgatgttcttcctgaaactgtttcaagtcgtcgtagcattgcagccttgcagaggagcagaccagaaacggcatcagggagagatctcgcttagggcttgttcgtttcaccgttaatccatgtggattgagtggtattgagtcggtttaaatccatagcaagtcaaaatccatcccaatacattccaatacactccagtccatatggaattggaacaaccgaacaaggccttacgtgtttgacagcgtctgtggtgccgacagacacagatgacgtggatcggttcaggtgtacccatcacgattgtgctacccaaacctgacctgctccagcctccagctgcatctgcactgcacctcggaattttgactttgcccttggacttggacaggcacaggccttcttggtgaaatccgcctctcggactttttccttattccctgaaaaagaccgacatgactatctctctctctctctcgaggacgaggagtaggccggacaaaccgaactgcttatcagtgccaggataagtctgctccgcccgtgtgtgtgctactgaatccgatggcgatagccgctgttggttcgatcgggggagtagactttcccatagaggagccctgggtcttatttttcaggaattggcgttcagacttcagcttcagtgagatggatggaaatcatggaatgctatgctgccctcctcacaacagcgttttaatttgtatgtttgttcctggagcagccttctgagttctgtttttttttcagacatatattatatatatatatatgggtaacaagttggtataacagatctagaaatcttgtaacagctacaacaagttgtcatcttggtacatccaatcatctgaagcagccttaag

SEQ ID NO: 24033 - DNA, 582 bp, Zea Mays
accggattcagagaacatgagggctgaggccacgcgctatttcagcatgtgcttaaattcgtgctcacggtcagtcttatctgaaatttcgcgggagatagaagttgcctcgaggcctcccccccccccccccccccacgtttaacgacttggaagagagggcggtaacagtgtcatctccgatgtcctggtggaagtggcggaaggggaagaagaagaagataagtctgctccgcccgtgtgtgtgctactgaatccgatggcgatagccgctgttggttcgatcgggggagtagactttcccatagaggagccctgggtcttatttttcaggaattggcgttcagacttcagcttcagtgagatggatggaaatcatggaatgctatgctgccctcctcacaacagcgttttaatttgtatgtttgttcctggagcagccttctgagttctgtttttttttcagacatatattatatatatatatatgggtaacaagttggtataacagatctagaaatcttgtaacagctacaacaagttgtcatcttggtacatccaatcatctgaagcagccttaag

SEQ ID NO: 24034 - DNA, 1900 bp, Zea Mays
gagagagagagagagagagagagcaaagggaagtcatcataggtattttgagaacattccatgcatacttgcctggctcgcatttgcctgcgagatcaccaatcaaacaagccacccgtgcttcctgctaccctgctacgctgcacaatcatcctgcggaatttagtaacggcgagttattccaaagttccgatccccaagttgtttattctcctatagtttgtcggtttgtgtggttcagattcctcccgctctcgcgcaagtggtacactgtgtttccagctaccattttctccactaactaattttattttcagtgtctctcgtttcttttatttgcgcgtcaagtttcagccattccttgctcaaaggaaaagtttgagccattccctgggaaggtaggtgagggtactggacaaatccgaaatgcaaatgggcatatgctacatataaccgtaggcttgcttgctactgccagagactcgggtacatggtatcgggttacagtccaaacaggaaattctaaggccgatggaagataaggatatgggtacagtcacccagtcctgccatgacgcgaaagcttatagaaatcaggtggcataaatactgtgcagggctaaaggttggtgggtcgaacggaccaggccatcaggttatctagaaagctctcatgctcttccatttctaggctagcctaggtctggaccagttagagtagacacgcaagtatcaatcgattcataagaggaggaggccattgagggagccaagtagaaggcagtcactgcaaacaacggtatgcattgcaaggaggaaatatagctttcagccgttgcttttcatatgcgtttcagaaagtttgatcatctccctttcgatttttttaaagaaagtttaatcatcattcttgctcagaatcaagttcttagctcttagacacatttagtatcttgttgttagaaagctggtgagcaactttgtcaagcctcaagagctcatggaagatggcagtgctccaagacggtctactccacccacccgcagaagcagatctgccgagttccacaatttttcagaaaggaggagaagggataagatcaacgagaagctgaaagcattacaggagcttcttccaaactgcaacaagaccgacaaagtttcgatgctagacgaagcaatcgactacctaaaatcccttcagctacagcttcagatgctggtcatggggaagggaatgtcaccagtggttcctcttgagctgcagcaatacatgcattacatcacggctgaccctgcccagttgcctccattgcgcccatccggccagcagcaccggcaatttcagataactcaagccaacccccagcgacaatctaacgtcgagtcggatttcttgagccagatgcagaacttgcactcttctgagccgcctcagaactttctcaggccgccgaaattgcaactttatacaccggtatgttgcggcaaagaaaatcaacagtcaaaaggcctacagtactaccacttcaggcccattccgtcaggcagcatgggctagactggtttcagcgaaccattcatagggcacataaaagtcactatagcctggaatctagctccatgctggctctgaacagattgaactcattacacgtgcaaacaggagcagcccgaatctatgacactttggcgtcccgtccggcgtccgggtggtactcatcagaagcagggttctccctttgcttgaacagatcttgcagcacgaatttcagttcgcgtttttgcagcaggcatctagtctcttccacagaccttgctcatcttcagcaaggctgaaagcacgctgtccatgtcaggccggtccgccggatcggacgcggcgcacgacagggccagg

SEQ ID NO: 24035 - DNA, 2001 bp, Zea Mays
gagagagagagagagagagagagcaaagggaagtcatcataggtattttgagaacattccatgcatacttgcctggctcgcatttgcctgcgagatcaccaatcaaacaagccacccgtgcttcctgctaccctgctacgctgcacaatcatcctgcggaatttagtaacggcgagttattccaaagttccgatccccaagttgtttattctcctatagtttgtcggtttgtgtggttcagattcctcccgctctcgcgcaagtggtacactgtgtttccagctaccattttctccactaactaattttattttcagtgtctctcgtttcttttatttgcgcgtcaagtttcagccattccttgctcaaaggaaaagtttgagccattccctgggaaggtaggtgagggtactggacaaatccgaaatgcaaatgggcatatgctacatataaccgtaggcttgcttgctactgccagagactcgggtacatggtatcgggttacagtccaaacaggaaattctaaggccgatggaagataaggatatgggtacagtcacccagtcctgccatgacgcgaaagcttatagaaatcaggtggcataaatactgtgcagggctaaaggttggtgggtcgaacggaccaggccatcaggttatctagaaagctctcatgctcttccatttctaggctagcctaggtctggaccagttagagtagacacgcaagtatcaatcgattcataagaggaggaggccattgagggagccaagtagaaggcagtcactgcaaacaacgtatcttgttgttagaaagctggtgagcaactttgtcaagcctcaagagctcatggaagatggcagtgctccaagacggtctactccacccacccgcagaagcagatctgccgagttccacaatttttcagaaaggaggagaagggataagatcaacgagaagctgaaagcattacaggagcttcttccaaactgcaacaagaccgacaaagtttcgatgctagacgaagcaatcgactacctaaaatcccttcagctacagcttcagatgctggtcatggggaagggaatgtcaccagtggttcctcttgagctgcagcaatacatgcattacatcacggctgaccctgcccagttgcctccattgcgcccatccggccagcagcaccggcaatttcagataactcaagccaacccccagcgacaatctaacgtcgagtcggatttcttgagccagatgcagaacttgcactcttctgagccgcctcagaactttctcaggccgccgaaattgcaactttatacaccgaggggtggcctacccaacacgagccacaacactggatggatttctgggagttcctcgtataacttcatggagtgatgtgctcctaatgacaaaatttgacacggcaggcgtgcagccttgaactcggaagagatcgttcagtttgggacctgcagcatggttcacctgagagaattccatgaatgtgtagtactagttaactagctagctagttgtgttattaaataaaacgttgtgattgtgatgctgctcattttgctatctgaatcttaccgtccaattctcctccatgttcatgcaaaggctgacaggtggcgtctgaatttatctgtgcagcagtatgctactacttgttagattgatcgcatctacctttaactcccgcgttctgatggaggcgtaattaacttatagttgtgaccctcttttacatcaaatatataaataatataatgtacagtataatgtagagtataaatagtgttttgcatatacatgatttgctagccacaacatgagagagtgttttcagggacattattccttctccccaccaataagccattgctgtaaatttgagagacatctgcgttgggactagaattcacattatcatgtctgatgtgattgatggacactgttgtttgcatccaatccaatgagatgaataatat

SEQ ID NO: 24036 - DNA, 1987 bp, Zea Mays
gagagagagagagagagagagagagagcaaagggaagtcatcataggtattttgagaacattccatgcatacttgcctggctcgcatttgcctgcgagatcaccaatcaaacaagccacccgtgcttcctgctaccctgctacgctgcacaatcatcctgcggaatttagtaacggcgagttattccaaagttccgatccccaagttgtttattctcctatagtttgtcggtttgtgtggttcagattcctcccgctctcgcgcaagtggtacactgtgtttccagctaccattttctccactaactaattttattttcagtgtctctcgtttcttttatttgcgcgtcaagtttcagccattccttgctcaaaggaaaagtttgagccattccctgggaaggtaggtgagggtactggacaaatccgaaatgcaaatgggcatatgctacatataaccgtaggcttgcttgctactgccagagactcgggtacatggtatcgggttacagtccaaacaggaaattctaaggccgatggaagataaggatatgggtacagtcacccagtcctgccatgacgcgaaagcttatagaaatcaggtggcataaatactgtgcagggctaaaggttggtgggtcgaacggaccaggccatcaggttatctagaaagctctcatgctcttccatttctaggctagcctaggtctggaccagttagagtagacacgcaagtatcaatcgattcataagaggaggaggccattgagggagccaagtagaaggcagtcactgcaaacaacgctggtgagcaactttgtcaagcctcaagagctcatggaagatggcagtgctccaagacggtctactccacccacccgcagaagcagatctgccgagttccacaatttttcagaaaggaggagaagggataagatcaacgagaagctgaaagcattacaggagcttcttccaaactgcaacaagaccgacaaagtttcgatgctagacgaagcaatcgactacctaaaatcccttcagctacagcttcagatgctggtcatggggaagggaatgtcaccagtggttcctcttgagctgcagcaatacatgcattacatcacggctgaccctgcccagttgcctccattgcgcccatccggccagcagcaccggcaatttcagataactcaagccaacccccagcgacaatctaacgtcgagtcggatttcttgagccagatgcagaacttgcactcttctgagccgcctcagaactttctcaggccgccgaaattgcaactttatacaccgaggggtggcctacccaacacgagccacaacactggatggatttctgggagttcctcgtataacttcatggagtgatgtgctcctaatgacaaaatttgacacggcaggcgtgcagccttgaactcggaagagatcgttcagtttgggacctgcagcatggttcacctgagagaattccatgaatgtgtagtactagttaactagctagctagttgtgttattaaataaaacgttgtgattgtgatgctgctcattttgctatctgaatcttaccgtccaattctcctccatgttcatgcaaaggctgacaggtggcgtctgaatttatctgtgcagcagtatgctactacttgttagattgatcgcatctacctttaactcccgcgttctgatggaggcgtaattaacttatagttgtgaccctcttttacatcaaatatataaataatataatgtacagtataatgtagagtataaatagtgttttgcatatacatgatttgctagccacaacatgagagagtgttttcagggacattattccttctccccaccaataagccattgctgtaaatttgagagacatctgcgttgggactagaattcacattatcatgtctgatgtgattgatggacactgttgtttgcatccaatccaatgagatgaataatat

SEQ ID NO: 24037 - DNA, 1082 bp, Zea Mays
ccctctgcccccctcctgctcggctgctccgcctctgctgcggcgtcgcaatgtcccagtcccagatcgaggcgtacacacgccgggcgggggcggccgtggcgctcgccgcggcgtccgcgctcacgacgggcttccccgcgctcgaaccgcgcgcgcatgtcgtgctggccctgcacgccatcctgctgctcggctgcgctgcggtgctgctctccccggcgcacggagacggaggcccagaggctgcccgggggacgacggtgctgggatcgctgcggtggctcggcttcgccgggatggcgctcagcgcgctccacgtggacgcggaggaggcgccgcggggcacggtcagagatctcctcctcttcctcgtgttcttggcaggagtttggggagtctacctgtccatggtcaggggaaggggggaaggggtgccccggccccgcaaccgcggctggcggtggaagaagatgctaacggcgaggaggccaacgccatgcccatgacgggggatgctcgcgtcgttgttgattcgaagacttggtgctcctactaaaaacgtatcaggaaggaaatagcctctggcatatggcgattgtatcataaataaagaacaggagccacagacagacagtttattagtagctttagctcctctttgtcttaatttggtacactgtgcatcctttgttcagtattttcacacccttttgtacagtactttgtcgaaatgagacctttgtacatcattggtggagtatatgatttgagttccttatatgcagcagtatttgagttttcggagtctttgcttttttgaacctgggcttcggttattttcaatccatatggattggaggggattggtaggggattttgatttaataaggattgaaacccctcaatctccttcaatccatatgaattgggtagaaccgaacaagaccttaaagctcgtggagtgttgaaccctgctctgacgaatcttgaggcagaaagttctctccctgcttaatgcgctgacacgctttcagattgttgatgtcgacttctcgtcgctacagatacgaatagcatat

SEQ ID NO: 24038 - DNA, 1981 bp, Zea Mays
cgcgccccacccggagacctgcacctgcacctgcctgcctccgtctcctcctccttcagttgttgccaccgcccttccctcccttcctctccgcgtcgctcgccgtcccatctttggcctggacacctggcctgcccccccttcgcggacgcgccgggtcgccggccgaatccgccctcccgccgctgccaacgtcgatctgcgcccgcccgcccgcccgccaagtgagattcaaaggtaggacgacgggggggtcgagttcttgtcggtttcattcctggccgccgacttcacatgtcaacaaccccaaggagcagaagccagggtagtaggaccactaggccgtggatcttgtcagacggaagcctaatctcacggggaagattgccgtggctgctgccctcacggtcatgtgcataatcgtgttgaaacagtcccctagtttcagcggtaccagcgtgttctctcgccatgaaactggggtgacccatgtgttagtaacagggggtgctgggtatattggctcacatgctactcttcgtctccttagtgacaagtaccgagttaccattgtggataacctatccagagggaacattggagctgttagagttcttcaacggttatttccagaacccggaaggcttcaatttatttatgctgatttaggcgatgccaaagctgtgaacaaaatattttcggagaacgcatttgatgctgttatgcactttgctgctgttgcttatgttggtgagagcacaatggagccactcaggtactaccacaacataacgtcaaacacattgacagttcttgaggcaatggcagcacataatgtaaatactctgatttactcgagtacgtgtgcaacctatggtgaacctgatacaatgccgattgtagaaacaactcctcagaatcctatcaatccatatggtaaggcaaagaagatggcggaggacatcatcttagattttacaaaatcaaagaagcaatcaaatatggctgtcatgatcttaagatacttcaacgtgattggatcagacccagagggacggctaggagaagctccaaggccagagctacgcgagcatggacggatatccggtgcttgctttgatgcagctttgggaatcattccagggctaaaggttcgtggaaccgattactccactgcagatggaacttgcgttagagactacatcgatgtcacagatcttgtagatgctcacgtaaaagctcttggtaaagctcagccaggcaaagttggaatctacaatgtcggaacaggccaaggtagatcagtgactgagtttgtagaagcttgcaagaaggcaacaggagcttctatcaaggtcgaatatcttgcacgtagacccggagattatgccgaggtatacagcgatccgtcgaaaatccacatggaactcaactggacagcccagtacactgatcttggccaaagcctcgcccaggcgtggaaatggcagaaagcgcacccgaacggatatggaccagcctgattcagagttcaaagattgagagagactcgtcacgcagatccaaagggtccatgtgcagtcatgtagccttcagacagttggttcttcatcaccatagaaagatagcaaagagcaacagaagagtcctgattcttttattgcagcgctcgaagaaggaaaaaatatcacagagaaccccctacctgctccttgattagtttcaaatatatatatataggtcctcgttgacattttaatataatttgatgtgtgctgaggcgctatataataacacaaacgaaattttgttgtagacagggtagatcgatctcgtgtatcaacttttgtggtggtagaatgaaaggatataaataagttgatgtaagtttttgtttccaaacttgtttggagtttacataaggctggttctgccaggttcagccagctgagcttgtgttatgcgcatagtcacagtttcc

SEQ ID NO: 24039 - DNA, 2483 bp, Zea Mays
aacgaaccccacatgtgcgtgatgacccgagacccgaccatgtgattgtctggtagaaatagaaatataaacgcgccccacccggagacctgcacctgcacctgcctgcctccgtctcctcctccttcagttgttgccaccgcccttccctcccttcctctccgcgtcgctcgccgtcccatctttggcctggacacctggcctgcccccccttcgcggacgcgccgggtcgccggccgaatccgccctcccgccgctgccaacgtcgatctgcgcccgcccgcccgcccgccaagtgagattcaaaggtaggacgacgggggggtcgagttcttgtcggtttcattcctggccgccgacttcacatgtcaacaaccccaaggagcagaagccagggtagtaggaccactaggccgtggatcttgtcagggatggactttgctggttccagacggaagcctaatctcacggggaagattgccgtggctgctgccctcacggtcatgtgcataatcgtgttgaaacagtcccctagtttcagcggtaccagcgtggtacgtgcttgaatctctccacaacaactacccatgtcactgccgcttgctgttgagttggcacgacctgtcattattccttcttccagacgacttaagtactctgcttagtttccatggaacatcaacgcgacgctttaatgtttgctgttgtgacttactgctatgtttatgctgttgtgccaggttcatttctgatacatttacgctattatgccagggttattttactgatacatatatgcatcgttcgttcttgatagtcacaaactcacaattccggcacggttgtacagttccagcaatttcctggaagctgttcaaatcatttgcctgcagttctttattactagtttctttaattcttttcggctggaggcatttgttgaagcactcacatttcctgcagttctctcgccatgaaactggggtgacccatgtgttagtaacagggggtgctgggtatattggctcacatgctactcttcgtctccttagtgacaagtaccgagttaccattgtggataacctatccagagggaacattggagctgttagagttcttcaacggttatttccagaacccggaaggcttcaatttatttatgctgatttaggcgatgccaaagctgtgaacaaaatattttcggagaacgcatttgatgctgttatgcactttgctgctgttgcttatgttggtgagagcacaatggagccactcaggtactaccacaacataacgtcaaacacattgacagttcttgaggcaatggcagcacataatgtaaatactctgatttactcgagtacgtgtgcaacctatggtgaacctgatacaatgccgattgtagaaacaactcctcagaatcctatcaatccatatggtaaggcaaagaagatggcggaggacatcatcttagattttacaaaatcaaagaagcaatcaaatatggctgtcatgatcttaagatacttcaacgtgattggatcagacccagagggacggctaggagaagctccaaggccagagctacgcgagcatggacggatatccggtgcttgctttgatgcagctttgggaatcattccagggctaaaggttcgtggaaccgattactccactgcagatggaacttgcgttagagactacatcgatgtcacagatcttgtagatgctcacgtaaaagctcttggtaaagctcagccaggcaaagttggaatctacaatgtcggaacaggccaaggtagatcagtgactgagtttgtagaagcttgcaagaaggcaacaggagcttctatcaaggtcgaatatcttgcacgtagacccggagattatgccgaggtatacagcgatccgtcgaaaatccacatggaactcaactggacagcccagtacactgatcttggccaaagcctcgcccaggcgtggaaatggcagaaagcgcacccgaacggatatggaccagcctgattcagagttcaaagattgagagagactcgtcacgcagatccaaagggtccatgtgcagtcatgtagccttcagacagttggttcttcatcaccatagaaagatagcaaagagcaacagaagagtcctgattcttttattgcagcgctcgaagaaggaaaaaatatcacagagaaccccctacctgctccttgattagtttcaaatatatatatataggtcctcgttgacattttaatataatttgatgtgtgctgaggcgctatataataacacaaacgaaattttgttgtagacagggtagatcgatctcgtgtatcaacttttgtggtggtagaatgaaaggatataaataagttgatgtaagtttttgtttccaaacttgtttggagtttacataaggctggttctgccaggttcagccagctgagcttgtgttatgcgcatagtcacagtttcc

SEQ ID NO: 24040 - DNA, 647 bp, Zea Mays
actggctgagcataaggccaagatgcttgctgggaaaaactcacaccatatcatcgaggcatctttcaaagcgtttgctcgggcccttcgacaggcaacagagtatgacctgcgccgtcaaggcactgtccccagctccaaaggtgtcttgtcgagatcatagcatcgcagtttggacgaacgcatatcttccactgcagcgcacatcaatgagaggaaaacctgcagagtagacagcttggtttttgctgctcacgttgggagcctgcgttagcctctgaacattgctaatgggataatcaagaaccatctagcaactagcaagcaccacttattatctgccttgtgacagtggcatagcgcgtctgctcgctactgcaactctattatctgctcgctggagttacaggatatctgaagattgaaggtctagacatgctgtgagcctgtgactttgtaagctacaccggtcaggaataatgctgcgtctggatcatccgcagaaacataggggtatgtaaattgtttggacattgaagggaatgcattgatctttgcgcgttcagtttctgccaacaaattaacgggagagctgagaaaatacgagccctccaattatctgggaaaagggatggataaagcgcggc

SEQ ID NO: 24041 - DNA, 791 bp, Zea Mays
cccaacacaaaacgaagtcactaatattcaggatctgtctggtcgccctcatttaagctgtggcttagatattcctactcaaagagttggcacatatgatacacagctggttgagcacttcttccaatctgtggtgaacacatctgggatgactcttcacatccgtcagcttgctgggaaaaactcacaccatatcatcgaggcatctttcaaagcgtttgctcgggcccttcgacaggcaacagagtatgacctgcgccgtcaaggcactgtccccagctccaaaggtgtcttgtcgagatcatagcatcgcagtttggacgaacgcatatcttccactgcagcgcacatcaatgagaggaaaacctgcagagtagacagcttggtttttgctgctcacgttgggagcctgcgttagcctctgaacattgctaatgggataatcaagaaccatctagcaactagcaagcaccacttattatctgccttgtgacagtggcatagcgcgtctgctcgctactgcaactctattatctgctcgctggagttacaggatatctgaagattgaaggtctagacatgctgtgagcctgtgactttgtaagctacaccggtcaggaataatgctgcgtctggatcatccgcagaaacataggggtatgtaaattgtttggacattgaagggaatgcattgatctttgcgcgttcagtttctgccaacaaattaacgggagagctgagaaaatacgagccctccaattatctgggaaaagggatggataaagcgcggc

SEQ ID NO: 24042 - DNA, 1431 bp, Zea Mays
cagaaaatgaagcatcaaccagcccaactaataagcaaacctgcttctctacaccacccaaggcccaatagagtccacgcgccctcatctcctccccaacccgttgtccactgcctccaggcaaaccggcagcgccgccgccggcgatgaccaccgcgcggctcgtctcaacatcccccgcccgcctaccctccacgtcggcttccccgattcccagaacctcgctgtgtgttgtcggtcgtgcccctgctttctccgctagggcgctcggcttctcgcttcgtctcaagccgtcgcctgccatggccgccgccggcccccctaccgcgcatggagactcaataggtggatcttctaggattggagaggttaagagggtgaccaaagagacaaatgtgcacgtgaagatcaaccttgatggcactggtgtcgccgagtgtagcacagggataccgttcttggatcacatgctcgatttggcatcacatggactctttgatgtctacgttaaagcaataggcgacacccatattgatgatcatcactcaaatgaggacattgctttggcaattggaacggcactacttgaagcacttggtgatcgaaagggaattaaccgatttggtcattttacagcaccgcttgatgaggcagcggttgaggttatactggatctgtctggtcgccctcatttaagctgtggcttagatattcctactcaaagagttggcacatatgatacacagctggttgagcacttcttccaatctgtggtgaacacatctgggatgactcttcacatccgtcagcttgctgggaaaaactcacaccatatcatcgaggcatctttcaaagcgtttgctcgggcccttcgacaggcaacagagtatgacctgcgccgtcaaggcactgtccccagctccaaaggtgtcttgtcgagatcatagcatcgcagtttggacgaacgcatatcttccactgcagcgcacatcaatgagaggaaaacctgcagagtagacagcttggtttttgctgctcacgttgggagcctgcgttagcctctgaacattgctaatgggataatcaagaaccatctagcaactagcaagcaccacttattatctgccttgtgacagtggcatagcgcgtctgctcgctactgcaactctattatctgctcgctggagttacaggatatctgaagattgaaggtctagacatgctgtgagcctgtgactttgtaagctacaccggtcaggaataatgctgcgtctggatcatccgcagaaacataggggtatgtaaattgtttggacattgaagggaatgcattgatctttgcgcgttcagtttctgccaacaaattaacgggagagctgagaaaatacgagccctccaattatctgggaaaagggatggataaagcgcggc

SEQ ID NO: 24043 - DNA, 1978 bp, Zea Mays
gtccgctgtcgcacacgccctcctgcccctctgctcccctcccagatcccgtgatccgctgccgtgatccgatgccgcacccgccatcaacgccctcctccccctctgctcccctcccagatctcgtgatccgctgcgaggccgccatcaacgccctcctccccctccgctcagctcccctcccaggatctcggcgcgctttcatcgccgccttgatggtccacggctgcacccacatacgacatcgcctgtccgcacgcaagcttctgcctgcgcccacctgtgtgcatagatgtgtgcccccgcccacctcttctgcgcccaatctttacccgtcgtccgcgccgctgttccatcctcgcacccacgcccgagatccacatgtgccgcaccccagccgtgctccggatgctgcaccgcccttccatcctccgcatgcagcaccatgttggccgccgccctgaaacctcgctaccacggagctgcaagcccccgcttccaaaccagcaccatgcagacttccaatttgttttttgtttggagcactgttgattttttctcgtttttttgagaacattacattgcccgtctttcactgttcaacttttcttaattaaccatttacatttaccaaaaacttattcaacttttcactgttcaagttcaatttgttttgtgcagtattgatctgttgtgcagtgtatactttgaggttcggttggccgatcttgcgatcgaataccaaaaacttgtgcggtactctgttgctgaataaaacttggatcaggttaccccaaccccaatggcatttaccgagccgatggaggcgaacctgctacgccaagtgctggactatccccccagtgctctgtccatgtccatccctccttcagcttcattgatggttgcactgctctactatactataagtgaattgagttaaagcattttttgttcgactactgtttggtgcatgcaacttaatatggctgatttttagtctttctattttagtttataaattgtcaatcacagggattaaaagagactaaaagtaaggtttcaggttctatttctatccatctttaattaagggctgaaacgatactgtcttgattcctaattcacctaatattcctagaccaagaacgactcgggttaatggtcagggatgccaaattgtttcagtaaaactaagcaagctcgtatgatgattatgtacctacttgagaacaaattgtctaaaacatatctgctactacacttcagtaaaacaattgatcacacacaagaagttcagatcagaaagcaggctgtcgctactcccgtcaggttctcggatggttcccgtcaagggctgaccatggagaagagcacagtggtggtcagtgtccctgttgttgtcatggccgagactgctgagaccgactacagctcgagcttctcgcacctttgcaggatgcagagtcccagaaagatgttgggaagggtgataaatcaagggataagggaactgctgagaagtttgcaatatatcagaagcatcgttcttcgttggcagacactgttcaattcaggaggccagctgctccaacttccagtgtgaatgctgatattgtgggaacatccactctgcagtctgcatctctaccgaaacaagaaccctcaacagctacatccaagagctatactttcagagaaggtgatagggtgcgttatatgggtccagctcagttatcctcattgtcacaaaggctcctctccttttgctggcttcgctgttggaagcgagacatcatgtggtgtggataacgtccttgcagagcacgtgaactcaaatttcactctaatgccagctagctgctacatagtgcacttctgtatattatgagaagagagtggctcttcactcccatcggattgacaaaaaggtagaaatgttcagacctacgtgttctctttaaataaggaaaaaaag

SEQ ID NO: 24044 - DNA, 2027 bp, Zea Mays
gtcgccgccgtggtccgctgtcgcacacgccctcctgcccctctgctcccctcccagatcccgtgatccgctgccgtgatccgatgccgcacccgccatcaacgccctcctccccctctgctcccctcccagatctcgtgatccgctgcgaggccgccatcaacgccctcctccccctccgctcagctcccctcccaggatctcggcgcgctttcatcgccgccttgatggtccacggctgcacccacatacgacatcgcctgtccgcacgcaagcttctgcctgcgcccacctgtgtgcatagatgtgtgcccccgcccacctcttctgcgcccaatctttacccgtcgtccgcgccgctgttccatcctcgcacccacgcccgagatccacatgtgccgcaccccagccgtgctccggatgctgcaccgcccttccatcctccgcatgcagcaccatgttggccgccgccctgaaacctcgctaccacggagctgcaagcccccgcttccaaaccagcaccatgcagacttccaatttgttttttgtttggagcactgttgattttttctcgtttttttgagaacattacattgcccgtctttcactgttcaacttttcttaattaaccatttacatttaccaaaaacttattcaacttttcactgttcaagttcaatttgttttgtgcagtattgatctgttgtgcagtgtatactttgaggttcggttggccgatcttgcgatcgaataccaaaaacttgtgcggtactctgttgctgaataaaacttggatcaggttaccccaaccccaatggcatttaccgagccgatggaggcgaacctgctacgccaagtgctggactatccccccagtgctctgtccatgtccatccctccttcagcttcattgatggttgcactgctctactatactataagtgaattgagttaaagcattttttgttcgactactgtttggtgcatgcaacttaatatggctgatttttagtctttctattttagtttataaattgtcaatcacagggattaaaagagactaaaagtaaggtttcaggttctatttctatccatctttaattaagggctgaaacgatactgtcttgattcctaattcacctaatattcctagaccaagaacgactcgggttaatggtcagggatgccaaattgtttcagtaaaactaagcaagctcgtatgatgattatgtacctacttgagaacaaattgtctaaaacatatctgctactacacttcagtaaaacaattgatcacacacaagaagttcagatcagaaagcaggctgtcgctactcccgtcaggttctcggatggttcccgtcaagggctgaccatggagaagagcacagtggtggtcagtgtccctgttgttgtcatggccgagactgctgagaccgactacagctcgagcttctcgcacctttgcaggatgcagagtcccagaaagatgttgggaagggtgataaatcaagggataagggaactgctgagaagtttgcaatatatcagaagcatcgttcttcgttggcagacactgttcaattcaggaggccagctgctccaacttccagtgtgaatgctgatattgtgggaacatccactctgcagtctgcatctctaccgaaacaagaaccctcaacagctacatccaagagctatactttcagagaaggtgatagggtgcgttatatgggtccagctcagttatcctcattgtcacaaaggctcctctccttttgctggcttcgctgttggaagcgagacatcatgtggtgtggataacgtccttgcagagcacgtgaactcaaatttcactctaatgccagctagctgctacatagtgcacttctgtatattatgagaagagagtggctcttcactcccatcggattgacaaaaaacacagcagaactgcatgccagcagaggaatgcatatctagtggagataaactgtaatcggccgcctggatgacacgataggacc

SEQ ID NO: 24045 - DNA, 1723 bp, Zea Mays
ctcctccccctctgctcccctcccagatctcgtgatccgctgcgaggccgccatcaacgccctcctccccctccgctcagctcccctcccaggatctcggcgcgctttcatcgccgccttgatggtccacggctgcacccacatacgacatcgcctgtccgcacgcaagcttctgcctgcgcccacctgtgtgcatagatgtgtgcccccgcccacctcttctgcgcccaatctttacccgtcgtccgcgccgctgttccatcctcgcacccacgcccgagatccacatgtgccgcaccccagccgtgctccggatgctgcaccgcccttccatcctccgcatgcagcaccatgttggccgccgccctgaaacctcgctaccacggagctgcaagcccccgcttccaaaccagcaccatgcagacttccaatttgttttttgtttggagcactgttgattttttctcgtttttttgagaacattacattgcccgtctttcactgttcaacttttcttaattaaccatttacatttaccaaaaacttattcaacttttcactgttcaagttcaatttgttttgtgcagtattgatctgttgtgcagtgtatactttgaggttcggttggccgatcttgcgatcgaataccaaaaacttgtgcggtactctgttgctgaataaaacttggatcaggttaccccaaccccaatggcatttaccgagccgatggaggcgaacctgctacgccaagtgctggactatccccccagtgctctgtccatgtccatccctccttcagcttcattgatggttgcactgctctactatactataataaaacaattgatcacacacaagaagttcagatcagaaagcaggctgtcgctactcccgtcaggttctcggatggttcccgtcaagggctgaccatggagaagagcacagtggtggtcagtgtccctgttgttgtcatggccgagactgctgagaccgactacagctcgagcttctcgatgcagagtcccagaaagatgttgggaagggtgataaatcaagggataagggaactgctgagaagtttgcaatatatcagaagcatcgttcttcgttggcagacactgttcaattcaggaggccagctgctccaacttccagtgtgaatgctgatattgtgggaacatccactctgcagtctgcatctctaccgaaacaagaaccctcaacagctacatccaagagctatactttcagagaaggtgatagggtgcgttatatgggtccagctcagttatcctcattgtcacaaaggctcctctccttttgctggcttcgctgttggaagcgagacatcatgtggtgtggataacgtccttgcagagcacgtgaactcaaatttcactctaatgccagctagctgctacatagtgcacttctgtatattatgagtatgtatacagaattttaaagtatgaatacatgtgttttaaagcttggacaaccaatcatttattatccgagaatttaatttggttttattaataaatttaaacctttctataggaagagagtggctcttcactcccatcggattgacaaaaacacactcggacaaccagtgctggtattaatcgagatgtcgcatcaacaaacgctcatgcagagccagattctactcctacagtcctacgtctacacgagacgacacaagtgcatctataattga

SEQ ID NO: 24046 - DNA, 1493 bp, Zea Mays
cgccatcaacgccctcctccccctctgctcccctcccagatctcgtgatccgctgcgaggccgccatcaacgccctcctccccctccgctcagctcccctcccaggatctcggcgcgctttcatcgccgccttgatggtccacggctgcacccacatacgacatcgcctgtccgcacgcaagcttctgcctgcgcccacctgtgtgcatagatgtgtgcccccgcccacctcttctgcgcccaatctttacccgtcgtccgcgccgctgttccatcctcgcacccacgcccgagatccacatgtgccgcaccccagccgtgctccggatgctgcaccgcccttccatcctccgcatgcagcaccatgttggccgccgccctgaaacctcgctaccacggagctgcaagcccccgcttccaaaccagcaccatgcagacttccaatttgttttttgtttggagcactgttgattttttctcgtttttttgagaacattacattgcccgtctttcactgttcaacttttcttaattaaccatttacatttaccaaaaacttattcaacttttcactgttcaagttcaatttgttttgtgcagtattgatctgttgtgcagtgtatactttgaggttcggttggccgatcttgcgatcgaataccaaaaacttgtgcggtactctgttgctgaataaaacttggatcaggttaccccaaccccaatggcatttaccgagccgatggaggcgaacctgctacgccaagtgctggactatccccccagtgctctgtccatgtccatccctccttcagcttcattgatgtaaaacaattgatcacacacaagaagttcagatcagaaagcaggctgtcgctactcccgtcaggttctcggatggttcccgtcaagggctgaccatggagaagagcacagtggtggtcagtgtccctgttgttgtcatggccgagactgctgagaccgactacagctcgagcttctcacttcttgtcgtggattcacatttgctacctggggatgcagagtcccagaaagatgttgggaagggtgataaatcaagggataagggaactgctgagaagtttgcaatatatcagaagcatcgttcttcgttggcagacactgttcaattcaggaggccagctgctccaacttccagtgtgaatgctgatattgtgggaacatccactctgcagtctgcatctctaccgaaacaagaaccctcaacagctacatccaagagctatactttcagagaaggtgatagggtgcgttatatgggtccagctcagttatcctcattgtcacaaaggaagagagtggctcttcactcccatcggattgacaaaaacacactcggacaaccagtgctggtattaatcgagatgtcgcatcaacaaacgctcatgcagagccagattctactcctacagtcctacgtctacacgagacgacacaagtgcatctataattga

SEQ ID NO: 24047 - DNA, 2094 bp, Zea Mays
ccagatcccgtgatccgctgccgtgatccgatgccgcacccgccatcaacgccctcctccccctctgctcccctcccagatctcgtgatccgctgcgaggccgccatcaacgccctcctccccctccgctcagctcccctcccaggatctcggcgcgctttcatcgccgccttgatggtccacggctgcacccacatacgacatcgcctgtccgcacgcaagcttctgcctgcgcccacctgtgtgcatagatgtgtgcccccgcccacctcttctgcgcccaatctttacccgtcgtccgcgccgctgttccatcctcgcacccacgcccgagatccacatgtgccgcaccccagccgtgctccggatgctgcaccgcccttccatcctccgcatgcagcaccatgttggccgccgccctgaaacctcgctaccacggagctgcaagcccccgcttccaaaccagcaccatgcagacttccaatttgttttttgtttggagcactgttgattttttctcgtttttttgagaacattacattgcccgtctttcactgttcaacttttcttaattaaccatttacatttaccaaaaacttattcaacttttcactgttcaagttcaatttgttttgtgcagtattgatctgttgtgcagtgtatactttgaggttcggttggccgatcttgcgatcgaataccaaaaacttgtgcggtactctgttgctgaataaaacttggatcaggttaccccaaccccaatggcatttaccgagccgatggaggcgaacctgctacgccaagtgctggactatccccccagtgctctgtccatgtccatccctccttcagcttcattgatggttgcactgctctactatactataagtgaattgagttaaagcattttttgttcgactactgtttggtgcatgcaacttaatatggctgatttttagtctttctattttagtttataaattgtcaatcacagggattaaaagagactaaaagtaaggtttcaggttctatttctatccatctttaattaagggctgaaacgatactgtcttgattcctaattcacctaatattcctagaccaagaacgactcgggttaatggtcagggatgccaaattgtttcagtaaaactaagcaagctcgtatgatgattatgtacctacttgagaacaaattgtctaaaacatatctgctactacacttcagtaaaacaattgatcacacacaagaagttcagatcagaaagcaggctgtcgctactcccgtcaggttctcggatggttcccgtcaagggctgaccatggagaagagcacagtggtggtcagtgtccctgttgttgtcatggccgagactgctgagaccgactacagctcgagcttctctattcatggttacgaaatgtattggggttctatatttttggtgctagacttcttgtcgtggattcacatttgctacctggggcacctttgcaggatgcagagtcccagaaagatgttgggaagggtgataaatcaagggataagggaactgctgagaagtttgcaatatatcagaagcatcgttcttcgttggcagacactgttcaattcaggaggccagctgctccaacttccagtgtgaatgctgatattgtgggaacatccactctgcagtctgcatctctaccgaaacaagaaccctcaacagctacatccaagagctatactttcagagaaggtgatagggtgcgttatatgggtccagctcagttatcctcattgtcacaaaggctcctctccttttgctggcttcgctgttggaagcgagacatcatgtggtgtggataacgtccttgcagagcacgtgaactcaaatttcactctaatgccagctagctgctacatagtgcacttctgtatattatgagaagagagtggctcttcactcccatcggattgacaaaaacacactcggacaaccagtgctggtattaatcgagatgtcgcatcaacaaacgctcatgcagagccagattctactcctacagtcctacgtctacacgagacgacacaagtgcatctataattga

SEQ ID NO: 24048 - DNA, 2076 bp, Zea Mays
ccagatcccgtgatccgctgccgtgatccgatgccgcacccgccatcaacgccctcctccccctctgctcccctcccagatctcgtgatccgctgcgaggccgccatcaacgccctcctccccctccgctcagctcccctcccaggatctcggcgcgctttcatcgccgccttgatggtccacggctgcacccacatacgacatcgcctgtccgcacgcaagcttctgcctgcgcccacctgtgtgcatagatgtgtgcccccgcccacctcttctgcgcccaatctttacccgtcgtccgcgccgctgttccatcctcgcacccacgcccgagatccacatgtgccgcaccccagccgtgctccggatgctgcaccgcccttccatcctccgcatgcagcaccatgttggccgccgccctgaaacctcgctaccacggagctgcaagcccccgcttccaaaccagcaccatgcagacttccaatttgttttttgtttggagcactgttgattttttctcgtttttttgagaacattacattgcccgtctttcactgttcaacttttcttaattaaccatttacatttaccaaaaacttattcaacttttcactgttcaagttcaatttgttttgtgcagtattgatctgttgtgcagtgtatactttgaggttcggttggccgatcttgcgatcgaataccaaaaacttgtgcggtactctgttgctgaataaaacttggatcaggttaccccaaccccaatggcatttaccgagccgatggaggcgaacctgctacgccaagtgctggactatccccccagtgctctgtccatgtccatccctccttcagcttcattgatggttgcactgctctactatactataagtgaattgagttaaagcattttttgttcgactactgtttggtgcatgcaacttaatatggctgatttttagtctttctattttagtttataaattgtcaatcacagggattaaaagagactaaaagtaaggtttcaggttctatttctatccatctttaattaagggctgaaacgatactgtcttgattcctaattcacctaatattcctagaccaagaacgactcgggttaatggtcagggatgccaaattgtttcagtaaaactaagcaagctcgtatgatgattatgtacctacttgagaacaaattgtctaaaacatatctgctactacacttcagtaaaacaattgatcacacacaagaagttcagatcagaaagcaggctgtcgctactcccgtcaggttctcggatggttcccgtcaagggctgaccatggagaagagcacagtggtggtcagtgtccctgttgttgtcatggccgagactgctgagaccgactacagctcgagcttctcgcacctttgcaggatgcagagtcccagaaagatgttgggaagggtgataaatcaagggataagggaactgctgagaagtttgcaatatatcagaagcatcgttcttcgttggcagacactgttcaattcaggaggccagctgctccaacttccagtgtgaatgctgatattgtgggaacatccactctgcagtctgcatctctaccgaaacaagaaccctcaacagctacatccaagagctatactttcagagaaggctcctctccttttgctggcttcgctgttggaagcgagacatcatgtggtgtggataacgtccttgcagagcacgtgaactcaaatttcactctaatgccagctagctgctacatagtgcacttctgtatattatgagtatgtatacagaattttaaagtatgaatacatgtgttttaaagcttggacaaccaatcatttattatccgagaatttaatttggttttattaataaatttaaacctttctataggaagagagtggctcttcactcccatcggattgacaaaaacacactcggacaaccagtgctggtattaatcgagatgtcgcatcaacaaacgctcatgcagagccagattctactcctacagtcctacgtctacacgagacgacacaagtgcatctataattga

SEQ ID NO: 24049 - DNA, 2184 bp, Zea Mays
gtcgcacacgccctcctgcccctctgctcccctcccagatcccgtgatccgctgccgtgatccgatgccgcacccgccatcaacgccctcctccccctctgctcccctcccagatctcgtgatccgctgcgaggccgccatcaacgccctcctccccctccgctcagctcccctcccaggatctcggcgcgctttcatcgccgccttgatggtccacggctgcacccacatacgacatcgcctgtccgcacgcaagcttctgcctgcgcccacctgtgtgcatagatgtgtgcccccgcccacctcttctgcgcccaatctttacccgtcgtccgcgccgctgttccatcctcgcacccacgcccgagatccacatgtgccgcaccccagccgtgctccggatgctgcaccgcccttccatcctccgcatgcagcaccatgttggccgccgccctgaaacctcgctaccacggagctgcaagcccccgcttccaaaccagcaccatgcagacttccaatttgttttttgtttggagcactgttgattttttctcgtttttttgagaacattacattgcccgtctttcactgttcaacttttcttaattaaccatttacatttaccaaaaacttattcaacttttcactgttcaagttcaatttgttttgtgcagtattgatctgttgtgcagtgtatactttgaggttcggttggccgatcttgcgatcgaataccaaaaacttgtgcggtactctgttgctgaataaaacttggatcaggttaccccaaccccaatggcatttaccgagccgatggaggcgaacctgctacgccaagtgctggactatccccccagtgctctgtccatgtccatccctccttcagcttcattgatggttgcactgctctactatactataagtgaattgagttaaagcattttttgttcgactactgtttggtgcatgcaacttaatatggctgatttttagtctttctattttagtttataaattgtcaatcacagggattaaaagagactaaaagtaaggtttcaggttctatttctatccatctttaattaagggctgaaacgatactgtcttgattcctaattcacctaatattcctagaccaagaacgactcgggttaatggtcagggatgccaaattgtttcagtaaaactaagcaagctcgtatgatgattatgtacctacttgagaacaaattgtctaaaacatatctgctactacacttcagtaaaacaattgatcacacacaagaagttcagatcagaaagcaggctgtcgctactcccgtcaggttctcggatggttcccgtcaagggctgaccatggagaagagcacagtggtggtcagtgtccctgttgttgtcatggccgagactgctgagaccgactacagctcgagcttctcacttcttgtcgtggattcacatttgctacctggggatgcagagtcccagaaagatgttgggaagggtgataaatcaagggataagggaactgctgagaagtttgcaatatatcagaagcatcgttcttcgttggcagacactgttcaattcaggaggccagctgctccaacttccagtgtgaatgctgatattgtgggaacatccactctgcagtctgcatctctaccgaaacaagaaccctcaacagctacatccaagagctatactttcagagaaggtgatagggtgcgttatatgggtccagctcagttatcctcattgtcacaaaggctcctctccttttgctggcttcgctgttggaagcgagacatcatgtggtgtggataacgtccttgcagagcacgtgaactcaaatttcactctaatgccagctagctgctacatagtgcacttctgtatattatgagtatgtatacagaattttaaagtatgaatacatgtgttttaaagcttggacaaccaatcatttattatccgagaatttaatttggttttattaataaatttaaacctttctataggaagagagtggctcttcactcccatcggattgacaaaaacacactcggacaaccagtgctggtattaatcgagatgtcgcatcaacaaacgctcatgcagagccagattctactcctacagtcctacgtctacacgagacgacacaagtgcatctataattga

SEQ ID NO: 24050 - DNA, 2054 bp, Zea Mays
gtcgccgccgtggtccgctgtcgcacacgccctcctgcccctctgctcccctcccagatcccgtgatccgctgccgtgatccgatgccgcacccgccatcaacgccctcctccccctctgctcccctcccagatctcgtgatccgctgcgaggccgccatcaacgccctcctccccctccgctcagctcccctcccaggatctcggcgcgctttcatcgccgccttgatggtccacggctgcacccacatacgacatcgcctgtccgcacgcaagcttctgcctgcgcccacctgtgtgcatagatgtgtgcccccgcccacctcttctgcgcccaatctttacccgtcgtccgcgccgctgttccatcctcgcacccacgcccgagatccacatgtgccgcaccccagccgtgctccggatgctgcaccgcccttccatcctccgcatgcagcaccatgttggccgccgccctgaaacctcgctaccacggagctgcaagcccccgcttccaaaccagcaccatgcagacttccaatttgttttttgtttggagcactgttgattttttctcgtttttttgagaacattacattgcccgtctttcactgttcaacttttcttaattaaccatttacatttaccaaaaacttattcaacttttcactgttcaagttcaatttgttttgtgcagtattgatctgttgtgcagtgtatactttgaggttcggttggccgatcttgcgatcgaataccaaaaacttgtgcggtactctgttgctgaataaaacttggatcaggttaccccaaccccaatggcatttaccgagccgatggaggcgaacctgctacgccaagtgctggactatccccccagtgctctgtccatgtccatccctccttcagcttcattgatggttgcactgctctactatactataagtgaattgagttaaagcattttttgttcgactactgtttggtgcatgcaacttaatatggctgatttttagtctttctattttagtttataaattgtcaatcacagggattaaaagagactaaaagtaaggtttcaggttctatttctatccatctttaattaagggctgaaacgatactgtcttgattcctaattcacctaatattcctagaccaagaacgactcgggttaatggtcagggatgccaaattgtttcagtaaaactaagcaagctcgtatgatgattatgtacctacttgagaacaaattgtctaaaacatatctgctactacacttcagtaaaacaattgatcacacacaagaagttcagatcagaaagcaggctgtcgctactcccgtcaggttctcggatggttcccgtcaagggctgaccatggagaagagcacagtggtggtcagtgtccctgttgttgtcatggccgagactgctgagaccgactacagctcgagcttctcgatgcagagtcccagaaagatgttgggaagggtgataaatcaagggataagggaactgctgagaagtttgcaatatatcagaagcatcgttcttcgttggcagacactgttcaattcaggaggccagctgctccaacttccagtgtgaatgctgatattgtgggaacatccactctgcagtctgcatctctaccgaaacaagaaccctcaacagctacatccaagagctatactttcagagaaggtgatagggtgcgttatatgggtccagctcagttatcctcattgtcacaaaggctcctctccttttgctggcttcgctgttggaagcgagacatcatgtggtgtggataacgtccttgcagagcacgtgaactcaaatttcactctaatgccagctagctgctacatagtgcacttctgtatattatgagaagagagtggctcttcactcccatcggattgacaaaaacacactcggacaaccagtgctggtattaatcgagatgtcgcatcaacaaacgctcatgcagagccagattctactcctacagtcctacgtctacacgagacgacacaagtgcatctataattga

SEQ ID NO: 24051 - DNA, 2003 bp, Zea Mays
tgcgcggcgggctcctcgagcagcaccatcttggagcggtcctccccctccgccccgctctcgctcgcgctttcgtcgccgccgtggtccgctgtcgcacacgccctcctgcccctctgctcccctcccagatcccgtgatccgctgccgtgatccgatgccgcacccgccatcaacgccctcctccccctctgctcccctcccagatctcgtgatccgctgcgaggccgccatcaacgccctcctccccctccgctcagctcccctcccaggatctcggcgcgctttcatcgccgccttgatggtccacggctgcacccacatacgacatcgcctgtccgcacgcaagcttctgcctgcgcccacctgtgtgcatagatgtgtgcccccgcccacctcttctgcgcccaatctttacccgtcgtccgcgccgctgttccatcctcgcacccacgcccgagatccacatgtgccgcaccccagccgtgctccggatgctgcaccgcccttccatcctccgcatgcagcaccatgttggccgccgccctgaaacctcgctaccacggagctgcaagcccccgcttccaaaccagcaccatgcagacttccaatttgttttttgtttggagcactgttgattttttctcgtttttttgagaacattacattgcccgtctttcactgttcaacttttcttaattaaccatttacatttaccaaaaacttattcaacttttcactgttcaagttcaatttgttttgtgcagtattgatctgttgtgcagtgtatactttgaggttcggttggccgatcttgcgatcgaataccaaaaacttgtgcggtactctgttgctgaataaaacttggatcaggttaccccaaccccaatggcatttaccgagccgatggaggcgaacctgctacgccaagtgctggactatccccccagtgctctgtccatgtccatccctccttcagcttcattgatggttgcactgctctactatactataagtgaattgagttaaagcattttttgttcgactactgtttggtgcatgcaacttaatatggctgatttttagtctttctattttagtttataaattgtcaatcacagggattaaaagagactaaaagtaaggtttcaggttctatttctatccatctttaattaagggctgaaacgatactgtcttgattcctaattcacctaatattcctagaccaagaacgactcgggttaatggtcagggatgccaaattgtttcagtaaaactaagcaagctcgtatgatgattatgtacctacttgagaacaaattgtctaaaacatatctgctactacacttcagtaaaacaattgatcacacacaagaagttcagatcagaaagcaggctgtcgctactcccgtcaggttctcggatggttcccgtcaagggctgaccatggagaagagcacagtggtggtcagtgtccctgttgttgtcatggccgagactgctgagaccgactacagctcgagcttctcgcacctttgcaggatgcagagtcccagaaagatgttgggaagggtgataaatcaagggataagggaactgctgagaagtttgcaatatatcagaagcatcgttcttcgttggcagacactgttcaattcaggaggccagctgctccaacttccagtgtgaatgctgatattgtgggaacatccactctgcagtctgcatctctaccgaaacaagaaccctcaacagctacatccaagagctatactttcagagaaggtgatagggtgcgttatatgggtccagctcagttatcctcattgtcacaaaggaagagagtggctcttcactcccatcggattgacaaaaacacactcggacaaccagtgctggtattaatcgagatgtcgcatcaacaaacgctcatgcagagccagattctactcctacagtcctacgtctacacgagacgacacaagtgcatctataattga

SEQ ID NO: 24052 - DNA, 2084 bp, Zea Mays
tgcgcggcgggctcctcgagcagcaccatcttggagcggtcctccccctccgccccgctctcgctcgcgctttcgtcgccgccgtggtccgctgtcgcacacgccctcctgcccctctgctcccctcccagatcccgtgatccgctgccgtgatccgatgccgcacccgccatcaacgccctcctccccctctgctcccctcccagatctcgtgatccgctgcgaggccgccatcaacgccctcctccccctccgctcagctcccctcccaggatctcggcgcgctttcatcgccgccttgatggtccacggctgcacccacatacgacatcgcctgtccgcacgcaagcttctgcctgcgcccacctgtgtgcatagatgtgtgcccccgcccacctcttctgcgcccaatctttacccgtcgtccgcgccgctgttccatcctcgcacccacgcccgagatccacatgtgccgcaccccagccgtgctccggatgctgcaccgcccttccatcctccgcatgcagcaccatgttggccgccgccctgaaacctcgctaccacggagctgcaagcccccgcttccaaaccagcaccatgcagacttccaatttgttttttgtttggagcactgttgattttttctcgtttttttgagaacattacattgcccgtctttcactgttcaacttttcttaattaaccatttacatttaccaaaaacttattcaacttttcactgttcaagttcaatttgttttgtgcagtattgatctgttgtgcagtgtatactttgaggttcggttggccgatcttgcgatcgaataccaaaaacttgtgcggtactctgttgctgaataaaacttggatcaggttaccccaaccccaatggcatttaccgagccgatggaggcgaacctgctacgccaagtgctggactatccccccagtgctctgtccatgtccatccctccttcagcttcattgatggttgcactgctctactatactataagtgaattgagttaaagcattttttgttcgactactgtttggtgcatgcaacttaatatggctgatttttagtctttctattttagtttataaattgtcaatcacagggattaaaagagactaaaagtaaggtttcaggttctatttctatccatctttaattaagggctgaaacgatactgtcttgattcctaattcacctaatattcctagaccaagaacgactcgggttaatggtcagggatgccaaattgtttcagtaaaactaagcaagctcgtatgatgattatgtacctacttgagaacaaattgtctaaaacatatctgctactacacttcagtaaaacaattgatcacacacaagaagttcagatcagaaagcaggctgtcgctactcccgtcaggttctcggatggttcccgtcaagggctgaccatggagaagagcacagtggtggtcagtgtccctgttgttgtcatggccgagactgctgagaccgactacagctcgagcttctctattcatggttacgaaatgtattggggttctatatttttggtgctagacttcttgtcgtggattcacatttgctacctggggcacctttgcaggatgcagagtcccagaaagatgttgggaagggtgataaatcaagggataagggaactgctgagaagtttgcaatatatcagaagcatcgttcttcgttggcagacactgttcaattcaggaggccagctgctccaacttccagtgtgaatgctgatattgtgggaacatccactctgcagtctgcatctctaccgaaacaagaaccctcaacagctacatccaagagctatactttcagagaaggtgatagggtgcgttatatgggtccagctcagttatcctcattgtcacaaaggaagagagtggctcttcactcccatcggattgacaaaaacacactcggacaaccagtgctggtattaatcgagatgtcgcatcaacaaacgctcatgcagagccagattctactcctacagtcctacgtctacacgagacgacacaagtgcatctataattga

SEQ ID NO: 24053 - DNA, 1997 bp, Zea Mays
ctcccagatcccgtgatccgctgccgtgatccgatgccgcacccgccatcaacgccctcctccccctctgctcccctcccagatctcgtgatccgctgcgaggccgccatcaacgccctcctccccctccgctcagctcccctcccaggatctcggcgcgctttcatcgccgccttgatggtccacggctgcacccacatacgacatcgcctgtccgcacgcaagcttctgcctgcgcccacctgtgtgcatagatgtgtgcccccgcccacctcttctgcgcccaatctttacccgtcgtccgcgccgctgttccatcctcgcacccacgcccgagatccacatgtgccgcaccccagccgtgctccggatgctgcaccgcccttccatcctccgcatgcagcaccatgttggccgccgccctgaaacctcgctaccacggagctgcaagcccccgcttccaaaccagcaccatgcagacttccaatttgttttttgtttggagcactgttgattttttctcgtttttttgagaacattacattgcccgtctttcactgttcaacttttcttaattaaccatttacatttaccaaaaacttattcaacttttcactgttcaagttcaatttgttttgtgcagtattgatctgttgtgcagtgtatactttgaggttcggttggccgatcttgcgatcgaataccaaaaacttgtgcggtactctgttgctgaataaaacttggatcaggttaccccaaccccaatggcatttaccgagccgatggaggcgaacctgctacgccaagtgctggactatccccccagtgctctgtccatgtccatccctccttcagcttcattgatggttgcactgctctactatactataagtgaattgagttaaagcattttttgttcgactactgtttggtgcatgcaacttaatatggctgatttttagtctttctattttagtttataaattgtcaatcacagggattaaaagagactaaaagtaaggtttcaggttctatttctatccatctttaattaagggctgaaacgatactgtcttgattcctaattcacctaatattcctagaccaagaacgactcgggttaatggtcagggatgccaaattgtttcagtaaaactaagcaagctcgtatgatgattatgtacctacttgagaacaaattgtctaaaacatatctgctactacacttcagtaaaacaattgatcacacacaagaagttcagatcagaaagcaggctgtcgctactcccgtcaggttctcggatggttcccgtcaagggctgaccatggagaagagcacagtggtggtcagtgtccctgttgttgtcatggccgagactgctgagaccgactacagctcgagcttctcacttcttgtcgtggattcacatttgctacctggggcacctttgcaggatgcagagtcccagaaagatgttgggaagggtgataaatcaagggataagggaactgctgagaagtttgcaatatatcagaagcatcgttcttcgttggcagacactgttcaattcaggaggccagctgctccaacttccagtgtgaatgctgatattgtgggaacatccactctgcagtctgcatctctaccgaaacaagaaccctcaacagctacatccaagagctatactttcagagaaggtgatagggtgcgttatatgggtccagctcagttatcctcattgtcacaaaggctcctctccttttgctggcttcgctgttggaagcgagacatcatgtggtgtggataacgtccttgcagagcacgtgaactcaaatttcactctaatgccagctagctgctacatagtgcacttctgtatattatgagtatgtatacagaattttaaagtatgaatacatgtgttttaaagcttggacaaccaatcatttattatccgagaatttaatttggttttattaataaatttaaacctttc

SEQ ID NO: 24054 - DNA, 1617 bp, Zea Mays
ctcctgcccctctgctcccctcccagatcccgtgatccgctgccgtgatccgatgccgcacccgccatcaacgccctcctccccctctgctcccctcccagatctcgtgatccgctgcgaggccgccatcaacgccctcctccccctccgctcagctcccctcccaggatctcggcgcgctttcatcgccgccttgatggtccacggctgcacccacatacgacatcgcctgtccgcacgcaagcttctgcctgcgcccacctgtgtgcatagatgtgtgcccccgcccacctcttctgcgcccaatctttacccgtcgtccgcgccgctgttccatcctcgcacccacgcccgagatccacatgtgccgcaccccagccgtgctccggatgctgcaccgcccttccatcctccgcatgcagcaccatgttggccgccgccctgaaacctcgctaccacggagctgcaagcccccgcttccaaaccagcaccatgcagacttccaatttgttttttgtttggagcactgttgattttttctcgtttttttgagaacattacattgcccgtctttcactgttcaacttttcttaattaaccatttacatttaccaaaaacttattcaacttttcactgttcaagttcaatttgttttgtgcagtattgatctgttgtgcagtgtatactttgaggttcggttggccgatcttgcgatcgaataccaaaaacttgtgcggtactctgttgctgaataaaacttggatcaggttaccccaaccccaatggcatttaccgagccgatggaggcgaacctgctacgccaagtgctggactatccccccagtgctctgtccatgtccatccctccttcagcttcattgatgtaaaacaattgatcacacacaagaagttcagatcagaaagcaggctgtcgctactcccgtcaggttctcggatggttcccgtcaagggctgaccatggagaagagcacagtggtggtcagtgtccctgttgttgtcatggccgagactgctgagaccgactacagctcgagcttctcgcacctttgcaggatgcagagtcccagaaagatgttgggaagggtgataaatcaagggataagggaactgctgagaagtttgcaatatatcagaagcatcgttcttcgttggcagacactgttcaattcaggaggccagctgctccaacttccagtgtgaatgctgatattgtgggaacatccactctgcagtctgcatctctaccgaaacaagaaccctcaacagctacatccaagagctatactttcagagaaggtgatagggtgcgttatatgggtccagctcagttatcctcattgtcacaaaggctcctctccttttgctggcttcgctgttggaagcgagacatcatgtggtgtggataacgtccttgcagagcacgtgaactcaaatttcactctaatgccagctagctgctacatagtgcacttctgtatattatgagtatgtatacagaattttaaagtatgaatacatgtgttttaaagcttggacaaccaatcatttattatccgagaatttaatttggttttattaataaatttaaacctttc

SEQ ID NO: 24055 - DNA, 1779 bp, Zea Mays
ctgtcgcacacgccctcctgcccctctgctcccctcccagatcccgtgatccgctgccgtgatccgatgccgcacccgccatcaacgccctcctccccctctgctcccctcccagatctcgtgatccgctgcgaggccgccatcaacgccctcctccccctccgctcagctcccctcccaggatctcggcgcgctttcatcgccgccttgatggtccacggctgcacccacatacgacatcgcctgtccgcacgcaagcttctgcctgcgcccacctgtgtgcatagatgtgtgcccccgcccacctcttctgcgcccaatctttacccgtcgtccgcgccgctgttccatcctcgcacccacgcccgagatccacatgtgccgcaccccagccgtgctccggatgctgcaccgcccttccatcctccgcatgcagcaccatgttggccgccgccctgaaacctcgctaccacggagctgcaagcccccgcttccaaaccagcaccatgcagacttccaatttgttttttgtttggagcactgttgattttttctcgtttttttgagaacattacattgcccgtctttcactgttcaacttttcttaattaaccatttacatttaccaaaaacttattcaacttttcactgttcaagttcaatttgttttgtgcagtattgatctgttgtgcagtgtatactttgaggttcggttggccgatcttgcgatcgaataccaaaaacttgtgcggtactctgttgctgaataaaacttggatcaggttaccccaaccccaatggcatttaccgagccgatggaggcgaacctgctacgccaagtgctggactatccccccagtgctctgtccatgtccatccctccttcagcttcattgatggttgcactgctctactatactataagtgaattgagttaaagcattttttgttcgactactgtttggtgcatgcaacttaatatggctgatttttagtctttctattttagtttataaattgtcaatcacagggattaaaagagactaaaagtaaggtttcaggttctatttctatccatctttaattaagggctgaaacgatactgtcttgattcctaattcacctaatattcctagaccaagaacgactcgggttaatggtcagggatgccaaattgtttcagtaaaactaagcaagctcgtatgatgattatgtacctacttgagaacaaattgtctaaaacatatctgctactacacttcagtaaaacaattgatcacacacaagaagttcagatcagaaagcaggctgtcgctactcccgtcaggttctcggatggttcccgtcaagggctgaccatggagaagagcacagtggtggtcagtgtccctgttgttgtcatggccgagactgctgagaccgactacagctcgagcttctcgatgcagagtcccagaaagatgttgggaagggtgataaatcaagggataagggaactgctgagaagtttgcaatatatcagaagcatcgttcttcgttggcagacactgttcaattcaggaggccagctgctccaacttccagtgtgaatgctgatattgtgggaacatccactctgcagtctgcatctctaccgaaacaagaaccctcaacagctacatccaagagctatactttcagagaaggtgatagggtgcgttatatgggtccagctcagttatcctcattgtcacaaaggtatcatgttttataggaagaggaataaccagatatgagact

SEQ ID NO: 24056 - DNA, 1192 bp, Zea Mays
ctattgtcatcttctatctcttttttgcagatattaatgagatatgtaacatttgcatcacaccaatttgccttatcagccattcttcattgaattaaaaaacattcatggacaagtaagttgtcaatcatttatgtgaataataaagtaatatgtatctgcaaatagaaaactataacttgaagatttctatgagcgatttgtggtcactcatggttcgatgaaatttcatcagttcctcaaacaatcttggtccagtgtcaaataccctactagattataatgtgttcaacaaatgacgtaatagtgtctgttttttctttaaaaaagaaagttacactattaatgtttgaaacaacatcatatgggtttgatatttctctgaatatgacatggcttagaacaattcagatgacagcttcatggatgcagaaaattagcaattaattactcttagtggttgcatccatataggctatataaatatattctggtacaatcatcataaaaaacctagaacacaggggggagacgcccctgggtttttccttaataagctgtaccaggattcatatgtagactgcaaagcaagacaatgcccctccccaccaccacccccacacaaacatcaaactgctctaattgctataaatggctgagaagctggttgtcataaccatcataaataacagatagctaatgatgagctttacaggccacaaatcaattaattgagctcaaatctcccattcatctaccaagcttagagctagagaataacgagttcctatttatctttttgctgcaccatattccatgattccttatactgacggtttctgctatgcgtccaatattttcaattgaatccatttcgaatcttaacagaataagtgctagctaataatggaggcacacttcctttttccaggcaccaaacaatgaaggcaacgaataagcaaatctaaagctgattccccttaaagccctttgttcctccttgtgacacataggcataaagactaatttgctaggggacagaacgtgatgctatctaaaaatcagcaagcagccatgcacatgaggtccagaggaaacctacgaagtcaagaaccgacggctggggaggacacggccgcctgacgcctggggaggaacaggaggcgtggctgcctggggacgaacacgagcc

SEQ ID NO: 24057 - DNA, 481 bp, Zea Mays
tgcacagaaaacaaagattatggacacaatatcatcattccaaatggtgcttacatagcaagcaaacaaatagttctcacaacacattaatataaataaataattcaaaatcttctacatgtgcctcatcatttcctttgcatgctccctctcaagtaagtcaaaccttccttcatttgtttccagcatgcagaagacctctctaaattcaggcttcacaatcaaaaatgtagttgtatgcattagagctgttttctctttaaccccacaatctttcaccatcttcatagtctctgcaatgctaggcacttggcttgttggatgtgttgatgatgcttcaacacttgtggatatcttctctgctgctgtttctatcttcaaacatgtgttcttatatagtcgaaagaatggactcttctcttccttctcctcagcagcagtacatgaggccttgcgtttccttttcactggtttggatctt

SEQ ID NO: 24058 - DNA, 464 bp, Zea Mays
aaaaagcagaaagctgtttggttcgaacaactgtgaaattgtaggtttggtacaaaatgtgtgtaatagccctacattgtaggagacacataaataaactgatgattcagaatatcctacttcaacataactatctccctctcgcactactcaaagcatcagctatcttaatgcgaatggtattcattgtattctcattctctccctctggattgtcatctccttgtgcttgtgacgtgaaactctgttgtaccaagtactcctcatcagcatcacatctatcaaacaacttatcttctgaattgctgtcacgaataaaattacgcaacgccatgcaagctattattatatgtttctgtgtacgtgtagaaaaacttggaatgcctttcaaaatacgccacttctgcttcaagactccaaaagccctctcaataacatttcgaagagatgaatgtaagaaattg

SEQ ID NO: 24059 - DNA, 2757 bp, Zea Mays
gactgtccggtgtgcagcggactgtgtccggtgcgccaacgggaccggaggcccaacggtcgacttcgccagaaaaggaaggagatcagacacctgactgctactgttcatgcccggtggtgcaccggactgtctggtgcgccacccaacagaaggcaagaattaccttccatttggatctctaacggctcctagctgccttagtgctataaaagggacccctagacgcatggagcagtacaccaagcattcactaaacatcctaagactcctaaactccgccgccacgcatttggatcgttgtgttagagatttgagcaccatttgagttgtgaactccctgtgccgtgttttgtgctcacgtcttggcttgtgtgcgtgtgtttgctgcgaattgagtcttgtgtgtgtgttgctttccctcccttactcttgtgtttctcttgtgatcaatattgtaagggtgagaggctccaacttgtggagattcctcgcaaacgggaaaagaactcaaaagaaaaagaccgtggtattcaagttgatcattggatcacttgaaaggggttgagtgcaaccctcgtctattgggacgtcacaacgtggaagtaggcaagtgttacttggccgaaccatgggataaaacaccgtgtctcttgcgttgctttcctctgtgattgatttcttctcaagagctcgctccatagcaacttggtttaatctaactaatattttataaaccaagtttgtacaattaatgttgaattttgcaagatcacctattcaccccatctaagtgctctcaattggtattagagtcgtactcttcatctaagggactaaccgcccgaagagatggatcctaagggcaaggggatggtgatcaacgacaaggagtccctactcaacgagcctagagagaacaagcctactgactcaggctcgagtcacaagaagagggacgggaagaagaagaggcgcattaagaagattatctactacgacagcgacgcctcctcttctacatcaagggatgacgacgatgactcctcgtctaagaagaaaacggttaatcaaaactactcctttgattattcccgtatttcgtacaattcaaatgctcatttactttctattccacttggaaaccccccacacttcgatggagaggattactcattttggagccgtaaaatgcgtagtcacctattttccctccatcctagcatttggaaaattgtagaaagtggaatgcattttgatagtactgataaccctgtgtttataaatgaacaaattcataagaatgcccaagccactactgttttgctagcatctctatgcagggatgaatataacaaggtcagtggcttggacaacgcaaaacaaatctgggacaccctcaagatttctcatgaggggaatgacaccaccatgatcaccaaaatgcaactggtagaaggcgagctggggagattcgcgatgataaggggagaagagccaacacagacatacaacaggctaaagactcttgtcaacaagatccgaaaaagacctgaagccacaaccacctcattctgagaacctgaaagcattaatcacctgctggtttcctgtgtgttctcaagagttttctggtataggcttttgagaaagtttgggttacacagcttatcccctcagcaagtggagccttccttccttggttggtgggagaattcctcggctcaggtcctcaacatgagaaagaaaggactggactcccttgttgctttaggggcctggatgatctggaatcataggaacaaggtggtgttcgatggaaggaccccctctatctccttccttcttcaagctgctgaggatgaacaggagacgtggcggctggctggtgccaaggggctttcctttttggccagccaaactacctagctcctagggctgtagtgttttttgtccagtttatggatagctttgtgtacgcttgtttctggcctccataaggagtgcttgtacctgggtcattatggccctttattttccctctactttaatatatgggtgcgcagtcctcctgcgctctttcgaaaaaaaaaacaagatccgaagctacaggagtacaagatggacggatcatgacgtcatccgactcatgcttaggtcatttacgattattgacccccatcttgtaaatcttattcgtgaaaaccccaggtacaccaagatgacgcccaagaaaatccttggaaaattcgtaagcggacgcatgattgtaaaggaggcaagatatgtggatgacgccttgaacggtcctcttctcgtctacgagccgcagcccgttgctctcaaaacaaccagcaacagggaggcgctacctagcaaggtaacacaagtggaggctgccgggctaaatgaggatgagatgacactcatcatcaagcacttcaagaccacactaaaaggacgcaaggagtacccaataagaacaagtcaaggggaaaacactcctgcttcaaatgcggtaagactggtcattttatagctcaatgccccgataatgataatgaccaggcacaagaaaagcatgggaagagggaaaagaaaaagaactacaggaaggccaagggcgaggcacacatcgggaaggaatgggactccgactgttcctcatccgactccgaagatgaaggactagctgcctcagccttcaacaagtcttcactcttccccaacgaacgatacacgtgccttatggctaag

SEQ ID NO: 24060 - DNA, 2376 bp, Zea Mays
atccaacacttgatctttttattggctagatgtgaaccttttgcacctgtataacttatacactagagcaaactagtcagtccaatatttgtgttgggcaattcaaccaccaaaattatttaggaactaggtgtaagcctaattccctttcactttcggactcgattttaattctaacgctaacctcggcttgtagtgtgtgcttaagtttataattttcagattccgtctattcaccccccctctaggcgactttcactaacccaaattggcgcacgacgatggagtatcgggctctaatgagcatcaacacttaggagcttgttccccggcccagtggctccaacatcgtcaccgacaagtggatattcaagcacaggttccactccgatgggagtttcgatcgctacaaggcttgttgggacctctggtggttcagacagcgccccgacattgactatgatgacactttcatcctagttgttacattggccaccctccacatggtgctcgctctggctactgctcgcaactagcctattcaatagcttgacgtgaagaacgccttcctacacgacactcctagtgagactgtctactgcagttagcctaaggggttcgtcgatcccgctcggccagatctgatctgtcgcctcaacaagtccttgtatgaactgaagcaggcaccaaggacacagtacagtcgattcgccacacatgacctcattgggttttgtggaagccaagtcgagcacctcattgttcatcttctgtcacagctccaatacgatatatgtattagtttatgtcgatgccataattttgaccgcgtccaatatcgagcttctgtgccgcaccatcgctgccctacagagggaatttgcagcgaaggaccttgggctacttcatcacttccttggcatcactcttgagcgtcatttcgacgacttgtttctacaccagcgcacttgcatgttggacgccatccaacggacaaccatgacagaccacaatccatgtactactccagtcgacctccagaggaagcttgctaccgatttcgggcctcctattcaggacgcctctcagttcaggagcatcttcggtgctcttagagtacctaaattacacttgtcctaacatcacttgcaccgtctagcagatatgtcttcatatgcacgatcctcagagcctcacctgacggccaagaagagcatcatgcgctatctacaaggcacaccagactttggtcttcttctacgtcgatcgtcctgctccgaccttgtcgcctacactctacaacaacaccaattgggctagttgtccgaacacgcaccgctctacatcagacaatgcggtgttcctaggggacaacctggtgtcctagtcggctaagctccagaaaattgtctcccattacagtgctgaagcggagtaccatgttgtcgccaatggaatggttgagatgacttggttacatcagttgctcaacgagctccacaatccatcttcttggtgcactgttgtctacggcaacaacatcggtgttgtgtatctctccatcaaccccgttcaacatcaacacaccaaacatgtggagatcgacctccattttgtccgagagaagatcgccatcagtaaagtctgcatactccatatcctgacgacatcctagttcgcagacatcttcgcaaagggcctcccctccttggtgttcagtaagttcaggtccagtctaaacatttgtagtggttagagtttcggaggggggtagagtatatttgatagtctagatattgtgtctagtagactaccatatgtgtgggaaaccctaaccctggaaaagggttggacattgtattaatagacttgggatagttgggccaggcccattacaagggggcgagatggtaattacatagggtagaccccaaaccctaacgagtattttaacaccccctccccccgcagtcgcaactatatcctgtacagatgttgagactggaccgaaagtctaaaaatacactcgacgataactccttgctgaagatgtcggtgaactgcagcgtggtggggacgctgaggacccgaacgtcacctgcagcgacacgcttcaggacgaagtgcaggttgatctccacgtgcttcgtgcgctgatgctgcacgggattggtggagaggtagacggcgttgacgttgtcgcagtagacgagggtggcgcgctgacgggggttgtggagctcgtggaggagctggcgcatccaagaggcctctgctacgtcgttggcctcagcgcggtactcgacctctacgctggagcgggaaacgacgggctgccgcttggcagcctaggagacgaggttggcgcccagaaac

SEQ ID NO: 24061 - DNA, 1603 bp, Zea Mays
tatcaaccaatatatagttgttcattccaaataactcaactaataaagaggaataagtggcaccctagtcagtgggcatctattagactgtacacagaccacactctgaatctattgctaaccctgttcactttacagaccgcacaccaacacttctgactttaaacttgtactgtggcagctcatcttcctcatcgtcctcgtcttcacttgaatcctcttcaattttgtcccattttgagtagtcaaggcctgaatgactcttcggttttgggatggcttcccaaccctggggttttgaaggcgaagtggacggaaccacagcctttagaggttcagttgcaggttttctgtggagaattggtccagctgaaggtttgttctcgaggaccagtttggttgctggttggtcaggcttagcgatagaagaagtgtcggtcttctgaactcgtggaggaagttcttcgtcttcctcttcacgacaaagggactcctcttcgcactcaggaattggggccagtgacttcaaaacagtacggcagatggacagaaaaaaaggtcagcaaagtacacaaggcacaattaggcaaggatgtcagtgaggtgaaccgaagtaaattagcaaagagagcgaaaactgaaaacatactagctgtgtcttcaatcgtgcctgcaggttccgatacacttcagacgacgggtttatctcaacgagcctgttgacatcaaacagagctgactgataatccttcagagtgacgagagtctgggcacgtaacatcagagctccagcatgctccgtatccaactcgaggacagatgtacactcttgtgctgcctgcatcagatctcacaaatggagaatttaatattagaaacaataaatgatgtctgtagttaccggatgattccagaggaacgcatactgctattgtcagggccagggccaatacaaacaataactataccctcttactagctttcgtagtagataatcaattataagccatttgccgtcccttaaatttcaggggcccaaatcaagggaatcatttgagtagggccattcataaatttcaggtaatttttttccaggtaccgtgcctagcctgttttctagtacttttgctatttttgtaaggcaacggcaagcaaaacataagcagctgcatcttctcaagttgactccatcaatctaatgcatcttctcatgctgactccaatgaatctaatggaatcagtacaacacaaaatttactgccaactgaggtaagtgcgcaaagatcaccataacaaacaaaagctagacagaagattagtggatcctggacataacagtaccagtccatgcgcacaaatacccagtacaaattgagcatgcatattgttgtatgacgagcagaaaacacaatctacgagaccgaaatcgcaggagcccctgaaccctgaacccggaacaggacagctgtatttcgaccaaaactgacacttggaagcgccgaaggaacgccccttccccgaagtcaccaccgaggcgaggtggggaccaaaagcgacgacgcaatctgtgcaggaaagcaacccaaacccacccagagcagag

SEQ ID NO: 24062 - DNA, 3308 bp, Zea Mays
tcaacaaaagctctcggcgcttattaagtcttgacgatttatcattccattacatccacacctgcgatggagtacgagcgcggtggcggaggcggccgcggccgcgggcggggccgtggaggcggcggaggaggagggcgcggaggtggcggcggatacgggcggcagcacggaggcggcggcgacgcccgcggaggccgagacgagtacggcggcggaggaggagggtacggatacgacgaaggagaaggctatggcgggggtcgtagaggcggcggcggagggtacgggtacgacgtagggggccgtagaggcggcggcggctaccaccaagggcctcgcggaggctatggcacgggcggcggcggctaccaccaagggcctcgcggaggctatggcacgggcggccgcggcggaaacgcgtgggcgccggctcctggcgcggggagaggtcgcggagttggcggtggcgcggccgagtacgcccccgtcagggggccagcgcccgcgcaggcgccggtggcgagtccgcttgcgcccaaggacaaggaggcgccgcgttcgtcgggatccgtcgaacgcatcgcatccagcgaaatggccagagtagaaccaataggatcaacactagctgccacatcttctgttaatacacgtgtgccaatgcagagacctgattctggaggttcattatctcaagcaacggttaaacttttggtgaatcactttattgtcagctaccgaaaggtgacaactatttttcattatgacataaacatcaagcttgatgaagcttcgtctaatgcttcgggcaaagagctatccaaggcagaatttctctctgtcaaggatgagctcttcagggaaagcagtttacggcgtctttcctcatgtgttgcttatgatggtggaagaaatctgtatacttctgctgaactgcctgcaggtttatttcgtgtgagagttcgatcaaagacctacattgtatcagtagatttgaagaagcagctgccattaagtcaactctcagatttacctgtgcctagagaggtcttgcagggccttgatgttgttgtgcgtgaggcctcaagatggaacaagattatccttggtagaggattttactcaccaagcagcagtatagacattgggcagggtgctgtagctatgaaaggaacccagcagtcccttaaatccactcagcaagggttgatcctgtgtgttgactattctgtcatgccgttttacaaagctggaccggtgatggatcttgttcagaaattagtgaggtaccttgattatcggacaactttgaacaagaggcaaatggaaaatctggttgatgagcttaaaggccgacgtgtaactgtgattcatcggaggactaatcagaagtacacagtgcaaggtttgacacccttacctgccagccagatgacctttgtggatgctgaatccggccaaacacggaggctcgtggattattatgctcagaaacatggcaaggtgattgagtatcagatgctgccatgcttggatttgagcaagagcaaggacaaaccgaatcatgttccaattgagctctgcactcttcttgaaggacagaggtttccaaaagcaaacttgaatcagaattctgagaggatactaaaaggaagtgctctaatccgtgcatctgaccggaggaaggagattcaaaacttggtgaatgcttcggatggaccgtgcagaggagaaattgcacagcaatttgggatttccttggatgtacgaatgacagaagtcacgggtaggatccttcctccaccaaacctcaaacttggggcatccaatgggcagacctccaaattgagtatcgatcatggctgccagtggaatcttgtgaagaagagactagtagagggccgggttcttcagtgctggggcatcgtcgacttcagtgctgagccgtctggctctggcgcccgtcaggagcccctcgatacaaggatgtttgttgagaagattgtgaggaagtgctgtgagcttggtatccgtatgaaccctaatccatgcttcgtgcacataacaaggatggcagtgctcttcgatccacatggactacatgaagagctaaacaaagcaaaacaagctgcagtgagcaagaagcagaggttgcagctccttttctgcccgatgtccgagcagcattcggggtacaagacactgaagctgatttgtgacacacagctggggatcctgacccagtgtttactgagcgaccgcgcaaacaatcgaaagggacaggaccagtacatgacgaatcttgctctaaagatcaacggcaagcttgggggcagcaacgttcagctgtttgactcgctcccacgggtcggtggtggggtacctttcatgttcatcggtgctgacgttaaccacccgtcccccggtaacgtggagagcccatcgatcgcagccgtggtcgcctctgtcaactctggtgtcaacaagtatgtgaccagaatccgtgcccagccgcaccgctgcgaggtgatccagcagcttggtgagatctgccgggagctcattggagtctttgagaagcagaaccgcgtgaagccgcagaagatcatctacttccgtgatggcgtgagcgacgggcagttcgatatggtcctgaacgaggagctggctgacctggagaaggcgatcaaggtgaatggctatgcgccaaccatcaccgtggtcgtggccaagaagcggcaccacactcggctgttccccagggacgaacagcagccgcagacgaagaccgggaacgtgccgcctggcacggtggtggacacgggcgtggtggacccgtccgcgtacgacttctacctgtgcagccacactgggattctggggacgagcaggccgacgcactactacaccctggtggacgagcacggcttcggctccgacgacctgcagaagctgatctacaacctgtgcttcgtgttcgcgcggtgcaccaagccggtgtcgctggcgacgcccgtctactatgccgacctcgcggcctaccgtggcaggctctactacgaggctgccatgatggcgtcccaggcccagcgaggggggtcctttgacgtcactaacttcccgaggctgcacaaggatgtggaggacaacatgttcttcatctgacacaagtttttttttttttttgccggtgtcgtggcgcaagttcgggtcgattttgctgtgtggcaacgtcgcattgtttttatgctgttgcctttttttgcttgctggtcgtagtgccactgtgtgttcaaaaaaaaaaa

SEQ ID NO: 24063 - DNA, 4067 bp, Zea Mays
tcaacaaaagctctcggcgcttattaagtcttgacgatttatcattccattacatccacacctgcgatggagtacgagcgcggtggcggaggcggccgcggccgcgggcggggccgtggaggcggcggaggaggagggcgcggaggtggcggcggatacgggcggcagcacggaggcggcggcgacgcccgcggaggccgagacgagtacggcggcggaggaggagggtacggatacgacgaaggagaaggctatggcgggggtcgtagaggcggcggcggagggtacgggtacgacgtagggggccgtagaggcggcggcggctaccaccaagggcctcgcggaggctatggcacgggcggcggcggctaccaccaagggcctcgcggaggctatggcacgggcggccgcggcggaaacgcgtgggcgccggctcctggcgcggggagaggtcgcggagttggcggtggcgcggccgagtacgcccccgtcagggggccagcgcccgcgcaggcgccggtggcgagtccgcttgcgcccaaggacaaggaggcgccgcgttcgtcgggatccgtcgaacgcatcgcatccagcgaaatggccagagtagaaccaataggatcaacactagctgccacatcttctgttaatacacgtgtgccaatgcagagacctgattctggaggttcattatctcaagcaacggttaaacttttggtgaatcactttattgtcagctaccgaaaggtgacaactatttttcattatgacataaacatcaagcttgatgaagcttcgtctaatgcttcgggcaaagagctatccaaggcagaatttctctctgtcaaggatgagctcttcagggaaagcagtttacggcgtctttcctcatgtgttgcttatgatggtggaagaaatctgtatacttctgctgaactgcctgcaggtttatttcgtgtgagagttcgatcaaagacctacattgtatcagtagatttgaagaagcagctgccattaagtcaactctcagatttacctgtgcctagagaggtcttgcagggccttgatgttgttgtgcgtgaggcctcaagatggaacaagattatccttggtagaggattttactcaccaagcagcagtatagacattgggcagggtgctgtagctatgaaaggaacccagcagtcccttaaatccactcagcaagggttgatcctgtgtgttgactattctgtcatgccgttttacaaagctggaccggtgatggatcttgttcagaaattagtgaggtaccttgattatcggacaactttgaacaagaggcaaatggaaaatctggttgatgagcttaaaggccgacgtgtaactgtgattcatcggaggactaatcagaagtacacagtgcaaggtttgacacccttacctgccagccagatgacctttgtggatgctgaatccggccaaacacggaggctcgtggattattatgctcagaaacatggcaaggtgattgagtatcagatgctgccatgcttggatttgagcaagagcaaggacaaaccgaatcatgttccaattgagctctgcactcttcttgaaggacagaggtttccaaaagcaaacttgaatcagaattctgagaggatactaaaaggaagtgctctaatccgtgcatctgaccggaggaaggagattcaaaacttggtgaatgcttcggatggaccgtgcaggtaactccgtaactgttttcccatgtgttcttgttaacctgaaaagttgagctactgctatagtgctatatagctatacttaaactgtatgaaattagatgcaatgtgattgcccgttccccataactcaacttaactgtgtgtgtgttgtgtgtgtatagtgtagtgtatacacactataagttctcttattcattcctaccttttttttctctcctgcaaatgcacaacaacgtaactcttttctaggaaagaaacaaaccgatcattaccttttcttttcaacagattatgcatgtttattattactagctactaattatcatttcatttacagaggagaaattgcacagcaatttgggatttccttggatgtacgaatgacagaagtcacgggtaggatccttcctccaccaaacctcaaacttggggcatccaatgggcagacctccaaattgagtatcgatcatggctgccagtggaatcttgtgaagaagagactagtagagggccgggttcttcagtgctggggcatcgtcgacttcagtgctgagccgtctggctctggcgcccgtcaggagcccctcgatacaaggatgtttgttgagaagattgtgaggaagtgctgtgagcttggtatccgtatgaaccctaatccatgcttcgtgcacataacaaggatggcagtgctcttcgatccacatggactacatgaagagctaaacaaagcaaaacaagctgcagtgagcaagaagcagaggttgcagctccttttctgcccgatgtccgagcagcattcggggtacaagacactgaagctgatttgtgacacacagctggggatcctgacccagtgtttactgagcgaccgcgcaaacaatcgaaagggacaggaccagtacatgacgaatcttgctctaaagatcaacggcaagcttgggggcagcaacgttcagctgtttgactcgctcccacgggtcggtggtggggtacctttcatgttcatcggtgctgacgttaaccacccgtcccccggtaacgtggagagcccatcgatcgcagccgtggtcgcctctgtcaactctggtgtcaacaagtatgtgaccagaatccgtgcccagccgcaccgctgcgaggtgatccagcagcttggtgagatctgccgggagctcattggagtctttgagaagcagaaccgcgtgaagccgcagaagatcatctacttccgtgatggcgtgagcgacgggcagttcgatatggtcctgaacgaggagctggctgacctggagaaggcgatcaaggtgaatggctatgcgccaaccatcaccgtggtcgtggccaagaagcggcaccacactcggctgttccccagggacgaacagcagccgcagacgaagaccgggaacgtgccgcctggcacggtggtggacacgggcgtggtggacccgtccgcgtacgacttctacctgtgcagccacactgggattctggggacgagcaggccgacgcactactacaccctggtggacgagcacggcttcggctccgacgacctgcagaagctgatctacaacctgtgcttcgtgttcgcgcggtgcaccaagccggtgtcgctggcgacgcccgtctactatgccgacctcgcggcctaccgtggcaggctctactacgaggctgccatgatggcgtcccaggcccagcgaggggggtcctttgacgtcactaacttcccgaggctgcacaaggatgtggaggacaacatgttcttcatctgacacaagtttttttttttttttgccggtgtcgtggcgcaagttcgggtcgattttgctgtgtggcaacgtcgcattgtttttatgctgttgcctttttttgcttgctggtcgtagtgccactgtgtgttgttgaagtcgctggtttgaaactgcagtcagttaactgtacgcgtcctgctttgtttttgtttgcgcgcgtgtgaaacagacaaacagtctgatgatttggtgtgttcagggttgtaaacaaactttattagattctcactggattatactgcatgactgtagttgaaggaaaagaagcaggtttgagttgtgaagatacttgttgcagtacaacagacagatattgcaggttctagctgaatttctctgcttcaggatgggtcttgtgccgttgcgcacagagaacaacacacccatgcagatgcagcagccagccccgtcttccaatgctgcttggtgaaatgtgtaccatgttttgtgtttgttccaaagagaaggtcctccaaaagctccctacggacatctcctgtgcccaccgcgaccgacgcctaca

SEQ ID NO: 24064 - DNA, 3489 bp, Zea Mays
tcaacaaaagctctcggcgcttattaagtcttgacgatttatcattccattacatccacacctgcgatggagtacgagcgcggtggcggaggcggccgcggccgcgggcggggccgtggaggcggcggaggaggagggcgcggaggtggcggcggatacgggcggcagcacggaggcggcggcgacgcccgcggaggccgagacgagtacggcggcggaggaggagggtacggatacgacgaaggagaaggctatggcgggggtcgtagaggcggcggcggctaccaccaagggcctcgcggaggctatggcacgggcggcggcggctaccaccaagggcctcgcggaggctatggcacgggcggccgcggcggaaacgcgtgggcgccggctcctggcgcggggagaggtcgcggagttggcggtggcgcggccgagtacgcccccgtcagggggccagcgcccgcgcaggcgccggtggcgagtccgcttgcgcccaaggacaaggaggcgccgcgttcgtcgggatccgtcgaacgcatcgcatccagcgaaatggccagagtagaaccaataggatcaacactagctgccacatcttctgttaatacacgtgtgccaatgcagagacctgattctggaggttcattatctcaagcaacggttaaacttttggtgaatcactttattgtcagctaccgaaaggtttatttcgtgtgagagttcgatcaaagacctacattgtatcagtagatttgaagaagcagctgccattaagtcaactctcagatttacctgtgcctagagaggtcttgcagggccttgatgttgttgtgcgtgaggcctcaagatggaacaagattatccttggtagaggattttactcaccaagcagcagtatagacattgggcagggtgctgtagctatgaaaggaacccagcagtcccttaaatccactcagcaagggttgatcctgtgtgttgactattctgtcatgccgttttacaaagctggaccggtgatggatcttgttcagaaattagtgaggtaccttgattatcggacaactttgaacaagaggcaaatggaaaatctggttgatgagcttaaaggccgacgtgtaactgtgattcatcggaggactaatcagaagtacacagtgcaaggtttgacacccttacctgccagccagatgacctttgtggatgctgaatccggccaaacacggaggctcgtggattattatgctcagaaacatggcaaggtgattgagtatcagatgctgccatgcttggatttgagcaagagcaaggacaaaccgaatcatgttccaattgagctctgcactcttcttgaaggacagaggtttccaaaagcaaacttgaatcagaattctgagaggatactaaaaggaagtgctctaatccgtgcatctgaccggaggaaggagattcaaaacttggtgaatgcttcggatggaccgtgcagaggagaaattgcacagcaatttgggatttccttggatgtacgaatgacagaagtcacgggtaggatccttcctccaccaaacctcaaacttggggcatccaatgggcagacctccaaattgagtatcgatcatggctgccagtggaatcttgtgaagaagagactagtagagggccgggttcttcagtgctggggcatcgtcgacttcagtgctgagccgtctggctctggcgcccgtcaggagcccctcgatacaaggatgtttgttgagaagattgtgaggaagtgctgtgagcttggtatccgtatgaaccctaatccatgcttcgtgcacataacaaggatggcagtgctcttcgatccacatggactacatgaagagctaaacaaagcaaaacaagctgcagtgagcaagaagcagaggttgcagctccttttctgcccgatgtccgagcagcattcggggtacaagacactgaagctgatttgtgacacacagctggggatcctgacccagtgtttactgagcgaccgcgcaaacaatcgaaagggacaggaccagtacatgacgaatcttgctctaaagatcaacggcaagcttgggggcagcaacgttcagctgtttgactcgctcccacgggtcggtggtggggtacctttcatgttcatcggtgctgacgttaaccacccgtcccccggtaacgtggagagcccatcgatcgcagccgtggtcgcctctgtcaactctggtgtcaacaagtatgtgaccagaatccgtgcccagccgcaccgctgcgaggtgatccagcagcttggtgagatctgccgggagctcattggagtctttgagaagcagaaccgcgtgaagccgcagaagatcatctacttccgtgatggcgtgagcgacgggcagttcgatatggtcctgaacgaggagctggctgacctggagaaggcgatcaaggtgaatggctatgcgccaaccatcaccgtggtcgtggccaagaagcggcaccacactcggctgttccccagggacgaacagcagccgcagacgaagaccgggaacgtgccgcctggcacggtggtggacacgggcgtggtggacccgtccgcgtacgacttctacctgtgcagccacactgggattctggggacgagcaggccgacgcactactacaccctggtggacgagcacggcttcggctccgacgacctgcagaagctgatctacaacctgtgcttcgtgttcgcgcggtgcaccaagccggtgtcgctggcgacgcccgtctactatgccgacctcgcggcctaccgtggcaggctctactacgaggctgccatgatggcgtcccaggcccagcgaggggggtcctttgacgtcactaacttcccgaggctgcacaaggatgtggaggacaacatgttcttcatctgacacaagtttttttttttttttgccggtgtcgtggcgcaagttcgggtcgattttgctgtgtggcaacgtcgcattgtttttatgctgttgcctttttttgcttgctggtcgtagtgccactgtgtgttgttgaagtcgctggtttgaaactgcagtcagttaactgtacgcgtcctgctttgtttttgtttgcgcgcgtgtgaaacagacaaacagtctgatgatttggtgtgttcagggttgtaaacaaactttattagattctcactggattatactgcatgactgtagttgaaggaaaagaagcaggtttgagttgtgaagatacttgttgcagtacaacagacagatattgcaggttctagctgaatttctctgcttcaggatgggtcttgtgccgttgcgcacagagaacaacacacccatgcagatgcagcagccagccccgtcttccaatgctgcttggtgaaatgtgtaccatgttttgtgtttgttccaaagagaaggtcctccaaaagctccctacggacatctcctgtgcccaccgcgaccgacgcctaca

SEQ ID NO: 24065 - DNA, 3756 bp, Zea Mays
gtttattgtgctttcaattctagaactctaacacaaaagaaggattagagtatcttctccacttactaaatatagcactatattgattattaaattatctatggcgagtgagtaggctctgagtccctcggaggatggactcaaagatggggaggcaatagctgcgctgcaaaaaaatggaatttatgcctgcagaaatatggctgcctcacaacactctcaagctcagacgaagttgccactaaaccctcaagtgaatgtgtgaaacaatcaattagtaaggagaaatatttgtaacttaatttcccaccaagaattatattttaaatttactttagaaggctttattcatagtacatttaaatttgagcatgctgttatgccaccatatcttctattttactgctaggctcagcaaggttgagcatgctattatgccatccataaaaaaattaacatgctgaatgttttttttccggttcaattgaaaattacaatggttgattctttttcctaattatgcattctatcataatctttctgcaatattcaaggctcgttgtttatccaagccttttacaacttcataagacacaatgcattcgggctgcaagcttttgttacaaggcggcagcccgactaaaggaacgcccgccgtcgccgtcgccgtcgccgacttcacctgcgcccctctattggaacacctgcttgctgttttttcttctctgttcacctcgtctggccgggccggactgccgcagccttactcccagctgcccaggtttctgttggacccttcgacggcaacgagcatccaccataccaggtaggtcgacctgcgccaatgcactgacaacacggacacgggggatacattcttcggtgaagaataatcttagctttggacctttttagtggactcgagctattgcaatggagattgtgaacagtgtttccttcagctcaattggagtcggaagaattgtaataaacaagacagtgaaggtaggatgccaaacacaccggattggctggaagctaacaaggacatgttgcgagtactctcctggtgcttctagaaagaagcaagagaagtatgagcaacaaccacagaacgtcgatcttccagaattacacccaaaaaacaaaaagaaacccttccctgttccgattaaaaagatgctgcaagcttctcggcgagagaagaggcttgcacaaatgcatatagagaagcctcttgaacccccaaagaacggtttgcttgtgccagagcttgttccagttgcacatgaagtccttgataactggaaagtgctaatcagagggctctctcaacttctgaatgttgtttcagtttatggttgcagaaagtgtcctcaagtccatgttggtccagttggccaccagatccaagactgttacggttccggaagccagcgtcggaacagtcatcactcttgggctagaggttccatcaatgatgttctcatcccaattgagtcttaccatctttttgacccatttggtcggagagtgaagcatgataccaggtttgattatgataggataccagcaattgttgagctatgcattcaggctggtgttgacttaccacaatacccctcgaggcgacggactgctcctgtccggatgataggcaagaaggtgattgaccgcggtgagtttgttgatgagcccaagccacaacgttcagaacactgtgtatctctgcttgctgagctcgacacattcagcaaccaacaagtccagtcaccttcaccatcaaatatgaaagagcttgccaagaggacactgaaagcataccttaatgtccggcgaggcgtcgagcagctgatgagcaagtacactgtgaaagcatgtgggtactgctctgaggtccatgttggtccgtggggccacaatgtgaagctctgcggggctttcaagcaccagtggcgggatggcaagcatgggtggcaggacgcggtggttgatgaggtcatcccgcccaactacgtgtggcatgtccctgaccccagtggctctcctctcagatcctctctcaggagtttctatggcaaagctccagctgtcgtagagctgtgtgtgcaggctggggctgaaatacctgacgagtatcgggccatgatgaggactgacattgtcatcccggactctgtggaagctcggatggctgcataacaacaatgatctgagcttctacgactactatcctgcagttcttgtccagagtacagattccaaccaaatgtgccgctttctgggcatgctgtgatggtgggtctcttagccctgtggtaattgctcagggagcagcagatgcatagtttgtataatataattagcatagctaaatcatgatcgtttgggatttaaagctgagttgaagatctgatttaagtactattcgttgaaaggtttaacgcatgaacctaggacgcgcaatgacaagcctgatagcctgaaagctaaaaggaatggtctctgcaccatttataaggtccatcccatcttgtttacaggccgcagatgctttattcctgcctatgctagactgtgaggcacctagaatgctcaggagtcgccatactgatggccttccactttctccatcggtacaattgcgagctaatgctttggattaaactaatcacggtggtttgttcggggtatttgtgcgcctggctgtagttaatcatggactaaaagcctgtgctgtgcacctgtgcccgcccccagatcgacactttgggggtatggctacatgtatagtcctaccagatcgtcggcatattgtgttcccctttttgctgtatactagtactttgtaacatgcaagcggaggctacttattcagcgccgttccctaattgtgcttatgaaatgttttgagctgtatatggaacggatggtgatgaatgatccatgggcgaaagattcatccatgtgtgatcagctctgtgatgaatgatccatgagacctgattggctacaagaggtactaaactcttaggccacttatcgttaatagagggattacccaggtctcaaagctatagtgtcgttctcgtggtggagactgattatcacttcgtggcagtgaagcacccctacacaacttcttcaatagcccaactcttgatggacaacattgtcgcactccatcgtcttcttcctcactgtattgtcactgacagagacatcatatttctcagaactcttcaagctctacaaagtcgatctacaactgagtacaacctatcattctcaggcagatgggcaaaaaccaagaagtcaaccagtacagatgggcaaactgagagagtcaaactagtgtctggagatgttcctctgttgtgcagttcaggactccccgaatacatggaagtcttggttgtcatttgcagagctatggtacaactctgcttaccatgcatccattggatgccctccattcaaggccctatatggttttgagccatacagccttctactcctgctacagtgtctggcttagtggaaagtagagagctacatttacgatcaccgaaacataatgaagctcatggtagataggaagtgctctgacttgcagttccaagtgggtgatctagtattactgaatttacagccatacactgagttctctgtggctaacaagtatggattattcaggaaagcacattcgctctctagaaatacagaactagctcttgtttattggagtgtcaagaa

SEQ ID NO: 24066 - DNA, 4768 bp, Zea Mays
gatcacttattttttccctgaaaagttaagcttacatacttcatcatcaatcctttgatttgaaaaattggtatgtgtggacttaccaaacgatgcagctctagcagtacgatcctattgcacggcactgcggcagtacacgactaccaaaggtccacatctttgttctttgcctgtgtgcatgtgctaaccacaaagatgacacaatacattaaagtgagcatcggggtaggtcccgcgccaaaggtttattgtgctttcaattctagaactctaacacaaaagaaggattagagtatcttctccacttactaaatatagcactatattgattattaaattatctatggcgagtgagtaggctctgagtccctcggaggatggactcaaagatggggaggcaatagctgcgctgcaaaaaaatggaatttatgcctgcagaaatatggctgcctcacaacactctcaagctcagacgaagttgccactaaaccctcaagtgaatgtgtgaaacaatcaattagtaaggagaaatatttgtaacttaatttcccaccaagaattatattttaaatttactttagaaggctttattcatagtacatttaaatttgagcatgctgttatgccaccatatcttctattttactgctaggctcagcaaggttgagcatgctattatgccatccataaaaaaattaacatgctgaatgttttttttccggttcaattgaaaattacaatggttgattctttttcctaattatgcattctatcataatctttctgcaatattcaaggctcgttgtttatccaagccttttacaacttcataagacacaatgcattcgggctgcaagcttttgttacaaggtcagtaagctaagtcgcaatgcattcaagttgcaatcttttgctacatgtcagtaagtttcactgttggctccataaacaattcatgctttaactagatgctatatatgtattttagtgtaaaaatgaattatcaaaatctatgcgcctagtagaaaattaaaaaaacgacctacattttgggacggaggaagtagctattaatgtccaaatcaagagtcaccagctacaaaacgaacaccactggtcaatgatgatggtgcggcaacgccgcgccccgttctttctagttatatatactatagcttcaacctctctagttgctcgcatgttgtctctcactcgtgtttaggtttaacacaaccatcaacctaaaccacactctcttctaacttttttttttaattcttggtgcctactgtatgttgttaacaacgatacagtcaccaactcaccataagataaaacttcacttaaaaactaaatctggtttcatattttttgaagctttgaaacaaaattttcacatctttctaagattaatccagatttcaggaatttaactacatgattatttttggaaaaaaacatctgtagtccgaaaaaacagtccatacagggccaaattctacagcccaattaacctccaaggaccgaggctccaaccaaaagggccccgacccagtgtcaatgtaaaacgcgaggatattttccccttcaccattcccttctcatcccctacctctcttggtttcgctggtaggcggcagcccgactaaaggaacgcccgccgtcgccgtcgccgtcgccgacttcacctgcgcccctctattggaacacctgcttgctgttttttcttctctgttcacctcgtctggccgggccggactgccgcagccttactcccagctgcccaggtttctgttggacccttcgacggcaacgagcatccaccataccagtaggtaggtcgacctgcgccaatgcactgacaacacggacacgggggatacattcttcggtgaagaataatcttagctttggacctttttagtggactcgagctattgcaatggagattgtgaacagtgtttccttcagctcaattggagtcggaagaattgtaataaacaagacagtgaaggtaggatgccaaacacaccggattggctggaagctaacaaggacatgttgcgagtactctcctggtgcttctagaaagaagcaagagaagtatgagcaacaaccacagaacgtcgatcttccagaattacacccaaaaaacaaaaagaaacccttccctgttccgattaaaaagatgctgcaagcttctcggcgagagaagaggcttgcacaaatgcatatagagaagcctcttgaacccccaaagaacggtttgcttgtgccagagcttgttccagttgcacatgaagtccttgataactggaaagtgctaatcagagggctctctcaacttctgaatgttgtttcagtttatggttgcagaaagtgtcctcaagtccatgttggtccagttggccaccagatccaagactgttacggttccggaagccagcgtcggaacagtcatcactcttgggctagaggttccatcaatgatgttctcatcccaattgagtcttaccatctttttgacccatttggtcggagagtgaagcatgataccaggtttgattatgataggataccagcaattgttgagctatgcattcaggctggtgttgacttaccacaatacccctcgaggcgacggactgctcctgtccggatgataggcaagaaggtgattgaccgcggtgagtttgttgatgagcccaagccacaacgttcagaacactgtgtatctctgcttgctgagctcgacacattcagcaaccaacaagtccagtcaccttcaccatcaaatatgaaagagcttgccaagaggacactgaaagcataccttaatgtccggcgaggcgtcgagcagctgatgagcaagtacactgtgaaagcatgtgggtactgctctgaggtccatgttggtccgtggggccacaatgtgaagctctgcggggctttcaagcaccagtggcgggatggcaagcatgggtggcaggacgcggtggttgatgaggtcatcccgcccaactacgtgtggcatgtccctgaccccagtggctctcctctcagatcctctctcaggagtttctatggcaaagctccagctgtcgtagagctgtgtgtgcaggctggggctgaaatacctgacgagtatcgggccatgatgaggactgacattgtcatcccggactctgtggaagctcggatggctgcataacaacaatgatctgagcttctacgactactatcctgcagttcttgtccagagtacagattccaaccaaatgtgccgctttctgggcatgctgtgatggtgggtctcttagccctgtggtaattgctcagggagcagcagatgcatagtttgtataatataattagcatagctaaatcatgatcgtttgggatttaaagctgagttgaagatctgatttaagtactattcgttgaaaggtttaacgcatgaacctaggacgcgcaatgacaagcctgatagcctgaaagctaaaaggaatggtctctgcaccatttataaggtccatcccatcttgtttacaggccgcagatgctttattcctgcctatgctagactgtgaggcacctagaatgctcaggagtcgccatactgatggccttccactttctccatcggtacaattgcgagctaatgctttggattaaactaatcacggtggtttgttcggggtatttgtgcgcctggctgtagttaatcatggactaaaagcctgtgctgtgcacctgtgcccgcccccagatcgacactttgggggtatggctacatgtatagtcctaccagatcgtcggcatattgtgttcccctttttgctgtatactagtactttgtaacatgcaagcggaggctacttattcagcgccgttccctaattgtgcttatgaaatgttttgagctgtatatggaacggatggtgatgaatgatccatgggcgaaagattcatccatgtgtgatcagctctgtgatgaatgatccatgagacctgattggctacaagaggtactaaactcttaggccacttatcgttaatagagggattacccaggtctcaaagctatagtgtcgttctcgtggtggagactgattatcacttcgtggcagtgaagcacccctacacaacttcttcaatagcccaactcttgatggacaacattgtcgcactccatcgtcttcttcctcactgtattgtcactgacagagacatcatatttctcagaactcttcaagctctacaaagtcgatctacaactgagtacaacctatcattctcaggcagatgggcaaaaaccaagaagtcaaccagtacagatgggcaaactgagagagtcaaactagtgtctggagatgttcctctgttgtgcagttcaggactccccgaatacatggaagtcttggttgtcatttgcagagctatggtacaactctgcttaccatgcatccattggatgccctccattcaaggccctatatggttttgagccatacagccttctactcctgctacagtgtctggcttagtggaaagtagagagctacatttacgatcaccgaaacataatgaagctcatggtagataggaagtgctctgacttgcagttccaagtgggtgatctagtattactgaatttacagccatacactgagttctctgtggctaacaagtatggattattcaggaaagcacattcgctctctagaaatacagaactagctcttgtttattggagtgtcaagaa

SEQ ID NO: 24067 - DNA, 4330 bp, Zea Mays
ttacttcttccttatcacctccatctctcaccccggtctctctcccctcgcgcggccggcgccccaactccctcccctccggttctcgctcgcctccacttcttcctcctcgcctctgggtcctgacgccttccaccgtcggccggagaagcacctccgccttgccaccgtcgggccctgctgtctccagccatcgccgctccacctccgccaccccaccaccgggtcccgtcggcatctggccactgttgccggtgcagcggcgtggcgaggaagcgcgggaggagccggtacggcgggacgcggagggccccgtcgcctggtccgcaacagcctgcatcccgggaggccacgagtaagataaggctcgttgtttatccaagccttttacaacttcataagacacaatgcattcgggctgcaagcttttgttacaaggtcagtaagctaagtcgcaatgcattcaagttgcaatcttttgctacatgtcagtaagtttcactgttggctccataaacaattcatgctttaactagatgctatatatgtattttagtgtaaaaatgaattatcaaaatctatgcgcctagtagaaaattaaaaaaacgacctacattttgggacggaggaagtagctattaatgtccaaatcaagagtcaccagctacaaaacgaacaccactggtcaatgatgatggtgcggcaacgccgcgccccgttctttctagttatatatactatagcttcaacctctctagttgctcgcatgttgtctctcactcgtgtttaggtttaacacaaccatcaacctaaaccacactctcttctaacttttttttttaattcttggtgcctactgtatgttgttaacaacgatacagtcaccaactcaccataagataaaacttcacttaaaaactaaatctggtttcatattttttgaagctttgaaacaaaattttcacatctttctaagattaatccagatttcaggaatttaactacatgattatttttggaaaaaaacatctgtagtccgaaaaaacagtccatacagggccaaattctacagcccaattaacctccaaggaccgaggctccaaccaaaagggccccgacccagtgtcaatgtaaaacgcgaggatattttccccttcaccattcccttctcatcccctacctctcttggtttcgctggtaggcggcagcccgactaaaggaacgcccgccgtcgccgtcgccgtcgccgacttcacctgcgcccctctattggaacacctgcttgctgttttttcttctctgttcacctcgtctggccgggccggactgccgcagccttactcccagctgcccaggtttctgttggacccttcgacggcaacgagcatccaccataccaggtaggtcgacctgcgccaatgcactgacaacacggacacgggggatacattcttcggtgaagaataatcttagctttggacctttttagtggactcgagctattgcaatggagattgtgaacagtgtttccttcagctcaattggagtcggaagaattgtaataaacaagacagtgaaggtaggatgccaaacacaccggattggctggaagctaacaaggacatgttgcgagtactctcctggtgcttctagaaagaagcaagagaagtatgagcaacaaccacagaacgtcgatcttccagaattacacccaaaaaacaaaaagaaacccttccctgttccgattaaaaagatgctgcaagcttctcggcgagagaagaggcttgcacaaatgcatatagagaagcctcttgaacccccaaagaacggtttgcttgtgccagagcttgttccagttgcacatgaagtccttgataactggaaagtgctaatcagagggctctctcaacttctgaatgttgtttcagtttatggttgcagaaagtgtcctcaagtccatgttggtccagttggccaccagatccaagactgttacggttccggaagccagcgtcggaacagtcatcactcttgggctagaggttccatcaatgatgttctcatcccaattgagtcttaccatctttttgacccatttggtcggagagtgaagcatgataccaggtttgattatgataggataccagcaattgttgagctatgcattcaggctggtgttgacttaccacaatacccctcgaggcgacggactgctcctgtccggatgataggcaagaaggtgattgaccgcggtgagtttgttgatgagcccaagccacaacgttcagaacactgtgtatctctgcttgctgagctcgacacattcagcaaccaacaagtccagtcaccttcaccatcaaatatgaaagagcttgccaagaggacactgaaagcataccttaatgtccggcgaggcgtcgagcagctgatgagcaagtacactgtgaaagcatgtgggtactgctctgaggtccatgttggtccgtggggccacaatgtgaagctctgcggggctttcaagcaccagtggcgggatggcaagcatgggtggcaggacgcggtggttgatgaggtcatcccgcccaactacgtgtggcatgtccctgaccccagtggctctcctctcagatcctctctcaggagtttctatggcaaagctccagctgtcgtagagctgtgtgtgcaggctggggctgaaatacctgacgagtatcgggccatgatgaggactgacattgtcatcccggactctgtggaagctcggatggctgcataacaacaatgatctgagcttctacgactactatcctgcagttcttgtccagagtacagattccaaccaaatgtgccgctttctgggcatgctgtgatggtgggtctcttagccctgtggtaattgctcagggagcagcagatgcatagtttgtataatataattagcatagctaaatcatgatcgtttgggatttaaagctgagttgaagatctgatttaagtactattcgttgaaaggtttaacgcatgaacctaggacgcgcaatgacaagcctgatagcctgaaagctaaaaggaatggtctctgcaccatttataaggtccatcccatcttgtttacaggccgcagatgctttattcctgcctatgctagactgtgaggcacctagaatgctcaggagtcgccatactgatggccttccactttctccatcggtacaattgcgagctaatgctttggattaaactaatcacggtggtttgttcggggtatttgtgcgcctggctgtagttaatcatggactaaaagcctgtgctgtgcacctgtgcccgcccccagatcgacactttgggggtatggctacatgtatagtcctaccagatcgtcggcatattgtgttcccctttttgctgtatactagtactttgtaacatgcaagcggaggctacttattcagcgccgttccctaattgtgcttatgaaatgttttgagctgtatatggaacggatggtgatgaatgatccatgggcgaaagattcatccatgtgtgatcagctctgtgatgaatgatccatgagacctgattggctacaagaggtactaaactcttaggccacttatcgttaatagagggattacccaggtctcaaagctatagtgtcgttctcgtggtggagactgattatcacttcgtggcagtgaagcacccctacacaacttcttcaatagcccaactcttgatggacaacattgtcgcactccatcgtcttcttcctcactgtattgtcactgacagagacatcatatttctcagaactcttcaagctctacaaagtcgatctacaactgagtacaacctatcattctcaggcagatgggcaaaaaccaagaagtcaaccagtacagatgggcaaactgagagagtcaaactagtgtctggagatgttcctctgttgtgcagttcaggactccccgaatacatggaagtcttggttgtcatttgcagagctatggtacaactctgcttaccatgcatccattggatgccctccattcaaggccctatatggttttgagccatacagccttctactcctgctacagtgtctggcttagtggaaagtagagagctacatttacgatcaccgaaacataatgaagctcatggtagataggaagtgctctgacttgcagttccaagtgggtgatctagtattactgaatttacagccatacactgagttctctgtggctaacaagtatggattattcaggaaagcacattcgctctctagaaatacagaactagctcttgtttattggagtgtcaagaa

SEQ ID NO: 24068 - DNA, 3521 bp, Zea Mays
cgaaaatctcccgtccaggcggcacatttacttcttccttatcacctccatctctcaccccggtctctctcccctcgcgcggccggcgccccaactccctcccctccggttctcgctcgcctccacttcttcctcctcgcctctgggtcctgacgccttccaccgtcggccggagaagcacctccgccttgccaccgtcgggccctgctgtctccagccatcgccgctccacctccgccaccccaccaccgggtcccgtcggcatctggccactgttgccggtgcagcggcgtggcgaggaagcgcgggaggagccggtacggcgggacgcggagggccccgtcgcctggtccgcaacagcctgcatcccgggaggccacgagtaagataaggcggcagcccgactaaaggaacgcccgccgtcgccgtcgccgtcgccgacttcacctgcgcccctctattggaacacctgcttgctgttttttcttctctgttcacctcgtctggccgggccggactgccgcagccttactcccagctgcccaggtttctgttggacccttcgacggcaacgagcatccaccataccaggtaggtcgacctgcgccaatgcactgacaacacggacacgggggatacattcttcggtgaagaataatcttagctttggacctttttagtggactcgagctattgcaatggagattgtgaacagtgtttccttcagctcaattggagtcggaagaattgtaataaacaagacagtgaaggtaggatgccaaacacaccggattggctggaagctaacaaggacatgttgcgagtactctcctggtgcttctagaaagaagcaagagaagtatgagcaacaaccacagaacgtcgatcttccagaattacacccaaaaaacaaaaagaaacccttccctgttccgattaaaaagatgctgcaagcttctcggcgagagaagaggcttgcacaaatgcatatagagaagcctcttgaacccccaaagaacggtttgcttgtgccagagcttgttccagttgcacatgaagtccttgataactggaaagtgctaatcagagggctctctcaacttctgaatgttgtttcagtttatggttgcagaaagtgtcctcaagtccatgttggtccagttggccaccagatccaagactgttacggttccggaagccagcgtcggaacagtcatcactcttgggctagaggttccatcaatgatgttctcatcccaattgagtcttaccatctttttgacccatttggtcggagagtgaagcatgataccaggtttgattatgataggataccagcaattgttgagctatgcattcaggctggtgttgacttaccacaatacccctcgaggcgacggactgctcctgtccggatgataggcaagaaggtgattgaccgcggtgagtttgttgatgagcccaagccacaacgttcagaacactgtgtatctctgcttgctgagctcgacacattcagcaaccaacaagtccagtcaccttcaccatcaaatatgaaagagcttgccaagaggacactgaaagcataccttaatgtccggcgaggcgtcgagcagctgatgagcaagtacactgtgaaagcatgtgggtactgctctgaggtccatgttggtccgtggggccacaatgtgaagctctgcggggctttcaagcaccagtggcgggatggcaagcatgggtggcaggacgcggtggttgatgaggtcatcccgcccaactacgtgtggcatgtccctgaccccagtggctctcctctcagatcctctctcaggagtttctatggcaaagctccagctgtcgtagagctgtgtgtgcaggctggggctgaaatacctgacgagtatcgggccatgatgaggactgacattgtcatcccggactctgtggaagctcggatggctgcataacaacaatgatctgagcttctacgactactatcctgcagttcttgtccagagtacagattccaaccaaatgtgccgctttctgggcatgctgtgatggtgggtctcttagccctgtggtaattgctcagggagcagcagatgcatagtttgtataatataattagcatagctaaatcatgatcgtttgggatttaaagctgagttgaagatctgatttaagtactattcgttgaaaggtttaacgcatgaacctaggacgcgcaatgacaagcctgatagcctgaaagctaaaaggaatggtctctgcaccatttataaggtccatcccatcttgtttacaggccgcagatgctttattcctgcctatgctagactgtgaggcacctagaatgctcaggagtcgccatactgatggccttccactttctccatcggtacaattgcgagctaatgctttggattaaactaatcacggtggtttgttcggggtatttgtgcgcctggctgtagttaatcatggactaaaagcctgtgctgtgcacctgtgcccgcccccagatcgacactttgggggtatggctacatgtatagtcctaccagatcgtcggcatattgtgttcccctttttgctgtatactagtactttgtaacatgcaagcggaggctacttattcagcgccgttccctaattgtgcttatgaaatgttttgagctgtatatggaacggatggtgatgaatgatccatgggcgaaagattcatccatgtgtgatcagctctgtgatgaatgatccatgagacctgattggctacaagaggtactaaactcttaggccacttatcgttaatagagggattacccaggtctcaaagctatagtgtcgttctcgtggtggagactgattatcacttcgtggcagtgaagcacccctacacaacttcttcaatagcccaactcttgatggacaacattgtcgcactccatcgtcttcttcctcactgtattgtcactgacagagacatcatatttctcagaactcttcaagctctacaaagtcgatctacaactgagtacaacctatcattctcaggcagatgggcaaaaaccaagaagtcaaccagtacagatgggcaaactgagagagtcaaactagtgtctggagatgttcctctgttgtgcagttcaggactccccgaatacatggaagtcttggttgtcatttgcagagctatggtacaactctgcttaccatgcatccattggatgccctccattcaaggccctatatggttttgagccatacagccttctactcctgctacagtgtctggcttagtggaaagtagagagctacatttacgatcaccgaaacataatgaagctcatggtagataggaagtgctctgacttgcagttccaagtgggtgatctagtattactgaatttacagccatacactgagttctctgtggctaacaagtatggattattcaggaaagcacattcgctctctagaaatacagaactagctcttgtttattggagtgtcaagaa

SEQ ID NO: 24069 - DNA, 5960 bp, Zea Mays
gtttccatttgttgaagccgaacgtttcataattggcgaaaatctcccgtccaggcggcacatttacttcttccttatcacctccatctctcaccccggtctctctcccctcgcgcggccggcgccccaactccctcccctccggttctcgctcgcctccacttcttcctcctcgcctctgggtcctgacgccttccaccgtcggccggagaagcacctccgccttgccaccgtcgggccctgctgtctccagccatcgccgctccacctccgccaccccaccaccgggtcccgtcggcatctggccactgttgccggtgcagcggcgtggcgaggaagcgcgggaggagccggtacggcgggacgcggagggccccgtcgcctggtccgcaacagcctgcatcccgggaggccacgagtaagataaggtgagggagaagaagtgaaatccggccgccatgccgaggcctcaaccttccgtgtgtctcctatctgaagaccccccactacctccactgactcccccttcttttaatgtcgttaaagttgctttgaattttcaattgactaatgcgcgtccgttcaacacaacgaacagaaatggccatcagctgacttgcacgtttgtgagacaggcttgaaatatgaaacacattgcttgtgtctactgaagtgtttactcttcatttttgattttatcactctagccctgaatgcatttgccatctattgatgtcatggtagaatgtttgaagaaatgcccttaaggtgttagatgaaatgtctatatggatgcattaggcaactgccctcaaaggattagataaaatgagtatatgaatggataggcacctctaacgcacatgtaccacatctttgccatgcctgtggtgttagttttgatgtacaagacaacaatatgaatttcaattttatcttattattctatcaacagatttattcagtgtcttcctttagaagcagtggttgtaaatgttcaaagtagcacttattattcatgttcattgagaaatcaacagtaccgatttctgatattttttatattgtttgttttttaatgctgttggtctgctgcaatagtacactgctacaataaattggttagtgttgctataaaatttgatgcacaatatatgttcaacatatttcatatcaaagtaccatcatcaattaggatcacttattttttccctgaaaagttaagcttacatacttcatcatcaatcctttgatttgaaaaattggtatgtgtggacttaccaaacgatgcagctctagcagtacgatcctattgcacggcactgcggcagtacacgactaccaaaggtccacatctttgttctttgcctgtgtgcatgtgctaaccacaaagatgacacaatacattaaagtgagcatcggggtaggtcccgcgccaaaggtttattgtgctttcaattctagaactctaacacaaaagaaggattagagtatcttctccacttactaaatatagcactatattgattattaaattatctatggcgagtgagtaggctctgagtccctcggaggatggactcaaagatggggaggcaatagctgcgctgcaaaaaaatggaatttatgcctgcagaaatatggctgcctcacaacactctcaagctcagacgaagttgccactaaaccctcaagtgaatgtgtgaaacaatcaattagtaaggagaaatatttgtaacttaatttcccaccaagaattatattttaaatttactttagaaggctttattcatagtacatttaaatttgagcatgctgttatgccaccatatcttctattttactgctaggctcagcaaggttgagcatgctattatgccatccataaaaaaattaacatgctgaatgttttttttccggttcaattgaaaattacaatggttgattctttttcctaattatgcattctatcataatctttctgcaatattcaaggctcgttgtttatccaagccttttacaacttcataagacacaatgcattcgggctgcaagcttttgttacaaggtcagtaagctaagtcgcaatgcattcaagttgcaatcttttgctacatgtcagtaagtttcactgttggctccataaacaattcatgctttaactagatgctatatatgtattttagtgtaaaaatgaattatcaaaatctatgcgcctagtagaaaattaaaaaaacgacctacattttgggacggaggaagtagctattaatgtccaaatcaagagtcaccagctacaaaacgaacaccactggtcaatgatgatggtgcggcaacgccgcgccccgttctttctagttatatatactatagcttcaacctctctagttgctcgcatgttgtctctcactcgtgtttaggtttaacacaaccatcaacctaaaccacactctcttctaacttttttttttaattcttggtgcctactgtatgttgttaacaacgatacagtcaccaactcaccataagataaaacttcacttaaaaactaaatctggtttcatattttttgaagctttgaaacaaaattttcacatctttctaagattaatccagatttcaggaatttaactacatgattatttttggaaaaaaacatctgtagtccgaaaaaacagtccatacagggccaaattctacagcccaattaacctccaaggaccgaggctccaaccaaaagggccccgacccagtgtcaatgtaaaacgcgaggatattttccccttcaccattcccttctcatcccctacctctcttggtttcgctggtaggcggcagcccgactaaaggaacgcccgccgtcgccgtcgccgtcgccgacttcacctgcgcccctctattggaacacctgcttgctgttttttcttctctgttcacctcgtctggccgggccggactgccgcagccttactcccagctgcccaggtttctgttggacccttcgacggcaacgagcatccaccataccaggtaggtcgacctgcgccaatgcactgacaacacggacacgggggatacattcttcggtgaagaataatcttagctttggacctttttagtggactcgagctattgcaatggagattgtgaacagtgtttccttcagctcaattggagtcggaagaattgtaataaacaagacagtgaaggtaggatgccaaacacaccggattggctggaagctaacaaggacatgttgcgagtactctcctggtgcttctagaaagaagcaagagaagtatgagcaacaaccacagaacgtcgatcttccagaattacacccaaaaaacaaaaagaaacccttccctgttccgattaaaaagatgctgcaagcttctcggcgagagaagaggcttgcacaaatgcatatagagaagcctcttgaacccccaaagaacggtttgcttgtgccagagcttgttccagttgcacatgaagtccttgataactggaaagtgctaatcagagggctctctcaacttctgaatgttgtttcagtttatggttgcagaaagtgtcctcaagtccatgttggtccagttggccaccagatccaagactgttacggttccggaagccagcgtcggaacagtcatcactcttgggctagaggttccatcaatgatgttctcatcccaattgagtcttaccatctttttgacccatttggtcggagagtgaagcatgataccaggtttgattatgataggataccagcaattgttgagctatgcattcaggctggtgttgacttaccacaatacccctcgaggcgacggactgctcctgtccggatgataggcaagaaggtgattgaccgcggtgagtttgttgatgagcccaagccacaacgttcagaacactgtgtatctctgcttgctgagctcgacacattcagcaaccaacaagtccagtcaccttcaccatcaaatatgaaagagcttgccaagaggacactgaaagcataccttaatgtccggcgaggcgtcgagcagctgatgagcaagtacactgtgaaagcatgtgggtactgctctgaggtccatgttggtccgtggggccacaatgtgaagctctgcggggctttcaagcaccagtggcgggatggcaagcatgggtggcaggacgcggtggttgatgaggtcatcccgcccaactacgtgtggcatgtccctgaccccagtggctctcctctcagatcctctctcaggagtttctatggcaaagctccagctgtcgtagagctgtgtgtgcaggctggggctgaaatacctgacgagtatcgggccatgatgaggactgacattgtcatcccggactctgtggaagctcggatggctgcataacaacaatgatctgagcttctacgactactatcctgcagttcttgtccagagtacagattccaaccaaatgtgccgctttctgggcatgctgtgatggtgggtctcttagccctgtggtaattgctcagggagcagcagatgcatagtttgtataatataattagcatagctaaatcatgatcgtttgggatttaaagctgagttgaagatctgatttaagtactattcgttgaaaggtttaacgcatgaacctaggacgcgcaatgacaagcctgatagcctgaaagctaaaaggaatggtctctgcaccatttataaggtccatcccatcttgtttacaggccgcagatgctttattcctgcctatgctagactgtgaggcacctagaatgctcaggagtcgccatactgatggccttccactttctccatcggtacaattgcgagctaatgctttggattaaactaatcacggtggtttgttcggggtatttgtgcgcctggctgtagttaatcatggactaaaagcctgtgctgtgcacctgtgcccgcccccagatcgacactttgggggtatggctacatgtatagtcctaccagatcgtcggcatattgtgttcccctttttgctgtatactagtactttgtaacatgcaagcggaggctacttattcagcgccgttccctaattgtgcttatgaaatgttttgagctgtatatggaacggatggtgatgaatgatccatgggcgaaagattcatccatgtgtgatcagctctgtgatgaatgatccatgagacctgattggctacaagaggtactaaactcttaggccacttatcgttaatagagggattacccaggtctcaaagctatagtgtcgttctcgtggtggagactgattatcacttcgtggcagtgaagcacccctacacaacttcttcaatagcccaactcttgatggacaacattgtcgcactccatcgtcttcttcctcactgtattgtcactgacagagacatcatatttctcagaactcttcaagctctacaaagtcgatctacaactgagtacaacctatcattctcaggcagatgggcaaaaaccaagaagtcaaccagtacagatgggcaaactgagagagtcaaactagtgtctggagatgttcctctgttgtgcagttcaggactccccgaatacatggaagtcttggttgtcatttgcagagctatggtacaactctgcttaccatgcatccattggatgccctccattcaaggccctatatggttttgagccatacagccttctactcctgctacagtgtctggcttagtggaaagtagagagctacatttacgatcaccgaaacataatgaagctcatggtagataggaagtgctctgacttgcagttccaagtgggtgatctagtattactgaatttacagccatacactgagttctctgtggctaacaagtatggattattcaggaaagcacattcgctctctagaaatacagaactagctcttgtttattggagtgtcaagaa

SEQ ID NO: 24070 - DNA, 3218 bp, Zea Mays
ttacttcttccttatcacctccatctctcaccccggtctctctcccctcgcgcggccggcgccccaactccctcccctccggttctcgctcgcctccacttcttcctcctcgcctctgggtcctgacgccttccaccgtcggccggagaagcacctccgccttgccaccgtcgggccctgctgtctccagccatcgccgctccacctccgccaccccaccaccgggtcccgtcggcatctggccactgttgccggtgcagcggcgtggcgaggaagcgcgggaggagccggtacggcgggacgcggagggccccgtcgcctggtccgcaacagcctgcatcccgggaggccacgagtaagataaggtgagggagaagaagtgaaatccggccgccatgccgaggcctcaaccttccgtgtgtctcctatctgaagaccccccactacctccactgactcccccttcttttaatgtcgttaaagttgctttgaattttcaattgactaatgcgcgtccgttcaacacaacgaacagaaatggccatcagctgacttgcacgtttgtgagacaggcttgaaatatgaaacacattgcttgtgtctactgaagtgtttactcttcatttttgattttatcactctagccctgaatgcatttgccatctattgatgtcatggtagaatgtttgaagaaatgcccttaaggtgttagatgaaatgtctatatggatgcattaggcaactgccctcaaaggattagataaaatgagtatatgaatggataggcacctctaacgcacatgtaccacatctttgccatgcctgtggtgttagttttgatgtacaagacaacaatatgaatttcaattttatcttattattctatcaacagatttattcagtgtcttcctttagaagcagtggttgtaaatgttcaaagtagcacttattattcatgttcattgagaaatcaacagtaccgatttctgatattttttatattgtttgttttttaatgctgttggtctgctgcaatagtacactgctacaataaattggttagtgttgctataaaatttgatgcacaatatatgttcaacatatttcatatcaaagtaccatcatcaattaggatcacttattttttccctgaaaagttaagcttacatacttcatcatcaatcctttgatttgaaaaattggtatgtgtggacttaccaaacgatgcagctctagcagtacgatcctattgcacggcactgcggcagtacacgactaccaaaggtccacatctttgttctttgcctgtgtgcatgtgctaaccacaaagatgacacaatacattaaagtgagcatcggggtaggtcccgcgccaaaggtttattgtgctttcaattctagaactctaacacaaaagaaggattagagtatcttctccacttactaaatatagcactatattgattattaaattatctatggcgagtgagtaggctctgagtccctcggaggatggactcaaagatggggaggcaatagctgcgctgcaaaaaaatggaatttatgcctgcagaaatatggctgcctcacaacactctcaagctcagacgaagttgccactaaaccctcaagtgaatgtgtgaaacaatcaattagtaaggagaaatatttgtaacttaatttcccaccaagaattatattttaaatttactttagaaggctttattcatagtacatttaaatttgagcatgctgttatgccaccatatcttctattttactgctaggctcagcaaggttgagcatgctattatgccatccataaaaaaattaacatgctgaatgttttttttccggttcaattgaaaattacaatggttgattctttttcctaattatgcattctatcataatctttctgcaatattcaaggctcgttgtttatccaagccttttacaacttcataagacacaatgcattcgggctgcaagcttttgttacaaggtcagtaagctaagtcgcaatgcattcaagttgcaatcttttgctacatgtcagtaagtttcactgttggctccataaacaattcatgctttaactagatgctatatatgtattttagtgtaaaaatgaattatcaaaatctatgcgcctagtagaaaattaaaaaaacgacctacattttgggacggaggaagtagctattaatgtccaaatcaagagtcaccagctacaaaacgaacaccactggtcaatgatgatggtgcggcaacgccgcgccccgttctttctagttatatatactatagcttcaacctctctagttgctcgcatgttgtctctcactcgtgtttaggtttaacacaaccatcaacctaaaccacactctcttctaacttttttttttaattcttggtgcctactgtatgttgttaacaacgatacagtcaccaactcaccataagataaaacttcacttaaaaactaaatctggtttcatattttttgaagctttgaaacaaaattttcacatctttctaagattaatccagatttcaggaatttaactacatgattatttttggaaaaaaacatctgtagtccgaaaaaacagtccatacagggccaaattctacagcccaattaacctccaaggaccgaggctccaaccaaaagggccccgacccagtgtcaatgtaaaacgcgaggatattttccccttcaccattcccttctcatcccctacctctcttggtttcgctggtaggcggcagcccgactaaaggaacgcccgccgtcgccgtcgccgtcgccgacttcacctgcgcccctctattggaacacctgcttgctgttttttcttctctgttcacctcgtctggccgggccggactgccgcagccttactcccagctgcccaggtttctgttggacccttcgacggcaacgagcatccaccataccaggtaggtcgacctgcgccaatgcactgacaacacggacacgggggatacattcttcggtgaagaataatcttagctttggacctttttagtggactcgagctattgcaatggagattgtgaacagtgtttccttcagctcaattggagtcggaagaattgtaataaacaagacagtgaagccggccacaaaggattgacactacagtctgcactcagctttggattcttgacatgtatccaccccatcaatc

SEQ ID NO: 24071 - DNA, 1795 bp, Zea Mays
gggcaaaatggacgacggggttgacggagaaagatggggagctcgctcgaccaagcagacgcacatgaacctccatgccagtgtagccgtcctccaagggtgctgcgacaagatcattggcgatgacactgtgtactactatcatgacatgatagtggaaatgattaaatggggatatcaagaaggaaaaactctctttggatttggttatgatttccgtcaaagcaacaggctctcagagacacttgacagattttccaaaaagctggagtcagtgtacacagcttctggtggaaaaaagatcaatctcattactcattcaatggggggattacttgtgaagtgtttcatctctctgcacagtgatacatttgaaaaatatgtcaagagttggatcgcaattgctgcaccattccaaggtgcccctgggtacataactactagtctgctcaatggaatgtcttttgtcgaaggatgggaatcaagattctttatttccaaatggtgtatgcagcaattgctacttgagtgcccatcaatctatgagttgctggcaaaccctaacttccagtggaaagacatcccactgctacagatttggagagagaatttggataacagtggcaagaaaagtgccctgttagagtcgtatgagcctgaggaagcaataatgatgattaaagaggctctttccagtaatgagatcattgctgatggcatgcatattccggtgccccttaatttggatatattgaattgggcaaaggaaacttatgatcttttatgcagtacaaagcttccggaatcagtgaaattctacaacatttatgggattgattatgatactccacatactgtctgctatggcagtgaacagcatccggtttcaagtcttagtagcctcttatatgctcagggaaaatacgtctatgttgatggcgacggatctgttcccgcagaatcagcaaaggctgacggatttaatgcagtggcaagggttggggtggctgctgaccaccggggaatcgtgtgcagtcgccgcgtgttccggatcgttcagcactggctgcacgctggagaacctgacccgttctacgacccgctgagcgactatgtcatactcccaacactctacgaaatcgagaagcatcgtgagaaacacggggatgtcacgtccgtagcggaggactgggagatcatctccccgaatgacggcaagaccttgaggccaggcgagcttcctcctatggtcagcacactgaccacgagccgggaaggcaaggagggtgcactggaagaggcgcaggccactgtggtcgttcacccggagaagaaggggcggcagcatgtgcaagttagggctgtgggtgtcagccatggtggctaaagccgtaggagccaccactttggttgtctactctatctagcagtagcagctatacctgtaggtgcacgcactgtaaaattggatgtacatatatggctatgacctctgtagggactctggttttagaactataaatgggcaccctgcctgcttgtaaatgttcagaaccgaaaacacaggccctgttctttttttttccttttttaaaaaaataaaaagatggtaaaggattccattacttggaaggcacattacctatgtgggggcagagctgtccccattggagagtttggagtgctgagacctcagtgcttcacgggagaaaagtttggctacttttgtgtgctgtgttaggtgactcgcaaattcatcagtcaatcagtggacgtagcgttcagtggcctgggt

SEQ ID NO: 24072 - DNA, 1944 bp, Zea Mays
gggcaaaatggacgacggggttgacggagaaagatggggagctcgctcgaccaagcagacgcacatgaacctccatgccagtgtagccgtcctccaagggtgctgcgacaaggtagagagagcaacgcggcccaccgccgaggcgatgcgcgtggcgtgccctgatgcggaggcagacacggagaaatccggcgttaaggcggagctggcggggcagagacggccagcagggaggcaaagcgaccggccccgacatggataatcctcgttgtcgtatccctcggcaggcctcgccgaggcagacgcgacaggaatccacacgatccgcgggcggcgctgctcctgagatcattggcgatgacactgtgtactactatcatgacatgatagtggaaatgattaaatggggatatcaagaaggaaaaactctctttggatttggttatgatttccgtcaaagcaacaggctctcagagacacttgacagattttccaaaaagctggagtcagtgtacacagcttctggtggaaaaaagatcaatctcattactcattcaatggggggattacttgtgaagtgtttcatctctctgcacagtgatacatttgaaaaatatgtcaagagttggatcgcaattgctgcaccattccaaggtgcccctgggtacataactactagtctgctcaatggaatgtcttttgtcgaaggatgggaatcaagattctttatttccaaatggtgtatgcagcaattgctacttgagtgcccatcaatctatgagttgctggcaaaccctaacttccagtggaaagacatcccactgctacagatttggagagagaatttggataacagtggcaagaaaagtgccctgttagagtcgtatgagcctgaggaagcaataatgatgattaaagaggctctttccagtaatgagtacaaagcttccggaatcagtgaaattctacaacatttatgggattgattatgatactccacatactgtctgctatggcagtgaacagcatccggtttcaagtcttagtagcctcttatatgctcagggaaaatacgtctatgttgatggcgacggatctgttcccgcagaatcagcaaaggctgacggatttaatgcagtggcaagggttggggtggctgctgaccaccggggaatcgtgtgcagtcgccgcgtgttccggatcgttcagcactggctgcacgctggagaacctgacccgttctacgacccgctgagcgactatgtcatactcccaacactctacgaaatcgagaagcatcgtgagaaacacggggatgtcacgtccgtagcggaggactgggagatcatctccccgaatgacggcaagaccttgaggccaggcgagcttcctcctatggtcagcacactgaccacgagccgggaaggcaaggagggtgcactggaagaggcgcaggccactgtggtcgttcacccggagaagaaggggcggcagcatgtgcaagttagggctgtgggtgtcagccatggtggctaaagccgtaggagccaccactttggttgtctactctatctagcagtagcagctatacctgtaggtgcacgcactgtaaaattggatgtacatatatggctatgacctctgtagggactctggttttagaactataaatgggcaccctgcctgcttgtaaatgttcagaaccgaaaacacaggccctgttctttttttttccttttttaaaaaaataaaaagatggtaaaggattccattacttggaaggcacattacctatgtgggggcagagctgtccccattggagagtttggagtgctgagacctcagtgcttcacgggagaaaagtttggctacttttgtgtgctgtgttaggtgactcgcaaattcatcagtcaatcagtggacgtagcgttcagtggcctgggt

SEQ ID NO: 24073 - DNA, 2132 bp, Zea Mays
gggcaaaatggacgacggggttgacggagaaagatggggagctcgctcgaccaagcagacgcacatgaacctccatgccagtgtagccgtcctccaagggtgctgcgacaagatcattggcgatgacactgtgtactactatcatgacatgatagtggaaatgattaaatggggatatcaagaaggaaaaactctctttggatttggttatgatttccgtcaaagcaacaggctctcagagacacttgacagattttccaaaaagctggagtcagtgtacacagcttctggtggaaaaaagatcaatctcattactcattcaatggggggattacttgtgaagtgtttcatctctctgcacagtgatacatttgaaaaatatgtcaagagttggatcgcaattgctgcaccattccaaggtatcacttgcctgagttccatttatattaattattaatgttgttcaacatagggcatatttgaaatagctgttggatgtctaacctgcctagtggtactaatgattgcaaatctcacctgtacattaagagtatagtaagagctctaagcaggtactattcactattgtcttgcttttttcaccattgattcctagaagtcacatgactgatccccttttgtcatgtaacatcatttattccatataccctcatcttgtgcttttccttgctcaacatgttaccttaaacatctctcctaggctgctattttgcttcacaaagcaacctgctgcaggtgcccctgggtacataactactagtctgctcaatggaatgtcttttgtcgaaggatgggaatcaagattctttatttccaaatggtgtatgcagcaattgctacttgagtgcccatcaatctatgagttgctggcaaaccctaacttccagtggaaagacatcccactgctacagatttggagagagaatttggataacagtggcaagaaaagtgccctgttagagtcgtatgagcctgaggaagcaataatgatgattaaagaggctctttccagtaatgagatcattgctgatggcatgcatattccggtgccccttaatttggatatattgaattgggcaaaggaaacttatgatcttttatgcagtacaaagcttccggaatcagtgaaattctacaacatttatgggattgattatgatactccacatactgtctgctatggcagtgaacagcatccggtttcaagtcttagtagcctcttatatgctcagggaaaatacgtctatgttgatggcgacggatctgttcccgcagaatcagcaaaggctgacggatttaatgcagtggcaagggttggggtggctgctgaccaccggggaatcgtgtgcagtcgccgcgtgttccggatcgttcagcactggctgcacgctggagaacctgacccgttctacgacccgctgagcgactatgtcatactcccaacactctacgaaatcgagaagcatcgtgagaaacacggggatgtcacgtccgtagcggaggactgggagatcatctccccgaatgacggcaagaccttgaggccaggcgagcttcctcctatggtcagcacactgaccacgagccgggaaggcaaggagggtgcactggaagaggcgcaggccactgtggtcgttcacccggagaagaaggggcggcagcatgtgcaagttagggctgtgggtgtcagccatggtggctaaagccgtaggagccaccactttggttgtctactctatctagcagtagcagctatacctgtaggtgcacgcactgtaaaattggatgtacatatatggctatgacctctgtagggactctggttttagaactataaatgggcaccctgcctgcttgtaaatgttcagaaccgaaaacacaggccctgttctttttttttccttttttaaaaaaataaaaagatggtaaaggattccattacttggaaggcacattacctatgtgggggcagagctgtccccattggagagtttggagtgctgagacctcagtgcttcacgggagaaaagtttggctacttttgtgtgctgtgttaggtgactcgcaaattcatcagtcaatcagtggacgtagcgttcagtggcctgggt

SEQ ID NO: 24074 - DNA, 1746 bp, Zea Mays
cggcaagcccggctccatcgccagtgctggagcaacgtcgacgagccgcacagggagtacaagatcattggcgatgacactgtgtactactatcatgacatgatagtggaaatgattaaatggggatatcaagaaggaaaaactctctttggatttggttatgatttccgtcaaagcaacaggctctcagagacacttgacagattttccaaaaagctggagtcagtgtacacagcttctggtggaaaaaagatcaatctcattactcattcaatggggggattacttgtgaagtgtttcatctctctgcacagtgatacatttgaaaaatatgtcaagagttggatcgcaattgctgcaccattccaaggtgcccctgggtacataactactagtctgctcaatggaatgtcttttgtcgaaggatgggaatcaagattctttatttccaaatggtgtatgcagcaattgctacttgagtgcccatcaatctatgagttgctggcaaaccctaacttccagtggaaagacatcccactgctacagatttggagagagaatttggataacagtggcaagaaaagtgccctgttagagtcgtatgagcctgaggaagcaataatgatgattaaagaggctctttccagtaatgagatcattgctgatggcatgcatattccggtgccccttaatttggatatattgaattgggcaaaggaaacttatgatcttttatgcagtacaaagcttccggaatcagtgaaattctacaacatttatgggattgattatgatactccacatactgtctgctatggcagtgaacagcatccggtttcaagtcttagtagcctcttatatgctcagggaaaatacgtctatgttgatggcgacggatctgttcccgcagaatcagcaaaggctgacggatttaatgcagtggcaagggttggggtggctgctgaccaccggggaatcgtgtgcagtcgccgcgtgttccggatcgttcagcactggctgcacgctggagaacctgacccgttctacgacccgctgagcgactatgtcatactcccaacactctacgaaatcgagaagcatcgtgagaaacacggggatgtcacgtccgtagcggaggactgggagatcatctccccgaatgacggcaagaccttgaggccaggcgagcttcctcctatggtcagcacactgaccacgagccgggaaggcaaggagggtgcactggaagaggcgcaggccactgtggtcgttcacccggagaagaaggggcggcagcatgtgcaagttagggctgtgggtgtcagccatggtggctaaagccgtaggagccaccactttggttgtctactctatctagcagtagcagctatacctgtaggtgcacgcactgtaaaattggatgtacatatatggctatgacctctgtagggactctggttttagaactataaatgggcaccctgcctgcttgtaaatgttcagaaccgaaaacacaggccctgttctttttttttccttttttaaaaaaataaaaagatggtaaaggattccattacttggaaggcacattacctatgtgggggcagagctgtccccattggagagtttggagtgctgagacctcagtgcttcacgggagaaaagtttggctacttttgtgtgctgtgttaggtgactcgcaaattcatcagtcaatcagtggacgtagcgttcagtggcctgggt

SEQ ID NO: 24075 - DNA, 2628 bp, Zea Mays
ccaaaaccctaacctgccgcgcgatcaaaggatgccggagggccacgtgccggcgcctcccccgccggccggtccaggccgtccgtttctccggtggggacaggacagggacgactatgcagccacagctcggcggtcgacgcatcacacgggcgcaacagtattttagctgctgctcgtctcatctctgagactctgacccagtgaccatgatcacctagccgagctccgtccctccatctgcctctctctctttcttcccgcggcctgtgcccccagattgccgcggcctccggctccgcccctctcctccagcaccagcagtccatctccggctctcttccctctcgttaggcgctagctaggctctagcccctagtctggtcctgcccgctgtgcctgtgcggctgtgcgtgcacagcgaaggcgcacagctagcggcttctggccactgggcgtcgccataaacagtggagattcccgcccccattttcccaattatggatatccagcggcgaccgggggagcactgctgaggccgctcgcccgcccgcacgccattgctcccgtcgagggtcacaacttatcctacacatcgtagctccgcgacctgttcggcaaaatgaggccttcagatggcaggacgcagctttcaggctttgcacaatcagatgaatcaacacttgatgtggaggggcattgctaccaccagcagtcattcccttcctctccatcgatgcaaccgattgcttctggctgcacacacacagagaacagcgctgcgtacttcttatggccaacatcaaacctgcagcattgtgcagccgagggacgcgcaaactacttcgccaacctttcaaagggactgttgcccaagtctggccggttgcccaagggccagcaagcaaatagcttgcttgacttgatgactataagagctttccatagcaaggtgttgcgttgctttagccttggaacggcggtgggcttccgcatcaggaaaggggctctgacagatatccccgcgattctttgctttgttgctcgcaaagttcacaagaagtggcttaatccggaccaatgccttcctgccattgttgagggtccaggaggtatttggtgtgatgttgacgttgttgagttctcgtactacggtgcaccagctcaaaatccaaaagtgcaaatgttcactgagcttgttgataagttgtgtggcagtgatgaatgtattggctctggctctcaggttgcaagtcaggacacttttggaactttgggcgccattgtaaaacggcgaactggcaacaagcagataggtttcctcaccaaccgacatgttgctgttgacttggactacccaaaccagaagatgtatcacccattgccacccaaccttgggcctggtgtttatcttggagctgtcgaaagggcaacatctttcatcacagatgatgtttggtatggaatctatgctggaacaaacccagagacatttgtacgcgccgacggggcattcatcccatttgctcacgacttcgacatctccacagtcacaactacagttaggggtgttggtgacattggggatgttaaggttatagatctgcagagtccacttaatagcctcatagggaggcaagtatgcaaaatcggcagaagttctggtcacacaactggaactgtggtggcttatgcccttgagtacaatgacgagaaaggaataagcttcttcactgacctccttgttgtcggcgaaaaccgccaaacttttgatctagaaggtgatagtggaagccttattatcctgactggccaggataatgagaagccgtgtcccattgggataatatggggtggcacagcaaaccgtgggaggctaaagcttaggtgtgaccatggccctgaaaattggaccagtggagttgatcttggccgccttctggatcgtcttgaacttgaccttatcataaccaatgaatcactcaaagatgccgtgcagcagcaaaggctcgcgttggtggctgcagctaactctgctgttggggagtcgtcgacagcagctgttcctgccccagaagaaaaggtggagatcttcgagcctctggggatcaaaatcgagcagctgcctcggcacgacgtttcggcgacgacggaaggggatgaggcagctgtgatcaatgtggaagagcgccagttcatctcaaactttgtcggcatgtcccctgtacgcgacgaccaggatgctccgaggcaaatcgcgaacctgaacaatccgtcagaggaagaactcgccatgtcgcttcacctaggtgaccgggaggccaagcggcttcgcactgacacagaatccgagcttgacctggagaagtgacgcactcatttcagcgtctccgcattgagtcataaagtagtccgaagaaggtgacctgtggttcagcagactgaacctgcagccgtagctgcagtttcctggcacaagccttatcatgtactatggtagcgataaagtggtcttgatcagttttctctgtccaaccattaacggagttgtttcaagatcactagatcagcttccgggaaaccttgtgttttcaccttttgaattattcttacggaacgtttggatgc

SEQ ID NO: 24076 - DNA, 2206 bp, Zea Mays
ccaaaaccctaacctgccgcgcgatcaaaggatgccggagggccacgtgccggcgcctcccccgccggccggtccaggccgtccgtttctccggtggggacaggacagggacgactatgcagccacagctcggcggtcgacgcatcacacgggcgcaacagtattttagctgctgctcgtctcatctctgagactctgacccagtgaccatgatcacctagccgagctccgtccctccatctgcctctctctctttcttcccgcggcctgtgcccccagattgccgcggcctccggctccgcccctctcctccagcaccagcagtccatctccggctctcttccctctcgttaggcgctagctaggctctagcccctagtctggtcctgcccgctgtgcctgtgcggctgtgcgtgcacagcgaaggcgcacagctagcggcttctggccactgggcgtcgccataaacagtggagattcccgcccccattttcccaattatggatatccagcggcgaccgggggagcactgctgaggccgctcgcccgcccgcacgccattgctcccgtcgaggaggtatttggtgtgatgttgacgttgttgagttctcgtactacggtgcaccagctcaaaatccaaaagtgcaaatgttcactgagcttgttgataagttgtgtggcagtgatgaatgtattggctctggctctcaggttgcaagtcaggacacttttggaactttgggcgccattgtaaaacggcgaactggcaacaagcagataggtttcctcaccaaccgacatgttgctgttgacttggactacccaaaccagaagatgtatcacccattgccacccaaccttgggcctggtgtttatcttggagctgtcgaaagggcaacatctttcatcacagatgatgtttggtatggaatctatgctggaacaaacccagagacatttgtacgcgccgacggggcattcatcccatttgctcacgacttcgacatctccacagtcacaactacagttaggggtgttggtgacattggggatgttaaggttatagatctgcagagtccacttaatagcctcatagggaggcaagtatgcaaaatcggcagaagttctggtcacacaactggaactgtggtggcttatgcccttgagtacaatgacgagaaaggaataagcttcttcactgacctccttgttgtcggcgaaaaccgccaaacttttgatctagaaggtgatagtggaagccttattatcctgactggccaggataatgagaagccgtgtcccattgggataatatggggtggcacagcaaaccgtgggaggctaaagcttaggtgtgaccatggccctgaaaattggaccagtggagttgatcttggccgccttctggatcgtcttgaacttgaccttatcataaccaatgaatcactcaaagatgccgtgcagcagcaaaggctcgcgttggtggctgcagctaactctgctgttggggagtcgtcgacagcagctgttcctgccccagaagaaaaggtggagatcttcgagcctctggggatcaaaatcgagcagctgcctcggcacgacgtttcggcgacgacggaaggggatgaggcagctgtgatcaatgtggaagagcgccagttcatctcaaactttgtcggcatgtcccctgtacgcgacgaccaggatgctccgaggcaaatcgcgaacctgaacaatccgtcagaggaagaactcgccatgtcgcttcacctaggtgaccgggaggccaagcggcttcgcactgacacagaatccgagcttgacctggagaagtgacgcactcatttcagcgtctccgcattgagtcataaagtagtccgaagaaggtgacctgtggttcagcagactgaacctgcagccgtagctgcagtttcctggcacaagccttatcatgtactatggtaaaacttgattcagcaattgtaggatgttaggtggtatcccctgcagttttgttgtgagacttgatatgcacaagcacaatgctgaatccccctatatcaaaacaatgcaggtagcgataaagtggtcttgatcagttttctctgtccaaccattaacggagttgtttcaagatcactagatcagcttccgggaaaccttgtgttttcaccttttgaattattcttacggaacgtttggatgc

SEQ ID NO: 24077 - DNA, 2017 bp, Zea Mays
ccaaaaccctaacctgccgcgcgatcaaaggatgccggagggccacgtgccggcgcctcccccgccggccggtccaggccgtccgtttctccggtggggacaggacagggacgactatgcagccacagctcggcggtcgacgcatcacacgggcgcaacagtattttagctgctgctcgtctcatctctgagactctgacccagtgaccatgatcacctagccgagctccgtccctccatctgcctctctctctttcttcccgcggcctgtgcccccagattgccgcggcctccggctccgcccctctcctccagcaccagcagtccatctccggctctcttccctctcgttaggcgctagctaggctctagcccctagtctggtcctgcccgctgtgcctgtgcggctgtgcgtgcacagcgaaggcgcacagctagcggcttctggccactgggcgtcgccataaacagtggagattcccgcccccattttcccaattatggatatccagcggcgaccgggggagcactgctgaggccgctcgcccgcccgcacgccattgctcccgtcgagggtcacaacttatcctacacatcgtagctccgcgacctgttcggcaaaatgaggccttcagatggcaggacgcagctttcaggctttgcacaatcagatgaatcaacacttgatgtggaggggcattgctaccaccagcagtcattcccttcctctccatcgatgcaaccgattgcttctggctgcacacacacagagaacagcgctgcgtacttcttatggccaacatcaaacctgcagcattgtgcagccgagggacgcgcaaactacttcgccaacctttcaaagggactgttgcccaagtctggccggttgcccaagggccagcaagcaaatagcttgcttgacttgatgactataagagctttccatagcaaggtgttgcgttgctttagccttggaacggcggtgggcttccgcatcaggaaaggggctctgacagatatccccgcgattctttgctttgttgctcgcaaagttcacaagaagtggcttaatccggaccaatgccttcctgccattgttgagggtccaggaggtatttggtgtgatgttgacgttgttgagttctcgtactacggtgcaccagctcaaaatccaaaagtgcaaatgttcactgagcttgttgataagttgtgtggcagtgatgaatgtattggctctggctctcaggttgcaagtcaggacacttttggaactttgggcgccattgtaaaacggcgaactggcaacaagcagataggtttcctcaccaaccgacatgttgctgttgacttggactacccaaaccagaagatgtatcacccattgccacccaaccttgggcctggtgtttatcttggagctgtcgaaagggcaacatctttcatcacagatgatgtttggtatggaatctatgctggaacaaacccagagacatttgtacgcgccgacggggcattcatcccatttgctcacgacttcgacatctccacagtcacaactacagttaggggtgttggtgacattggggatgttaaggttatagatctgcagagtccacttaatagcctcatagggaggcaagtatgcaaaatcggcagaagttctggtcacacaactggaactgtggtggcttatgcccttgagtacaatgacgagaaaggaataagcttcttcactgacctccttgttgtcggcgaaaaccgccaaacttttgatctagaaggtgatagtggaagccttattatcctgactggccaggataatgagaagccgtgtcccattgggataatatggggtggcacagcaaaccgtgggaggctaaagcttaggtgtgaccatggccctgaaaattggaccagtggagttgatcttggccgccttctggatcgtcttgaacttgaccttatcataaccaatgaatcactcaaagataactgacagaatttatcctcgataaag

SEQ ID NO: 24078 - DNA, 1092 bp, Zea Mays
attgtcggcgcaagttggagcgcggcaagcgggtctgtcattgtcggcgccgccgtcagcagcccggcggcggcgggcgataccgcgctcgccgaaggcttccggctgggccacggcggcgtgtgaggtagaggcgctagcggctggccttcttccacgcggttgcagcaggctctgtggcgttctgctgctggttcacggacttgacctgaccggcggccagcccgatcgaggcgttccatcggcactgcagtgtcgcgacacggcgagcgcatcgcgcacagaagcagggcaggggatgcagcaccaatctgggagaaatcaattagaccctgttttttttatgcgcatagtagatttcattcgaatgccattatggaaattgcaagtactaccacttctttagatggacgctgtagcgaatccaccaagaatctcgtttaatttcaggcctgcctgtagattaattgtcctctatcatgctaacatctccatcagatcttatctaaggacggcgtcctattagcatgttagcgtcctaattatttttacactaaatatgttgctatggttagattgatgtttaggttacttctgaaactagctcgtctttgtaggttgatgatggggtcaactgcctatgcatacagtgcagcaccgacctctgggagtctgggtaggcgttgcagtttgcaaacaacaaatgcctgctgcaaaagtaaagaatctgaatcatcaaaagcactggattggtggaatctgtacaaggtcagaggtaaccgaagatattccgtagccatgtgccgtgtctatgcttgcctgttcgtcagacttggaataagctagctgcagcttctgctcaagtttgtccctctcttctgtcacctggagaactcggagaaattcaacacgagaaaaaacagctgggaaaactagcaaatgcatcatgcggttttaatcaagttggaaattccaataacacaaggacggcctgtattagcaagaacatactatgacaactgcaggattgcaaaactccaccatgttatttttattatttgctgatcatctatatgatggtgtgtgtgtttt

SEQ ID NO: 24079 - DNA, 1056 bp, Zea Mays
ctcttctatgaacagactgaacttgtctggaagttcaagcaatcgtgaagaagtatgacattcttttcatagcagatgaggttatcactgcatttggaaggctgggaactatgtttggatgcgattactataacatcaagccagatctagtttcactggccaaggctctttcaaacgcctacgtacccatcggggcaactcttgttagcccagagatatcagatgtgatccattcccagagcaataagcttggttcatttgctcatggattcacgtactccggccatccggttgcctgtgctgtggccattgaagctctgaaactttatcgcgaaagggacattcccggccatgtcaagcaaatcgccccaaagttccaggacgggattagggcgctggcagacagtccgattatcggggagatacgtggcttggggatgattatggggaccgaattcacaaacaacaagtcaccgactgatctgttccctgccgaatggggggtcggtgccatcttcggcgaagagtgccagaagcgcggcatgctggtgagggtcgctggcgacgccatcatgatgtcgccgacgctgatcatgacgcccggcgaagtcgacgagttggtgcgcatctacggggaagccctcaaggccacggaggagagggtggcagccctgcagtccaagaagaactagccaaaagggcggcgacgacgataacgataaacgccgggcgacgacggaccatatttgatgtacaggtgaataaacagccaagttcgtggctgcgagatggcaatagcgcgccggtctatgttcttgctctgtcgccaagcaaatggtggctcaactttttaaacatgtcatagatgtttttttcttcccttcctttcccttaaggaatggcaatacatctcaaatgtttgctgccctgtagttcctgaagataatgggtttcgtgtatatcgtgagtattagtagtgttcggatacatagctttgtaaaggcaaagcaataataaagtgaaggaactgcagtttcgagtctgcaagcatatata

SEQ ID NO: 24080 - DNA, 1917 bp, Zea Mays
gcggagcacggggactcggggagagagataataccgtggacaaaattgggcacgtcttcttctccgcgaacctcgcgtcctcctcgcctgcctgcctacaagtctcccccctcccctccccgtgcctccctcgggcctcgcttctcgcgctcttcctctcttgcctccgcctgcctccaggctccaacaacccgggagggcgccgtccgcccccgcctccgggagcgatgatgatcgcgcgacgcctgctccgatccaataatgcccccgcccagggttcctatgtctatgacattaatgggaacaagtatctggactctcttgcaggattatggtgcacagctttaggtggtagcgagcctcgcttagtcaaagcagcaactgagcaattaaacaaactacccttctaccattccttctggaaccgtacaacaaaaccttcgttggatcttgcacaggagatccttagcatgttcactgcaagggaaatggggaaagttttcttcacaaacagtggttcagaagcaaatgactctcaggtcaaactagtatggtattataacaatgcattggggaggccaaacaagaagaaatttattgcgcgatcaaaagcataccatggatctacattgatttcagcgagcctaactggtcttcctgccctacaccagaagtttgatctaccagcaccttttgttctgcacactgactgccctcactactggcgatatcatcttcctggcgagacagaagaagattttgcgactagacttgccaccaatttagagaacctcattctcaaagaaggaccagaaacaattgctgctttcattgctgaacctgtgatgggtgctggtggtgtcatccctcctccaaagacctattttgacaaggttcaagcaatcgtgaagaagtatgacattcttttcatagcagatgaggttatcactgcatttggaaggctgggaactatgtttggatgcgattactataacatcaagccagatctagtttcactggccaaggctctttcaaacgcctacgtacccatcggggcaactcttgttagcccagagatatcagatgtgatccattcccagagcaataagcttggttcatttgctcatggattcacgtactccggccatccggttgcctgtgctgtggccattgaagctctgaaactttatcgcgaaagggacattcccggccatgtcaagcaaatcgccccaaagttccaggacgggattagggcgctggcagacagtccgattatcggggagatacgtggcttggggatgattatggggaccgaattcacaaacaacaagtcaccgactgatctgttccctgccgaatggggggtcggtgccatcttcggcgaagagtgccagaagcgcggcatgctggtgagggtcgctggcgacgccatcatgatgtcgccgacgctgatcatgacgcccggcgaagtcgacgagttggtgcgcatctacggggaagccctcaaggccacggaggagagggtggcagccctgcagtccaagaagaactagccaaaagggcggcgacgacgataacgataaacgccgggcgacgacggaccatatttgatgtacaggtgaataaacagccaagttcgtggctgcgagatggcaatagcgcgccggtctatgttcttgctctgtcgccaagcaaatggtggctcaactttttaaacatgtcatagatgtttttttcttcccttcctttcccttaaggaatggcaatacatctcaaatgtttgctgccctgtagttcctgaagataatgggtttcgtgtatatcgtgagtattagtagtgttcggatacatagctttgtaaaggcaaagcaataataaagtgaaggaactgcagtttcgagtctgcaagcatatata

SEQ ID NO: 24081 - DNA, 2104 bp, Zea Mays
gcggagcacggggactcggggagagagataataccgtggacaaaattgggcacgtcttcttctccgcgaacctcgcgtcctcctcgcctgcctgcctacaagtctcccccctcccctccccgtgcctccctcgggcctcgcttctcgcgctcttcctctcttgcctccgcctgcctccaggctccaacaacccgggagggcgccgtccgcccccgcctccgggagcgatgatgatcgcgcgacgcctgctccgatccaataatgcccccgcccaggcaaccagcttattgaagcatgtaactggcaccgcaagtttgcaaggcaatgcggatagcttgttggatggtacagtcagacattttggctcagcaccgtctgcccagcctgaagaaaatgggttcaagggccacggcatgctggcgccttttacagctggctggcagagcaatgatttgcaccctctgatcattgagagatctgagggttcctatgtctatgacattaatgggaacaagtatctggactctcttgcaggattatggtgcacagctttaggtggtagcgagcctcgcttagtcaaagcagcaactgagcaattaaacaaactacccttctaccattccttctggaaccgtacaacaaaaccttcgttggatcttgcacaggagatccttagcatgttcactgcaagggaaatggggaaagttttcttcacaaacagtggttcagaagcaaatgactctcaggtcaaactagtatggtattataacaatgcattggggaggccaaacaagaagaaatttattgcgcgatcaaaagcataccatggatctacattgatttcagcgagcctaactggtcttcctgccctacaccagaagtttgatctaccagcaccttttgttctgcacactgactgccctcactactggcgatatcatcttcctggcgagacagaagaagattttgcgactagacttgccaccaatttagagaacctcattctcaaagaaggaccagaaacaattgctgctttcattgctgaacctgtgatgggtgctggtggtgtcatccctcctccaaagacctattttgacaaggttcaagcaatcgtgaagaagtatgacattcttttcatagcagatgaggctgggaactatgtttggatgcgattactataacatcaagccagatctagtttcactggccaaggctctttcaaacgcctacgtacccatcggggcaactcttgttagcccagagatatcagatgtgatccattcccagagcaataagcttggttcatttgctcatggattcacgtactccggccatccggttgcctgtgctgtggccattgaagctctgaaactttatcgcgaaagggacattcccggccatgtcaagcaaatcgccccaaagttccaggacgggattagggcgctggcagacagtccgattatcggggagatacgtggcttggggatgattatggggaccgaattcacaaacaacaagtcaccgactgatctgttccctgccgaatggggggtcggtgccatcttcggcgaagagtgccagaagcgcggcatgctggtgagggtcgctggcgacgccatcatgatgtcgccgacgctgatcatgacgcccggcgaagtcgacgagttggtgcgcatctacggggaagccctcaaggccacggaggagagggtggcagccctgcagtccaagaagaactagccaaaagggcggcgacgacgataacgataaacgccgggcgacgacggaccatatttgatgtacaggtgaataaacagccaagttcgtggctgcgagatggcaatagcgcgccggtctatgttcttgctctgtcgccaagcaaatggtggctcaactttttaaacatgtcatagatgtttttttcttcccttcctttcccttaaggaatggcaatacatctcaaatgtttgctgccctgtagttcctgaagataatgggtttcgtgtatatcgtgagtattagtagtgttcggatacatagctttgtaaaggcaaagcaataataaagtgaaggaactgcagtttcgagtctgcaagcatatata

SEQ ID NO: 24082 - DNA, 2150 bp, Zea Mays
cttcctctgtcgtccgatctgccgttatcagagcggagcacggggactcggggagagagataataccgtggacaaaattgggcacgtcttcttctccgcgaacctcgcgtcctcctcgcctgcctgcctacaagtctcccccctcccctccccgtgcctccctcgggcctcgcttctcgcgctcttcctctcttgcctccgcctgcctccaggctccaacaacccgggagggcgccgtccgcccccgcctccgggagcgatgatgatcgcgcgacgcctgctccgatccaataatgcccccgcccaggcaaccagcttattgaagcatgtaactggcaccgcaagtttgcaaggcaatgcggatagcttgttggatggtacagtcagacattttggctcagcaccgtctgcccagcctgaagaaaatgggttcaagggccacggcatgctggcgccttttacagctggctggcagagcaatgatttgcaccctctgatcattgagagatctgagggttcctatgtctatgacattaatgggaacaagtatctggactctcttgcaggattatggtgcacagctttaggtggtagcgagcctcgcttagtcaaagcagcaactgagcaattaaacaaactacccttctaccattccttctggaaccgtacaacaaaaccttcgttggatcttgcacaggagatccttagcatgttcactgcaagggaaatggggaaagttttcttcacaaacagtggttcagaagcaaatgactctcaggtcaaactagtatggtattataacaatgcattggggaggccaaacaagaagaaatttattgcgcgatcaaaagcataccatggatctacattgatttcagcgagcctaactggtcttcctgccctacaccagaagtttgatctaccagcaccttttgttctgcacactgactgccctcactactggcgatatcatcttcctggcgagacagaagaagattttgcgactagacttgccaccaatttagagaacctcattctcaaagaaggaccagaaacaattgctgctttcattgctgaacctgtgatgggtgctggtggtgtcatccctcctccaaagacctattttgacaaggttcaagcaatcgtgaagaagtatgacattcttttcatagcagatgaggttatcactgcatttggaaggctgggaactatgtttggatgcgattactataacatcaagccagatctagtttcactggccaaggctctttcaaacgcctacgtacccatcggggcaactcttgttagcccagagatatcagatgtgatccattcccagagcaataagcttggttcatttgctcatggattcacgtactccggccatccggttgcctgtgctgtggccattgaagctctgaaactttatcgggacattcccggccatgtcaagcaaatcgccccaaagttccaggacgggattagggcgctggcagacagtccgattatcggggagatacgtggcttggggatgattatggggaccgaattcacaaacaacaagtcaccgactgatctgttccctgccgaatggggggtcggtgccatcttcggcgaagagtgccagaagcgcggcatgctggtgagggtcgctggcgacgccatcatgatgtcgccgacgctgatcatgacgcccggcgaagtcgacgagttggtgcgcatctacggggaagccctcaaggccacggaggagagggtggcagccctgcagtccaagaagaactagccaaaagggcggcgacgacgataacgataaacgccgggcgacgacggaccatatttgatgtacaggtgaataaacagccaagttcgtggctgcgagatggcaatagcgcgccggtctatgttcttgctctgtcgccaagcaaatggtggctcaactttttaaacatgtcatagatgtttttttcttcccttcctttcccttaaggaatggcaatacatctcaaatgtttgctgccctgtagttcctgaagataatgggtttcgtgtatatcgtgagtattagtagtgttcggatacatagctttgtaaaggcaaagcaataataaagtgaaggaactgcagtttcgagtctgcaagcatatata

SEQ ID NO: 24083 - DNA, 3774 bp, Zea Mays
ccttttctttggggtagtataaaggctgttggtttcgatggagatgtccgcaaccaggaggacgcggccagagtgcttgctgcaacagttgcacattttggcaagctcgacattcttgtgaacggtgcagctggcaacttccttgcttccccggaggatttgacgcccaagggattcagaactgttcttgagatcgacactttgggtacatacacaatgtgctatgaagccctcaagtatctgaaaaagggtgggccaggaaaaggcccgtccactggtggactaatcattaacataagtgcaacactgcattacagtgcttcttggtaccaaatccatgtctctgctgctaaggctggggttgatagcatcacaagatcactggctctggagtggggaacagattatgacattagagtcaacgggattgcacctggaccaattcaagacaccccggggctgaggaagcttgcacctgaagaaatgagcaaggggcttcgagaaatgatgccattgttcaaatttggggagaagcgggacatagcaatggctgcgctctaccttgcttctgatgcaggtgtgaacacaatggagatggagatcttcaagagaaagaaaacaagacgctgacaggcaagcaaagctgtgcgattctcctcctgtgtctcaactgccgcgtgagaaggagagaatcatttctttgccttataagtcactatgacggtgccgtgaactctttcggaggtatccagtttaagaaaaagctcttgtaccatctcgttctgctggtctttgatcatgactcgtggatgacgatctgaactctgacggtaccagttcacaagtttctttctgaaaaaaaaaattctcccattcgaactgtcttgtaaggctgagcaaaccatagtttctggactaactatgattgttacatgaattttattgccttcatgttagaacttagaatgcagcgtctatgaaacgactggtaatatgtggcctatcccatttcagaaacatttatgtaagttagtatgtgtcactttgaattaggagggtgaaatctgccatgataaccgaaaactgtaacccaagacaagagctttagtttgaagccagcaacaaaatcatagtaggatatgtgagatgtcatgcatttgactatgcctgacatctagctgctagtaggtgtgtagtgtggacccgaagcctgtctacctatggaaactggaaagcattattgggcctacttatcccatgtcttggtcaattcaagacttgccatcttgtagatggagcctagatgcaatgcaaagctcatcaggtcagttaccagtccacagcatggttctttgtgcctctttccagcattgccgttttcagtcatccggttgctggtgccatcttctgatacacacacacacacacacatgctgcgcaacatgacatgcgttgcttgcaagtagttgagccacaagcacatactgttgttggatgtgatagtttgcctgatagagatctgtagcgtacatgctaggccaagagcctgctccgtacgtactaatcgataaatgaacagacagtagaaagttaagtgctataaacttctccatttacttaatttcttaatttgcagtttgatattttccttgtatgtggtatctagtgggacagcaggataggtgatgatgtgaataatgactttctgaaataaaaaataaataaataaactctgagtctgagctgaggaactctgtcgaccatgtataaaggtgagcaaaccccattggcttccctctacctcagaagaagcagatacaggtgataccactcctccatgaaatctctctctctcacacacacacacacacatattctcattctgcaacttagcacaagaacattttgcgcaaatgttgtttgtttgattttatagacctgctcatgctttaatacatctgatcttcataaaagtttgattttttccgaaatacagtataagaactgcacagttctactagcatttgcttctgtatagataactttctgttgtatcctgcatatgtacctatttgtttccatctcttgtgactttattggcttgaagccatttgctatcatctcttggtcatacatataaaatcttttcgtcttctcgtgcttatgaaatattttcatcttctcaaccttttaaattcatttgatcttcatggaacttgaagcctgaagtcatttgcttctacctcctctcacacatatgaaatatttatttgtttcttatcatggttgtgctttggtgtcctgaatcatgactgtcaatgttcgcagcatatgttcttgtaggttgaatagaagagtggaagcaccaagctgtaccaatggggcgtggaaaagtagagctgaagaagattgagaatccaacaaaccgccaagttaccttctccaagaggcggatggggttgttcaagaaggcaaatgagctagccattctttgtgatgcgcaaatcggagtcatcatattctctggcagtggcaggatgtacgagtactccagccctccatggagaatagcaagcgtctttgacaggtacctgaaagcccctagcacccgtttcgaggagatggacatccagcaggagatgactaggatgaaggatgagaggaacagactgaggatgatcatggcgcagtacatggcggaggacctggcatcgttctccgcgcaggatctgagcaaccttgagcagcaaatcgagttctcgctgtacaaagttcgcctcaggaagcaagagctactcgaccagcagctgctcgagatccaccaaagggagatgcatatgccagcagagcagggcggctacctgtgcctcatgaacccggctgcggctattgctagcgggcagcaccagcaggctggcgagatggtgggaattaacccgaggccgttcccgtggtgggacgtgggagccagtggcagtggcagtggcagccagagccagcagcagctgctgcacggccgggacgccgcggagtcgtcgatgacggcgctcgggctgtcgccgcagctgcatgggtacaggctccagccgcggcagcccaacctgcagcaggacgccgacatccatggctggctgtgatttgctttggtcgtgggtgtgcgtcctcaacgagacgagacgacgctgaacgtgcagctcctctgcttgcgacctgttcattctagagtctttgatcatgacctgcccccgtaatgaaaccgccagtagtcgtcaatatctccttctctaacctaagattggacctaagagggacataatgtggtcgcaaatccatataatagagtctatccgtcgcctcagccaacgtgccctgctgaaaataaactttactggagctggcttgttagtgctgggagctgggttgtcatcgcgttgcgcgtcgtttgtgttgaggttgtaaagtagaaactgtgcgagaatgaaatgagaacctctgtttctttattgaataaagcaatgtatttatacaagaggaggagacacaaaaggaggggtcaaaagccacgtccgtacgtgggggatgtgcaggggcacgtccctttggaagacgtcggttgccaccagagagcaactgattatattttataacactcccccttaagcagttgtccattatgtatatcctcccttgaaacctgtaagcaaaaggtggtttgcaataatatactgtgtaatacttcagaaaaacccagtgggaaaaatttggagaaaatca

SEQ ID NO: 24084 - DNA, 4010 bp, Zea Mays
gaaggacggcataatttctttacccaatcgcaatcggcccaccgagcatgagggggggcgacttcctcgaattttccttctcttctctgaccgactgatcttagcgatcttctccctcgaatcttagcgtagcggtagcgccgatcctgttcctgtgccgtgccggcttggattggaaaataggagggagaagatcaacgccgccgcggtgcggcctgtggagtattaaacaaagatgcgcagagcccggctgcgccggcagctagcagccaacgcgaaacttcagcttccgctccgccgtccccctcccggacccaaacaaacaaaccatcgtcacccaatagccaccggccaactgtcaagcactccttcggtgcttccccatctgcgccccccgatccctccggacccgcgagcgaggccgtcgccggcgcgcgcgagatttgagctgaggccatggagtcaccgttccgggccgacgtggtcaaggacaaggcggcgctggtcaccggcgggggatccggcatctgctttgagatcgccgcccagctcgcgcgccacggcgcgcaggtcgccatcatgggccgccgccgggaggtcctcgacaaggccgtcgccgcgctccggtcccagggcctccgggctgttggtttcgatggagatgtccgcaaccaggaggacgcggccagagtgcttgctgcaacagttgcacattttggcaagctcgacattcttgtgaacggtgcagctggcaacttccttgcttccccggaggatttgacgcccaagggattcagaactgttcttgagatcgacactttgggtacatacacaatgtgctatgaagccctcaagtatctgaaaaagggtgggccaggaaaaggcccgtccactggtggactaatcattaacataagtgcaacactgcattacagtgcttcttggtaccaaatccatgtctctgctgctaaggctggggttgatagcatcacaagatcactggctctggagtggggaacagattatgacattagagtcaacgggattgcacctggaccaattcaagacaccccggggctgaggaagcttgcacctgaagaaatgagcaaggggcttcgagaaatgatgccattgttcaaatttggggagaagcgggacatagcaatggctgcgctctaccttgcttctgatgcaggcaaatatgtaaatgggacaacactggtggtcgatggaggtctttggttaagtcaccctcgccatattcccaaggaggaagttagggagctgtcgaaggtggttgagaagaaggtgtgaacacaatggagatggagatcttcaagagaaagaaaacaagacgctgacaggcaagcaaagctgtgcgattctcctcctgtgtctcaactgccgcgtgagaaggagagaatcatttctttgccttataagtcactatgacggtgccgtgaactctttcggaggtatccagtttaagaaaaagctcttgtaccatctcgttctgctggtctttgatcatgactcgtggatgacgatctgaactctgacggtaccagttcacaagtttctttctgaaaaaaaaaattctcccattcgaactgtcttgtaaggctgagcaaaccatagtttctggactaactatgattgttacatgaattttattgccttcatgttagaacttagaatgcagcgtctatgaaacgactggtaatatgtggcctatcccatttcagaaacatttatgtaagttagtatgtgtcactttgaattaggagggtgaaatctgccatgataaccgaaaactgtaacccaagacaagagctttagtttgaagccagcaacaaaatcatagtaggatatgtgagatgtcatgcatttgactatgcctgacatctagctgctagtaggtgtgtagtgtggacccgaagcctgtctacctatggaaactggaaagcattattgggcctacttatcccatgtcttggtcaattcaagacttgccatcttgtagatggagcctagatgcaatgcaaagctcatcaggtcagttaccagtccacagcatggttctttgtgcctctttccagcattgccgttttcagtcatccggttgctggtgccatcttctgatacacacacacacacacacatgctgcgcaacatgacatgcgttgcttgcaagtagttgagccacaagcacatactgttgttggatgtgatagtttgcctgatagagatctgtagcgtacatgctaggccaagagcctgctccgtacgtactaatcgataaatgaacagacagtagaaagttaagtgctataaacttctccatttacttaatttcttaatttgcagtttgatattttccttgtatgtggtatctagtgggacagcaggataggtgatgatgtgaataatgactttctgaaataaaaaataaataaataaactctgagtctgagctgaggaactctgtcgaccatgtataaaggtgagcaaaccccattggcttccctctacctcagaagaagcagatacagcatatgttcttgtaggttgaatagaagagtggaagcaccaagctgtaccaatggggcgtggaaaagtagagctgaagaagattgagaatccaacaaaccgccaagttaccttctccaagaggcggatggggttgttcaagaaggcaaatgagctagccattctttgtgatgcgcaaatcggagtcatcatattctctggcagtggcaggatgtacgagtactccagccctccatggagaatagcaagcgtctttgacaggtacctgaaagcccctagcacccgtttcgaggagatggacatccagcagaaaatcgtccaggagatgactaggatgaaggatgagaggaacagactgaggatgatcatggcgcagtacatggcggaggacctggcatcgttctccgcgcaggatctgagcaaccttgagcagcaaatcgagttctcgctgtacaaagttcgcctcaggaagcaagagctactcgaccagcagctgctcgagatccaccaaagggagatgcatatgccagcagagcagggcggctacctgtgcctcatgaacccggctgcggctattgctagcgggcagcaccagcaggctggcgagatggtgggaattaacccgaggccgttcccgtggtgggacgtgggagccagtggcagtggcagtggcagccagagccagcagcagctgctgcacggccgggacgccgcggagtcgtcgatgacggcgctcgggctgtcgccgcagctgcatgggtacaggctccagccgcggcagcccaacctgcagcaggacgccgacatccatggctggctgtgatttgctttggtcgtgggtgtgcgtcctcaacgagacgagacgacgctgaacgtgcagctcctctgcttgcgacctgttcattctagagtctttgatcatgacctgcccccgtaatgaaaccgccagtagtcgtcaatatctccttctctaacctaagattggacctaagagggacataatgtggtcgcaaatccatataatagagtctatccgtcgcctcagccaacgtgccctgctgaaaataaactttactggagctggcttgttagtgctgggagctgggttgtcatcgcgttgcgcgtcgtttgtgttgaggttgtaaagtagaaactgtgcgagaatgaaatgagaacctctgtttctttattgaataaagcaatgtatttatacaagaggaggagacacaaaaggaggggtcaaaagccacgtccgtacgtgggggatgtgcaggggcacgtccctttggaagacgtcggttgccaccagagagcaactgattatattttataacactcccccttaagcagttgtccattatgtatatcctcccttgaaacctgtaagcaaaaggtggtttgcaataatatactgtgtaatacttcagaaaaacccagtgggaaaaatttggagaaaatca

SEQ ID NO: 24085 - DNA, 4505 bp, Zea Mays
gaaggacggcataatttctttacccaatcgcaatcggcccaccgagcatgagggggggcgacttcctcgaattttccttctcttctctgaccgactgatcttagcgatcttctccctcgaatcttagcgtagcggtagcgccgatcctgttcctgtgccgtgccggcttggattggaaaataggagggagaagatcaacgccgccgcggtgcggcctgtggagtattaaacaaagatgcgcagagcccggctgcgccggcagctagcagccaacgcgaaacttcagcttccgctccgccgtccccctcccggacccaaacaaacaaaccatcgtcacccaatagccaccggccaactgtcaagcactccttcggtgcttccccatctgcgccccccgatccctccggacccgcgagcgaggccgtcgccggcgcgcgcgagatttgagctgaggccatggagtcaccgttccgggccgacgtggtcaaggacaaggcggcgctggtcaccggcgggggatccggcatctgctttgagatcgccgcccagctcgcgcgccacggcgcgcaggtcgccatcatgggccgccgccgggaggtcctcgacaaggccgtcgccgcgctccggtcccagggcctccgggctgttggtttcgatggagatgtccgcaaccaggaggacgcggccagagtgcttgctgcaacagttgcacattttggcaagctcgacattcttgtgaacggtgcagctggcaacttccttgcttccccggaggatttgacgcccaagggattcagaactgttcttgagatcgacactttgggtacatacacaatgtgctatgaagccctcaagtatctgaaaaagggtgggccaggaaaaggcccgtccactggtggactaatcattaacataagtgcaacactgcattacagtgcttcttggtaccaaatccatgtctctgctgctaaggctggggttgatagcatcacaagatcactggctctggagtggggaacagattatgacattagagtcaacgggattgcacctggaccaattcaagacaccccggggctgaggaagcttgcacctgaagaaatgagcaaggggcttcgagaaatgatgccattgttcaaatttggggagaagcgggacatagcaatggctgcgctctaccttgcttctgatgcaggcaaatatgtaaatgggacaacactggtggtcgatggaggtctttggttaagtcaccctcgccatattcccaaggaggaagttagggagctgtcgaaggtggttgagaagaaggtgtgaacacaatggagatggagatcttcaagagaaagaaaacaagacgctgacaggcaagcaaagctgtgcgattctcctcctgtgtctcaactgccgcgtgagaaggagagaatcatttctttgccttataagtcactatgacggtgccgtgaactctttcggaggtatccagtttaagaaaaagctcttgtaccatctcgttctgctggtctttgatcatgactcgtggatgacgatctgaactctgacggtaccagttcacaagtttctttctgaaaaaaaaaattctcccattcgaactgtcttgtaaggctgagcaaaccatagtttctggactaactatgattgttacatgaattttattgccttcatgttagaacttagaatgcagcgtctatgaaacgactggtaatatgtggcctatcccatttcagaaacatttatgtaagttagtatgtgtcactttgaattaggagggtgaaatctgccatgataaccgaaaactgtaacccaagacaagagctttagtttgaagccagcaacaaaatcatagtaggatatgtgagatgtcatgcatttgactatgcctgacatctagctgctagtaggtgtgtagtgtggacccgaagcctgtctacctatggaaactggaaagcattattgggcctacttatcccatgtcttggtcaattcaagacttgccatcttgtagatggagcctagatgcaatgcaaagctcatcaggtcagttaccagtccacagcatggttctttgtgcctctttccagcattgccgttttcagtcatccggttgctggtgccatcttctgatacacacacacacacacacatgctgcgcaacatgacatgcgttgcttgcaagtagttgagccacaagcacatactgttgttggatgtgatagtttgcctgatagagatctgtagcgtacatgctaggccaagagcctgctccgtacgtactaatcgataaatgaacagacagtagaaagttaagtgctataaacttctccatttacttaatttcttaatttgcagtttgatattttccttgtatgtggtatctagtgggacagcaggataggtgatgatgtgaataatgactttctgaaataaaaaataaataaataaactctgagtctgagctgaggaactctgtcgaccatgtataaaggtgagcaaaccccattggcttccctctacctcagaagaagcagatacaggtgataccactcctccatgaaatctctctctctcacacacacacacacacatattctcattctgcaacttagcacaagaacattttgcgcaaatgttgtttgtttgattttatagacctgctcatgctttaatacatctgatcttcataaaagtttgattttttccgaaatacagtataagaactgcacagttctactagcatttgcttctgtatagataactttctgttgtatcctgcatatgtacctatttgtttccatctcttgtgactttattggcttgaagccatttgctatcatctcttggtcatacatataaaatcttttcgtcttctcgtgcttatgaaatattttcatcttctcaaccttttaaattcatttgatcttcatggaacttgaagcctgaagtcatttgcttctacctcctctcacacatatgaaatatttatttgtttcttatcatggttgtgctttggtgtcctgaatcatgactgtcaatgttcgcagcatatgttcttgtaggttgaatagaagagtggaagcaccaagctgtaccaatggggcgtggaaaagtagagctgaagaagattgagaatccaacaaaccgccaagttaccttctccaagaggcggatggggttgttcaagaaggcaaatgagctagccattctttgtgatgcgcaaatcggagtcatcatattctctggcagtggcaggatgtacgagtactccagccctccatggagaatagcaagcgtctttgacaggtacctgaaagcccctagcacccgtttcgaggagatggacatccagcaggagatgactaggatgaaggatgagaggaacagactgaggatgatcatggcgcagtacatggcggaggacctggcatcgttctccgcgcaggatctgagcaaccttgagcagcaaatcgagttctcgctgtacaaagttcgcctcaggaagcaagagctactcgaccagcagctgctcgagatccaccaaagggagatgcatatgccagcagagcagggcggctacctgtgcctcatgaacccggctgcggctattgctagcgggcagcaccagcaggctggcgagatggtgggaattaacccgaggccgttcccgtggtgggacgtgggagccagtggcagtggcagtggcagccagagccagcagcagctgctgcacggccgggacgccgcggagtcgtcgatgacggcgctcgggctgtcgccgcagctgcatgggtacaggctccagccgcggcagcccaacctgcagcaggacgccgacatccatggctggctgtgatttgctttggtcgtgggtgtgcgtcctcaacgagacgagacgacgctgaacgtgcagctcctctgcttgcgacctgttcattctagagtctttgatcatgacctgcccccgtaatgaaaccgccagtagtcgtcaatatctccttctctaacctaagattggacctaagagggacataatgtggtcgcaaatccatataatagagtctatccgtcgcctcagccaacgtgccctgctgaaaataaactttactggagctggcttgttagtgctgggagctgggttgtcatcgcgttgcgcgtcgtttgtgttgaggttgtaaagtagaaactgtgcgagaatgaaatgagaacctctgtttctttattgaataaagcaatgtatttatacaagaggaggagacacaaaaggaggggtcaaaagccacgtccgtacgtgggggatgtgcaggggcacgtccctttggaagacgtcggttgccaccagagagcaactgattatattttataacactcccccttaagcagttgtccattatgtatatcctcccttgaaacctgtaagcaaaaggtggtttgcaataatatactgtgtaatacttcagaaaaacccagtgggaaaaatttggagaaaatca

SEQ ID NO: 24086 - DNA, 4517 bp, Zea Mays
gaaggacggcataatttctttacccaatcgcaatcggcccaccgagcatgagggggggcgacttcctcgaattttccttctcttctctgaccgactgatcttagcgatcttctccctcgaatcttagcgtagcggtagcgccgatcctgttcctgtgccgtgccggcttggattggaaaataggagggagaagatcaacgccgccgcggtgcggcctgtggagtattaaacaaagatgcgcagagcccggctgcgccggcagctagcagccaacgcgaaacttcagcttccgctccgccgtccccctcccggacccaaacaaacaaaccatcgtcacccaatagccaccggccaactgtcaagcactccttcggtgcttccccatctgcgccccccgatccctccggacccgcgagcgaggccgtcgccggcgcgcgcgagatttgagctgaggccatggagtcaccgttccgggccgacgtggtcaaggacaaggcggcgctggtcaccggcgggggatccggcatctgctttgagatcgccgcccagctcgcgcgccacggcgcgcaggtcgccatcatgggccgccgccgggaggtcctcgacaaggccgtcgccgcgctccggtcccagggcctccgggctgttggtttcgatggagatgtccgcaaccaggaggacgcggccagagtgcttgctgcaacagttgcacattttggcaagctcgacattcttgtgaacggtgcagctggcaacttccttgcttccccggaggatttgacgcccaagggattcagaactgttcttgagatcgacactttgggtacatacacaatgtgctatgaagccctcaagtatctgaaaaagggtgggccaggaaaaggcccgtccactggtggactaatcattaacataagtgcaacactgcattacagtgcttcttggtaccaaatccatgtctctgctgctaaggctggggttgatagcatcacaagatcactggctctggagtggggaacagattatgacattagagtcaacgggattgcacctggaccaattcaagacaccccggggctgaggaagcttgcacctgaagaaatgagcaaggggcttcgagaaatgatgccattgttcaaatttggggagaagcgggacatagcaatggctgcgctctaccttgcttctgatgcaggcaaatatgtaaatgggacaacactggtggtcgatggaggtctttggttaagtcaccctcgccatattcccaaggaggaagttagggagctgtcgaaggtggttgagaagaaggtgtgaacacaatggagatggagatcttcaagagaaagaaaacaagacgctgacaggcaagcaaagctgtgcgattctcctcctgtgtctcaactgccgcgtgagaaggagagaatcatttctttgccttataagtcactatgacggtgccgtgaactctttcggaggtatccagtttaagaaaaagctcttgtaccatctcgttctgctggtctttgatcatgactcgtggatgacgatctgaactctgacggtaccagttcacaagtttctttctgaaaaaaaaaattctcccattcgaactgtcttgtaaggctgagcaaaccatagtttctggactaactatgattgttacatgaattttattgccttcatgttagaacttagaatgcagcgtctatgaaacgactggtaatatgtggcctatcccatttcagaaacatttatgtaagttagtatgtgtcactttgaattaggagggtgaaatctgccatgataaccgaaaactgtaacccaagacaagagctttagtttgaagccagcaacaaaatcatagtaggatatgtgagatgtcatgcatttgactatgcctgacatctagctgctagtaggtgtgtagtgtggacccgaagcctgtctacctatggaaactggaaagcattattgggcctacttatcccatgtcttggtcaattcaagacttgccatcttgtagatggagcctagatgcaatgcaaagctcatcaggtcagttaccagtccacagcatggttctttgtgcctctttccagcattgccgttttcagtcatccggttgctggtgccatcttctgatacacacacacacacacacatgctgcgcaacatgacatgcgttgcttgcaagtagttgagccacaagcacatactgttgttggatgtgatagtttgcctgatagagatctgtagcgtacatgctaggccaagagcctgctccgtacgtactaatcgataaatgaacagacagtagaaagttaagtgctataaacttctccatttacttaatttcttaatttgcagtttgatattttccttgtatgtggtatctagtgggacagcaggataggtgatgatgtgaataatgactttctgaaataaaaaataaataaataaactctgagtctgagctgaggaactctgtcgaccatgtataaaggtgagcaaaccccattggcttccctctacctcagaagaagcagatacaggtgataccactcctccatgaaatctctctctctcacacacacacacacacatattctcattctgcaacttagcacaagaacattttgcgcaaatgttgtttgtttgattttatagacctgctcatgctttaatacatctgatcttcataaaagtttgattttttccgaaatacagtataagaactgcacagttctactagcatttgcttctgtatagataactttctgttgtatcctgcatatgtacctatttgtttccatctcttgtgactttattggcttgaagccatttgctatcatctcttggtcatacatataaaatcttttcgtcttctcgtgcttatgaaatattttcatcttctcaaccttttaaattcatttgatcttcatggaacttgaagcctgaagtcatttgcttctacctcctctcacacatatgaaatatttatttgtttcttatcatggttgtgctttggtgtcctgaatcatgactgtcaatgttcgcagcatatgttcttgtaggttgaatagaagagtggaagcaccaagctgtaccaatggggcgtggaaaagtagagctgaagaagattgagaatccaacaaaccgccaagttaccttctccaagaggcggatggggttgttcaagaaggcaaatgagctagccattctttgtgatgcgcaaatcggagtcatcatattctctggcagtggcaggatgtacgagtactccagccctccatggagaatagcaagcgtctttgacaggtacctgaaagcccctagcacccgtttcgaggagatggacatccagcagaaaatcgtccaggagatgactaggatgaaggatgagaggaacagactgaggatgatcatggcgcagtacatggcggaggacctggcatcgttctccgcgcaggatctgagcaaccttgagcagcaaatcgagttctcgctgtacaaagttcgcctcaggaagcaagagctactcgaccagcagctgctcgagatccaccaaagggagatgcatatgccagcagagcagggcggctacctgtgcctcatgaacccggctgcggctattgctagcgggcagcaccagcaggctggcgagatggtgggaattaacccgaggccgttcccgtggtgggacgtgggagccagtggcagtggcagtggcagccagagccagcagcagctgctgcacggccgggacgccgcggagtcgtcgatgacggcgctcgggctgtcgccgcagctgcatgggtacaggctccagccgcggcagcccaacctgcagcaggacgccgacatccatggctggctgtgatttgctttggtcgtgggtgtgcgtcctcaacgagacgagacgacgctgaacgtgcagctcctctgcttgcgacctgttcattctagagtctttgatcatgacctgcccccgtaatgaaaccgccagtagtcgtcaatatctccttctctaacctaagattggacctaagagggacataatgtggtcgcaaatccatataatagagtctatccgtcgcctcagccaacgtgccctgctgaaaataaactttactggagctggcttgttagtgctgggagctgggttgtcatcgcgttgcgcgtcgtttgtgttgaggttgtaaagtagaaactgtgcgagaatgaaatgagaacctctgtttctttattgaataaagcaatgtatttatacaagaggaggagacacaaaaggaggggtcaaaagccacgtccgtacgtgggggatgtgcaggggcacgtccctttggaagacgtcggttgccaccagagagcaactgattatattttataacactcccccttaagcagttgtccattatgtatatcctcccttgaaacctgtaagcaaaaggtggtttgcaataatatactgtgtaatacttcagaaaaacccagtgggaaaaatttggagaaaatca

SEQ ID NO: 24087 - DNA, 4074 bp, Zea Mays
gaaggacggcataatttctttacccaatcgcaatcggcccaccgagcatgagggggggcgacttcctcgaattttccttctcttctctgaccgactgatcttagcgatcttctccctcgaatcttagcgtagcggtagcgccgatcctgttcctgtgccgtgccggcttggattggaaaataggagggagaagatcaacgccgccgcggtgcggcctgtggagtattaaacaaagatgcgcagagcccggctgcgccggcagctagcagccaacgcgaaacttcagcttccgctccgccgtccccctcccggacccaaacaaacaaaccatcgtcacccaatagccaccggccaactgtcaagcactccttcggtgcttccccatctgcgccccccgatccctccggacccgcgagcgaggccgtcgccggcgcgcgcgagatttgagctgaggccatggagtcaccgttccgggccgacgtggtcaaggacaaggcggcgctggtcaccggcgggggatccggcatctgctttgagatcgccgcccagctcgcgcgccacggcgcgcaggtcgccatcatgggccgccgccgggaggtcctcgacaaggccgtcgccgcgctccggtcccagggcctccgggctgttggtttcgatggagatgtccgcaaccaggaggacgcggccagagtgcttgctgcaacagttgcacattttggcaagctcgacattcttgtgaacggtgcagctggcaacttccttgcttccccggaggatttgacgcccaagggattcagaactgttcttgagatcgacactttgggtacatacacaatgtgctatgaagccctcaagtatctgaaaaagggtgggccaggaaaaggcccgtccactggtggactaatcattaacataagtgcaacactgcattacagtgcttcttggtaccaaatccatgtctctgctgctaaggctggggttgatagcatcacaagatcactggctctggagtggggaacagattatgacattagagtcaacgggattgcacctggaccaattcaagacaccccggggctgaggaagcttgcacctgaagaaatgagcaaggggcttcgagaaatgatgccattgttcaaatttggggagaagcgggacatagcaatggctgcgctctaccttgcttctgatgcaggcaaatatgtaaatgggacaacactggtggtcgatggaggtctttggttaagtcaccctcgccatattcccaaggaggaagttagggagctgtcgaaggtggttgagaagaaggtgtgaacacaatggagatggagatcttcaagagaaagaaaacaagacgctgacaggcaagcaaagctgtgcgattctcctcctgtgtctcaactgccgcgtgagaaggagagaatcatttctttgccttataagtcactatgacggtgccgtgaactctttcggaggtatccagtttaagaaaaagctcttgtaccatctcgttctgctggtctttgatcatgactcgtggatgacgatctgaactctgacggtaccagttcacaagtttctttctgaaaaaaaaaattctcccattcgaactgtcttgtaaggctgagcaaaccatagtttctggactaactatgattgttacatgaattttattgccttcatgttagaacttagaatgcagcgtctatgaaacgactggtaatatgtggcctatcccatttcagaaacatttatgtaagttagtatgtgtcactttgaattaggagggtgaaatctgccatgataaccgaaaactgtaacccaagacaagagctttagtttgaagccagcaacaaaatcatagtaggatatgtgagatgtcatgcatttgactatgcctgacatctagctgctagtaggtgtgtagtgtggacccgaagcctgtctacctatggaaactggaaagcattattgggcctacttatcccatgtcttggtcaattcaagacttgccatcttgtagatggagcctagatgcaatgcaaagctcatcaggtgagcaaaccccattggcttccctctacctcagaagaagcagatacaggtgataccactcctccatgaaatctctctctctcacacacacacacacacatattctcattctgcaacttagcacaagaacattttgcgcaaatgttgtttgtttgattttatagacctgctcatgctttaatacatctgatcttcataaaagtttgattttttccgaaatacagtataagaactgcacagttctactagcatttgcttctgtatagataactttctgttgtatcctgcatatgtacctatttgtttccatctcttgtgactttattggcttgaagccatttgctatcatctcttggtcatacatataaaatcttttcgtcttctcgtgcttatgaaatattttcatcttctcaaccttttaaattcatttgatcttcatggaacttgaagcctgaagtcatttgcttctacctcctctcacacatatgaaatatttatttgtttcttatcatggttgtgctttggtgtcctgaatcatgactgtcaatgttcgcagcatatgttcttgtaggttgaatagaagagtggaagcaccaagctgtaccaatggggcgtggaaaagtagagctgaagaagattgagaatccaacaaaccgccaagttaccttctccaagaggcggatggggttgttcaagaaggcaaatgagctagccattctttgtgatgcgcaaatcggagtcatcatattctctggcagtggcaggatgtacgagtactccagccctccatggagaatagcaagcgtctttgacaggtacctgaaagcccctagcacccgtttcgaggagatggacatccagcagaaaatcgtccaggagatgactaggatgaaggatgagaggaacagactgaggatgatcatggcgcagtacatggcggaggacctggcatcgttctccgcgcaggatctgagcaaccttgagcagcaaatcgagttctcgctgtacaaagttcgcctcaggaagcaagagctactcgaccagcagctgctcgagatccaccaaagggagatgcatatgccagcagagcagggcggctacctgtgcctcatggtaagaacccggctgcggctattgctagcgggcagcaccagcaggctggcgagatggtgggaattaacccgaggccgttcccgtggtgggacgtgggagccagtggcagtggcagtggcagccagagccagcagcagctgctgcacggccgggacgccgcggagtcgtcgatgacggcgctcgggctgtcgccgcagctgcatgggtacaggctccagccgcggcagcccaacctgcagcaggacgccgacatccatggctggctgtgatttgctttggtcgtgggtgtgcgtcctcaacgagacgagacgacgctgaacgtgcagctcctctgcttgcgacctgttcattctagagtctttgatcatgacctgcccccgtaatgaaaccgccagtagtcgtcaatatctccttctctaacctaagattggacctaagagggacataatgtggtcgcaaatccatataatagagtctatccgtcgcctcagccaacgtgccctgctgaaaataaactttactggagctggcttgttagtgctgggagctgggttgtcatcgcgttgcgcgtcgtttgtgttgaggttgtaaagtagaaactgtgcgagaatgaaatgagaacctctgtttctttattgaataaagcaatgtatttatacaagaggaggagacacaaaaggaggggtcaaaagccacgtccgtacgtgggggatgtgcaggggcacgtccctttggaagacgtcggttgccaccagagagcaactgattatattttataacactcccccttaagcagttgtccattatgtatatcctcccttgaaacctgtaagcaaaaggtggtttgcaataatatactgtgtaatacttcagaaaaacccagtgggaaaaatttggagaaaatca

SEQ ID NO: 24088 - DNA, 3503 bp, Zea Mays
gaaggacggcataatttctttacccaatcgcaatcggcccaccgagcatgagggggggcgacttcctcgaattttccttctcttctctgaccgactgatcttagcgatcttctccctcgaatcttagcgtagcggtagcgccgatcctgttcctgtgccgtgccggcttggattggaaaataggagggagaagatcaacgccgccgcggtgcggcctgtggagtattaaacaaagatgcgcagagcccggctgcgccggcagctagcagccaacgcgaaacttcagcttccgctccgccgtccccctcccggacccaaacaaacaaaccatcgtcacccaatagccaccggccaactgtcaagcactccttcggtgcttccccatctgcgccccccgatccctccggacccgcgagcgaggccgtcgccggcgcgcgcgagatttgagctgaggccatggagtcaccgttccgggccgacgtggtcaaggacaaggcggcgctggtcaccggcgggggatccggcatctgctttgagatcgccgcccagctcgcgcgccacggcgcgcaggtcgccatcatgggccgccgccgggaggtcctcgacaaggccgtcgccgcgctccggtcccagggcctccgggctgttggtttcgatggagatgtccgcaaccaggaggacgcggccagagtgcttgctgcaacagttgcacattttggcaagctcgacattcttgtgaacggtgcagctggcaacttccttgcttccccggaggatttgacgcccaagggattcagaactgttcttgagatcgacactttgggtacatacacaatgtgctatgaagccctcaagtatctgaaaaagggtgggccaggaaaaggcccgtccactggtggactaatcattaacataagtgcaacactgcattacagtgcttcttggtaccaaatccatgtctctgctgctaagattcgtttgtataggctggggttgatagcatcacaagatcactggctctggagtggggaacagattatgacattagagtcaacgggattgcacctggaccaattcaagacaccccggggctgaggaagcttgcacctgaagaaatgagcaaggggcttcgagaaatgatgccattgttcaaatttggggagaagcgggacatagcaatggctgcgctctaccttgcttctgatgcaggcaaatatgtaaatgggacaacactggtggtcgatggaggtctttggttaagtcaccctcgccatattcccaaggaggaagttagggagctgtcgaaggtggttgagaagaaggtgtgaacacaatggagatggagatcttcaagagaaagaaaacaagacgctgacaggcaagcaaagctgtgcgattctcctcctgtgtctcaactgccgcgtgagaaggagagaatcatttctttgccttataagtcactatgacggtgccgtgaactctttcggaggtgagcaaaccccattggcttccctctacctcagaagaagcagatacaggtgataccactcctccatgaaatctctctctctcacacacacacacacacatattctcattctgcaacttagcacaagaacattttgcgcaaatgttgtttgtttgattttatagacctgctcatgctttaatacatctgatcttcataaaagtttgattttttccgaaatacagtataagaactgcacagttctactagcatttgcttctgtatagataactttctgttgtatcctgcatatgtacctatttgtttccatctcttgtgactttattggcttgaagccatttgctatcatctcttggtcatacatataaaatcttttcgtcttctcgtgcttatgaaatattttcatcttctcaaccttttaaattcatttgatcttcatggaacttgaagcctgaagtcatttgcttctacctcctctcacacatatgaaatatttatttgtttcttatcatggttgtgctttggtgtcctgaatcatgactgtcaatgttcgcagcatatgttcttgtaggttgaatagaagagtggaagcaccaagctgtaccaatggggcgtggaaaagtagagctgaagaagattgagaatccaacaaaccgccaagttaccttctccaagaggcggatggggttgttcaagaaggcaaatgagctagccattctttgtgatgcgcaaatcggagtcatcatattctctggcagtggcaggatgtacgagtactccagccctccatggagaatagcaagcgtctttgacaggtacctgaaagcccctagcacccgtttcgaggagatggacatccagcagaaaatcgtccaggagatgactaggatgaaggatgagaggaacagactgaggatgatcatggcgcagtacatggcggaggacctggcatcgttctccgcgcaggatctgagcaaccttgagcagcaaatcgagttctcgctgtacaaagttcgcctcaggaagcaagagctactcgaccagcagctgctcgagatccaccaaagggagatgcatatgccagcagagcagggcggctacctgtgcctcatgaacccggctgcggctattgctagcgggcagcaccagcaggctggcgagatggtgggaattaacccgaggccgttcccgtggtgggacgtgggagccagtggcagtggcagtggcagccagagccagcagcagctgctgcacggccgggacgccgcggagtcgtcgatgacggcgctcgggctgtcgccgcagctgcatgggtacaggctccagccgcggcagcccaacctgcagcaggacgccgacatccatggctggctgtgatttgctttggtcgtgggtgtgcgtcctcaacgagacgagacgacgctgaacgtgcagctcctctgcttgcgacctgttcattctagagtctttgatcatgacctgcccccgtaatgaaaccgccagtagtcgtcaatatctccttctctaacctaagattggacctaagagggacataatgtggtcgcaaatccatataatagagtctatccgtcgcctcagccaacgtgccctgctgaaaataaactttactggagctggcttgttagtgctgggagctgggttgtcatcgcgttgcgcgtcgtttgtgttgaggttgtaaagtagaaactgtgcgagaatgaaatgagaacctctgtttctttattgaataaagcaatgtatttatacaagaggaggagacacaaaaggaggggtcaaaagccacgtccgtacgtgggggatgtgcaggggcacgtccctttggaagacgtcggttgccaccagagagcaactgattatattttataacactcccccttaagcagttgtccattatgtatatcctcccttgaaacctgtaagcaaaaggtggtttgcaataatatactgtgtaatacttcagaaaaacccagtgggaaaaatttggagaaaatca

SEQ ID NO: 24089 - DNA, 3088 bp, Zea Mays
gaaggacggcataatttctttacccaatcgcaatcggcccaccgagcatgagggggggcgacttcctcgaattttccttctcttctctgaccgactgatcttagcgatcttctccctcgaatcttagcgtagcggtagcgccgatcctgttcctgtgccgtgccggcttggattggaaaataggagggagaagatcaacgccgccgcggtgcggcctgtggagtattaaacaaagatgcgcagagcccggctgcgccggcagctagcagccaacgcgaaacttcagcttccgctccgccgtccccctcccggacccaaacaaacaaaccatcgtcacccaatagccaccggccaactgtcaagcactccttcggtgcttccccatctgcgccccccgatccctccggacccgcgagcgaggccgtcgccggcgcgcgcgagatttgagctgaggccatggagtcaccgttccgggccgacgtggtcaaggacaaggcggcgctggtcaccggcgggggatccggcatctgctttgagatcgccgcccagctcgcgcgccacggcgcgcaggtcgccatcatgggccgccgccgggaggtcctcgacaaggccgtcgccgcgctccggtcccagggcctccgggctgttggtttcgatggagatgtccgcaaccaggaggacgcggccagagtgcttgctgcaacagttgcacattttggcaagctcgacattcttgtgaacggtgcagctggcaacttccttgcttccccggaggatttgacgcccaagggattcagaactgttcttgagatcgacactttgggtacatacacaatgtgctatgaagccctcaagtatctgaaaaagggtgggccaggaaaaggcccgtccactggtggactaatcattaacataagtgcaacactgcattacagtgcttcttggtaccaaatccatgtctctgctgctaaggctggggttgatagcatcacaagatcactggctctggagtggggaacagattatgacattagagtcaacgggattgcacctggaccaattcaagacaccccggggctgaggaagcttgcacctgaagaaatgagcaaggggcttcgagaaatgatgccattgttcaaatttggggagaagcgggacatagcaatggctgcgctctaccttgcttctgatgcaggcaaatatgtaaatgggacaacactggtggtcgatggaggtctttggttaagtcaccctcgccatattcccaaggaggaagttagggagctgtcgaaggtggttgagaagaaggtgtgaacacaatggagatggagatcttcaagagaaagaaaacaagacgctgacaggcaagcaaagctgtgcgattctcctcctgtgtctcaactgccgcgtgagaaggagagaatcatttctttgccttataagtcactatgacggtgccgtgaactctttcggagtgggacagcaggataggtgatgatgtgaataatgactttctgaaataaaaaataaataaataaactctgagtctgagctgaggaactctgtcgaccatgtataaaggtgagcaaaccccattggcttccctctacctcagaagaagcagatacagcatatgttcttgtaggttgaatagaagagtggaagcaccaagctgtaccaatggggcgtggaaaagtagagctgaagaagattgagaatccaacaaaccgccaagttaccttctccaagaggcggatggggttgttcaagaaggcaaatgagctagccattctttgtgatgcgcaaatcggagtcatcatattctctggcagtggcaggatgtacgagtactccagccctccatggagaatagcaagcgtctttgacaggtacctgaaagcccctagcacccgtttcgaggagatggacatccagcagaaaatcgtccaggagatgactaggatgaaggatgagaggaacagactgaggatgatcatggcgcagtacatggcggaggacctggcatcgttctccgcgcaggatctgagcaaccttgagcagcaaatcgagttctcgctgtacaaagttcgcctcaggaagcaagagctactcgaccagcagctgctcgagatccaccaaagggagatgcatatgccagcagagcagggcggctacctgtgcctcatgaacccggctgcggctattgctagcgggcagcaccagcaggctggcgagatggtgggaattaacccgaggccgttcccgtggtgggacgtgggagccagtggcagtggcagtggcagccagagccagcagcagctgctgcacggccgggacgccgcggagtcgtcgatgacggcgctcgggctgtcgccgcagctgcatgggtacaggctccagccgcggcagcccaacctgcagcaggacgccgacatccatggctggctgtgatttgctttggtcgtgggtgtgcgtcctcaacgagacgagacgacgctgaacgtgcagctcctctgcttgcgacctgttcattctagagtctttgatcatgacctgcccccgtaatgaaaccgccagtagtcgtcaatatctccttctctaacctaagattggacctaagagggacataatgtggtcgcaaatccatataatagagtctatccgtcgcctcagccaacgtgccctgctgaaaataaactttactggagctggcttgttagtgctgggagctgggttgtcatcgcgttgcgcgtcgtttgtgttgaggttgtaaagtagaaactgtgcgagaatgaaatgagaacctctgtttctttattgaataaagcaatgtatttatacaagaggaggagacacaaaaggaggggtcaaaagccacgtccgtacgtgggggatgtgcaggggcacgtccctttggaagacgtcggttgccaccagagagcaactgattatattttataacactcccccttaagcagttgtccattatgtatatcctcccttgaaacctgtaagcaaaaggtggtttgcaataatatactgtgtaatacttcagaaaaacccagtgggaaaaatttggagaaaatca

SEQ ID NO: 24090 - DNA, 3346 bp, Zea Mays
gtttgtttgtgatggttgatatgcaatcccagccaagaacacacggcgtgacgtgctgtggtctgtggagaacctgcagcttccactgctctcgcttgttcaggctgttggtttcgatggagatgtccgcaaccaggaggacgcggccagagtgcttgctgcaacagttgcacattttggcaagctcgacattcttgtgaacggtgcagctggcaacttccttgcttccccggaggatttgacgcccaagggattcagaactgttcttgagatcgacactttgggtacatacacaatgtgctatgaagccctcaagtatctgaaaaagggtgggccaggaaaaggcccgtccactggtggactaatcattaacataagtgcaacactgcattacagtgcttcttggtaccaaatccatgtctctgctgctaaggctggggttgatagcatcacaagatcactggctctggagtggggaacagattatgacattagagtcaacgggattgcacctggaccaattcaagacaccccggggctgaggaagcttgcacctgaagaaatgagcaaggggcttcgagaaatgatgccattgttcaaatttggggagaagcgggacatagcaatggctgcgctctaccttgcttctgatgcaggtgtgaacacaatggagatggagatcttcaagagaaagaaaacaagacgctgacaggcaagcaaagctgtgcgattctcctcctgtgtctcaactgccgcgtgagaaggagagaatcatttctttgccttataagtcactatgacggtgccgtgaactctttcggaggtatccagtttaagaaaaagctcttgtaccatctcgttctgctggtctttgatcatgactcgtggatgacgatctgaactctgacggtaccagttcacaagtttctttctgaaaaaaaaaattctcccattcgaactgtcttgtaaggctgagcaaaccatagtttctggactaactatgattgttacatgaattttattgccttcatgttagaacttagaatgcagcgtctatgaaacgactggtaatatgtggcctatcccatttcagaaacatttatgtaagttagtatgtgtcactttgaattaggagggtgaaatctgccatgataaccgaaaactgtaacccaagacaagagctttagtttgaagccagcaacaaaatcatagtaggatatgtgagatgtcatgcatttgactatgcctgacatctagctgctagtaggtgtgtagtgtggacccgaagcctgtctacctatggaaactggaaagcattattgggcctacttatcccatgtcttggtcaattcaagacttgccatcttgtagatggagcctagatgcaatgcaaagctcatcaggtcagttaccagtccacagcatggttctttgtgcctctttccagcattgccgttttcagtcatccggttgctggtgccatcttctgatacacacacacacacacacatgctgcgcaacatgacatgcgttgcttgcaagtagttgagccacaagcacatactgttgttggatgtgatagtttgcctgatagagatctgtagcgtacatgctaggccaagagcctgctccgtacgtactaatcgataaatgaacagacagtagaaagttaagtgctataaacttctccatttacttaatttcttaatttgcagtttgatattttccttgtatgtggtatctagtgggacagcaggataggtgatgatgtgaataatgactttctgaaataaaaaataaataaataaactctgagtctgagctgaggaactctgtcgaccatgtataaaggtgagcaaaccccattggcttccctctacctcagaagaagcagatacagcatatgttcttgtaggttgaatagaagagtggaagcaccaagctgtaccaatggggcgtggaaaagtagagctgaagaagattgagaatccaacaaaccgccaagttaccttctccaagaggcggatggggttgttcaagaaggcaaatgagctagccattctttgtgatgcgcaaatcggagtcatcatattctctggcagtggcaggatgtacgagtactccagccctccatggagaatagcaagcgtctttgacaggtacctgaaagcccctagcacccgtttcgaggagatggacatccagcaggagatgactaggatgaaggatgagaggaacagactgaggatgatcatggcgcagtacatggcggaggacctggcatcgttctccgcgcaggatctgagcaaccttgagcagcaaatcgagttctcgctgtacaaagttcgcctcaggaagcaagagctactcgaccagcagctgctcgagatccaccaaagggagatgcatatgccagcagagcagggcggctacctgtgcctcatgaacccggctgcggctattgctagcgggcagcaccagcaggctggcgagatggtgggaattaacccgaggccgttcccgtggtgggacgtgggagccagtggcagtggcagtggcagccagagccagcagcagctgctgcacggccgggacgccgcggagtcgtcgatgacggcgctcgggctgtcgccgcagctgcatgggtacaggctccagccgcggcagcccaacctgcagcaggacgccgacatccatggctggctgtgatttgctttggtcgtgggtgtgcgtcctcaacgagacgagacgacgctgaacgtgcagctcctctgcttgcgacctgttcattctagagtctttgatcatgacctgcccccgtaatgaaaccgccagtagtcgtcaatatctccttctctaacctaagattggacctaagagggacataatgtggtcgcaaatccatataatagagtctatccgtcgcctcagccaacgtgccctgctgaaaataaactttactggagctggcttgttagtgctgggagctgggttgtcatcgcgttgcgcgtcgtttgtgttgaggttgtaaagtagaaactgtgcgagaatgaaatgagaacctctgtttctttattgaataaagcaatgtatttatacaagaggaggagacacaaaaggaggggtcaaaagccacgtccgtacgtgggggatgtgcaggggcacgtccctttggaagacgtcggttgccaccagagagcaactgattatattttataacactcccccttaagcagttgtccattatgtatatcctcccttgaaacctgtaagcaaaaggtggtttgcaataatatactgtgtaatacttcagaaaaacccagtgggaaaaatttggagaaaatca

SEQ ID NO: 24091 - DNA, 310 bp, Zea Mays
gacagcatcaatacccaaccgagtggagcaaaacaaggcaagaaatactgacaggagatgaggagaagcagatgtctaggcacagcaaggacaaggagcggaggcaggcaggcaggtggggcgcccccacgaattcggtctagaattaaatgacaaagagcttttgccttcggttatggatgattgcaggtttgtcattacttatagacaaggagaacagagaggaagaagatgatagggaggccggaggggtccgaggggacgagggaccgagagagagatcagagaagttttgtgcatcttcttgctg

SEQ ID NO: 24092 - DNA, 486 bp, Zea Mays
atgctctccagccggacgaagaagaggacgcagtcgaacagcaccttctcgaagtcctcgtccctcttgtgcaggtccttgtacccgtacctcgccacgcaccggaacatgtggaagctcctgggcccgatcctccgcaccaggaaccgctcctccgtcggcacggtgtacacggggaggtacttgacgcagacgaacaccaccaccgagtggatcgcggggaggttggtgatgaagtgggagaagatgtgcggcacgccgctcgccagctccgtgtacacgaagccgatccctgggaccctcaccaggcccaggctcgggcccagccccaggatccacgccatggacaccttgctgtgcatctcgaactcgtaccgcttcaccgtgcagaagtgccacacgtacatgatgaggaagaaggccgtcgccacgacgagtgggacccagccaccctggtcgatcttcagtatgcaggccacgaagtag

SEQ ID NO: 24093 - DNA, 106 bp, Zea Mays
cagcagctaattattagttttagagtttctaatcgggtctaaatcacaattatcctgtttttttacagaggacacaccgggcgtcgcacgccactcgccttgtcgg

SEQ ID NO: 24094 - DNA, 1760 bp, Zea Mays
tgttgaagcagagcatgcgagcagagtgcaagtgcgacccaacccagccgggaaaggaaagaggaaagggagggagggaggggaccgttgcagttgcagccattgatgcgccagcagtagcgccagcagagcggagcggagcggcaccggcctgcagctcagcgccaggctcaagagaccgatagggcaagggggttaagcatggagcctgcggcgggacggagagcgagatgtctgctgttgcctctacttgtgggggctctcgccctcgcattggccggcgctgcgactgcgaccgcgtggcctcaccctcacggcggcgccgccggtcttggacatggcgctggcgccgcagccgcgggtgcgggcaggccgggcggcgccgagcgctggtacagggatctcgcgctcaggaggatggagagcgtcagatcctccttcggggccagaagagatttggcgacgatccacagcgggtcgctgcgcgcgtccgacgacttcccgacggaccggtacctgatcgagctgtcggcggccaagagcggccggagctacgactacgagtacgccacgctgcgggacctgatgctggactgcagctaccgcggcggcggcgtggcggtggtggactcgctccgcgtcgccgtcgacaactgctacgtggcgcacttcgcgtccgacggcgtcgcggtgcgcggcggccacgagacgctcatccgcaacacctacctcggccagcacatgacggccgggggcgacccgggggagcgcggcttcacgggcacggccatccgcctcgacggcaacgacaactccgtgtccgacgtcgtcatcttctccgcggccacggggatcatggtcaccgcgccggccaactccatctccggcgtgcactgctacaacaaggccacgggcttcggcggcaccggcatccacctcaagatcccgggcctcacgcaggcgtggatcagcaactgctacatggactacaccagcatcgtcgccgaggaccccgtgctgctccacgtctccggatccttcttcctcggcgacgccaacgtcgtgctcaaggccgtcagcggcgtcgccaggggcgtccaggtcgtcggcaacatcttcagcggccgggacaagggcgtcgacatcgtgcagctggacggcgccttcgccaccgtggaccaggtgtacgtgcagcagaactccgccacggggatgaccgtcaggtccacctccgcgcgcgcatcgctcgagggcaacgggacctcctggacgctcgacttctcgccggtgctgctgttcccggaccgcatcggccacgtgcagtactcgctcgtcgccggcgacgagttcccgggccacacgctccggaacgtgtccgggaaccaggtcgtggtcgccaccgacaaggccgtctcggccacggtccacgtcttggtggaccagaacagcgactgagataagataagagacactcgagagtgcctgcgtgcacgcagtatgcgtgctgctgcctgctcgcgcggctgctgcggagcaaggcgttattccttcgtttctttcttctccaaaatttcagccattcatgtcgtcgggaagatgacaattgtttgatgcgacaaaatgctccagaatggatcattcttttgctgtatgaaatgaaatgattcagaagctccatcaatctgcgtaccaagacataaaacatgtgttgctgactagcaacataagcatgcaagtaattatgagaaaacgacaaaaaa

SEQ ID NO: 24095 - DNA, 3888 bp, Zea Mays
ttatcacctaggcatgccaagggatcttggaatggacaaggaccggacctccggagccgaacttggaaacatcacgttgagcctgtgcatcaagacgtcggccttggatggtatctcgttcaggaggaactgctggacaatcggcttcttaaaccactccagtaccgagtcgccgggtgcccgcaagacgactttgctcacctcaaacggcgactccagcgacgccagcacctgtgccaccaccatcttcagtgtcggcccagtcaccagcttgatgcgccgtggcacaaccccgtagtagagcatccgcttcctgaaccgatgcagtgtgtgcacggtagccacgagagctgcgcccacggataagctcctgacatccagggaccaggcgatgtgctggtcaaaaacgattgccttggcgaacagcttattctcgtaggcgaccttccaaacacagcgggcacggttcatctgccccatgagcaccaggtagttgagcaggacgttcacaaagtacctggctgcactctcctcgttgtcgtagtcgatgccctggaagaactcgcgcacgaaagagagcacgggctgcttccgctgctccggaccagtgaacagcccgcacatgaagtcatgtgctttgtgcttgctggtgcccaggatgtccatgattgtacgctcgctgctctcgtcctggcaccggaccaagtgcgcgaggatggatgtgtagagaatcaagtccaccttggctgccccagcgacataagcctcaagcaacgaccgcgctgagtcatacagccccgtcttcatgcaagactcaaacagctgcctaatgatgaagttgttggtccttatgccagccgaacccatgaaccgtagccaccggagtgcaaggtcagttgacccatccttgatgtagatcatcagcaggtcacttgcggtcacctctatcgggaaacctgacgccttcatctccaacagcacctttgcagccaaatccagcagactcttattcgccagcattgtgagcaacgctgtaaacgtgctaagccctggccttgtccctgaattcgccatggagtgatacaaccgcattgctgcatccacctgccctgcggaggcatgcatttccaccagacaggcatatgtggccggcgtagggaaaaagccagacttctccatgtcaccgaacaacttggcggccatgtccaaccttccagaccgtgcattggcctcgaccaccatcgtgtacaagccaaagcttggtcggagccctcccctcctcatctcctcccaaagctccatcccagcatccagcttcccagatctcaccagtgcctccaccatggcggtgctcactgctgtgcttacccgatgcccgaccaccaccatctctctgtacattcccatggccgcatcaagcctccctgccttggccagcacgtccaccatcaccgaatacacgcccaccggcgcccgcccaattccctccctttgcttcatttcatcgaacatcttgcgggcggcgtcgatcctcccggcgcgcgccagcgcaggcaccgcgagctggtatgtgccctcgtcgagggcgcagcccgaggtcgccatttcgtcgagcacttcgaaggccttgaatgcaagccccctggtgagcaacagagagaggagggcgttgtaggcgggcgtctcgaggcccctgaagctgacgtcgcggaggcgcttgaagcagtagaaggccggctcgagaaggccgtgggtggcgagcgcggagacgacggcgttgaaggtcttggggaaggtggcgaggtcggagagcccgagggtgtcgtcgaagagcgcgaggagttcggaggagtgagttgccggcgggagacgcgcggcgaggagcgaggagaggtcgtcggaggggacgaaccacggctggaggcgcgcccatgcgacaagggagatgagcgggacggggtcggaagccgggagcgaggcggccgcgaggaggagcagcgcggggtctggcggggagggcagtgcggagagcgcggcggagagagtcgcgcccgatcggtgccggagcgcgagcgccgcgaggcgggccgccgctgcggggcgcgggagcgggtgcgcggaggcgccggataggatggtggggtcggcgcccggcacggccggccgcgccccgcgcgccgaggagagcagcgcgcccgactcgtccaggtagtccaccgtgtccgtccactcggggtcgggccgggacgggggcactggtggcggcgactcgaaggagagatgccgcgctatggctaaggagagggagacgccgccaccgccgccgcgaaggcgggcgctgcgcgcgaggccaacgcggagcagcatctcttctccctgtctcactcggtggtttggtcgccgctgccatcaggtggaggtggacattcggcaacggcaagcgcgattcaacggtccagattgcaaaggatcctcccatcccatgaatgacagaatgagcgaggtagcccaaacagaaattttggcccattcgagacggcctactgttgtggtccagtgatccagtctgcgtctctttccccgtcgtggtgggttccgatccaatcgacgtcgacgactccgcagccaccgctcctctcctctcgtcgcttcttctatctctcggcgtcgaatctcatccggccagtgaccacactctactagccgcccggaaggagttcttccgggattcgagccgttgctgccctcacctctgcaggcccagcgtcgagcggagatccaatcggaaattgaactgacttcatcttttgtcggtaagaaatccaactgtttcgtgtcaccccttcttcgctgtgaatgatctagtctaaatatttctgcaacactgctccggcgccctctgctaggtactgcagaacatcgcagctcgcagtaagatccgtatctatttgttcctagttccgtgtcttatacttttatgaatgacattgccattatgccagtgtgtagtaacaattgaatgccaatcacagacatatataaaattttggctcttccttttctatttctctatctacaatgttatgcgattaattgagcacttcgaaattgatattgttaattatggtcttcgttatatctattgtgtctactacactactgctagtgtatgtctagcaagatttctagccctgttttatttagcccccttgcctggtttttggatcctggctgagtctgtacgttggtttcagcatcccagtcaggagaagcaatgtcaggagtgatcacaaagttcgcggttacatccatggtgatgtggatggcccctgttgcgatcatgtatgggttttactaccaggtgtttccaggtgtgagtcagatgtcatcctcggcgcagacacttgccagtgggttcctggctgtcatatcagttaatctagtgatcggcttttacatattcatggcgatgaaggagactccacaccaagagccacagccagatcccaccttcctggagaaagccaaagcgagtatcaaccagccaacatcctctcgagtgagtgatgattccaaggggaagggaaaggtcgagtaagctgtagcatgttggcttaggtctcgtgtatgttaagtgcatgttatttaggaggaatagttatgccacaccatcacaaggaccgcaacctttcacaatttatgattttgctgtaaatcttgacagttatggctatggagcaatatgaagttgaaccttttgtacctatttgatttggaaactctgttcaatgttgttttagtcaggatactcatcagaactactgctggttgtattttggtcctttttggttttttggtactccctcctttcttttttatttgtcacgg

SEQ ID NO: 24096 - DNA, 753 bp, Zea Mays
atagggtgcagcttcagatctctatcaatggtggctgcgaagggcacaatggatggcattatgaacacggcctctgcaagcatgtccatgtacgcttaccttgctctcctcaagccccagggcaagatgatcctgcttggcctgcctgagaagcctctgcagatctctgccttctctttggttactgggggcaagactctggccgggagctgcatggggagcatcagggacacgcaggagatgatggacttcgcagccaagcacgggttggcagcggacatcgaactgatcggcaccgaagaagttaatgaggccatggaacgcctcgccaagggcgaggtcaggtaccgcttcgtcatcgacatcggcaacaccctcaacgcggcatcactagggagctcgccggtcccagctctgtagctgcggcacttgttgatcaacaaatgctcacataaacatattgttgtttgtcgatatatcgtgcgataagcaagtatatttggaataaaaaggaactcaatttaaacgcaagtaatactgtttgtcttaggtcctatttgggctttggtttattgggtactgcatagttttgccttcgtctagtagtctagtactagtagtaacagatgaaacgatgtactgagagacaaaaccgggggcgtcagtaacgggagccgactcagaggatctcgtcgcgacaaaaccagtctgtgatgctgaattaaggacacaaatttaaaaatccctaaacaa

SEQ ID NO: 24097 - DNA, 1473 bp, Zea Mays
ccacctcctagtaaataataaataaataggtaaataaatgcccatcacgggcgttggtccgtgcatggatgatggatcatgtgtttcaacctgtatgtagggcctgacgcacatggagaatctatggacactggagatgacgatgttgccatacagatactgtactgcgggatatgccactctgacctgcacaccatcaagaacgagtggaagaacgccaactaccctgttgtccctgggcacgagatcgccgggctgatcaccgaggttggcaagaacgtgaagaggttcaacgtcggagacaaggttggcgtcgggtgcatggtcaacacatgccagtcctgcgagagctgcgagggagggcacgagaactactgctccaagatcatcttcacctacaactcccacgacagggacggcaccgtcacctacggtggctactctgacatggttgtcgtcaacgagcgcttcgtcatccggttccctgatggcatgcccctcgacagaggcgcgccgctgctctgtgcagggataaccgtgtacaaccccatgaagcaccacgggctaaacgaggcaggcaagcacatcggcgtggttggactcggggggcttgggcacgtcgccgtgaagttcgcgaaggcgttcgggatgagggtgaccgtgatcagcacgtccccggggaagagggaggaagctatggagacgcttggtgcagacgcctttgttgtcagcggtgatgctaaccagatgaaggctgcgaagggcacaatggatggcattatgaacacggcctctgcaagcatgtccatgtacgcttaccttgctctcctcaagccccagggcaagatgatcctgcttggcctgcctgagaagcctctgcagatctctgccttctctttggttactgggggcaagactctggccgggagctgcatggggagcatcagggacacgcaggagatgatggacttcgcagccaagcacgggttggcagcggacatcgaactgatcggcaccgaagaagttaatgaggccatggaacgcctcgccaagggcgaggtcaggtaccgcttcgtcatcgacatcggcaacaccctcaacgcggcatcactagggagctcgccggtcccagctctgtagctgcggcacttgttgatcaacaaatgctcacataaacatattgttgtttgtcgatatatcgtgcgataagcaagtatatttggaataaaaaggaactcaatttaaacgcaagtaatactgtttgtcttaggtcctatttgggctttggtttattgggtactgcatagttttgccttcgtctagtagtctagtactagtagtaacagatgaaacgatgtactgagagacaaaaccgggggcgtcagtaacgggagccgactcagaggatctcgtcgcgacaaaaccagtctgtgatgctgaattaaggacacaaatttaaaaatccctaaacaa

SEQ ID NO: 24098 - DNA, 3391 bp, Zea Mays
caccaactagtactcagagattcagagctgagcatcgttgtgctagctgacagcgtactgtagtcttcccacccataaacctgagcgtcagaaacggtgctcacaatcacagcgcagggtgggcaccgattcgaacgctttctctcctccgccgctgatcccctctcgatttgttgtgcctccagcccccgattcctactgttgtggtccagtgatccaatcgacgtcgacgactccgcagccaccgctcctctcctctcgtcgcttctgccgtctctcggcgtcgaatctcatccggccagtgaccacactctactggccgcccggaaggagttcttccaggattcgagccgttgctgccgtcacctctgcaggcccagcgtcgagcggagatccaatcggaaattcaactgacttcgtcttttatcctccgattcgaacgctttatactccgccgttgatcccctctcgatttgttgtgcctccagcccccgattcctcctcattcgtcggcgatcgaacgcagccagccagttctcctcgacttcttccagtcccacccaccgaggttcctcttcttcttcggcgcgcccgtctcggtggacgccacaggaattggctcctgacttttttcaacgggtggtttcgctgggcccgatgcccgacgttatggccgcagccctaaccggcttctcgcctcgcggggtgattccgagcagaggcagagcatctcttcccggggtcgctagagcgtatgccgagaggcggttggttgcagaaaacacaagcctgccaaacatgcataaagaacaacttgagactataataaggaatcagctccggaagccccagttgccaccttcttcatacgacacagcgtgggtttctatggtgccagtgcggggctctcatcagactccccgcttcccacagtgtgttgagtggatactgcagaaccagcaggatgatggatcttggggtgtcagccaatctgactcatcggtcagcaaggatgttctcctatccacgttggcatgtgttcttgcgttgaagagatggaatgttggcagagagaacatttggagaggactgcatttcatcgggaggaatttctctgttgctatggacgagcagttcacttctcctataggtttcaacttcacctttcctggtttgcttagcctcggcattgatatgggtttagaatttcctgtaagacaaattgatgtctgtggcattcttcaccgccgggagatggaattgaaaaggctggctgtggatagttcttttggaagaaaagcatatatggcttttatcccagaaggattcggaaatatgctggactgggatcaagttatgaagtttcagaggaagaatggatcattgttcagcactccttccacaactgctgttgcattaatccacaaatacaacgaccaagcccttcaatacctaaatttgcttgtcaatgaatttggcagtgcagtaccagcaatgtatccttcaagggtacattgtcagctttcaatggtggacgcgcttgaaaaaatgggaatttctcagcgctttgtcagtgaaatagaaagcatcctggacatggcatacaattgctggttacagaatgatgaggaactcatgatggacatagcaacatttgcaatggcatttcgccttttgaggatgaatggttacgatgtttcctcagatgagctgtctcacgttgctggagcttccactttccatgattcactacaaggatatttaaatgatacaaaatccctactggaattgtacaagacctcaaaagtcaccttatcagaaaacgatctgatcttagatcgcataggatcctggtctggcaacttattgaaggataagatgtgctgtagtagggtgcaaaaagactcgatttttggagagatcgagtatgctgttaattttcccttgtattccacactggagcgtctagaacacaagagaaacatcgaacattttgatgcttggggttctctgatgctaacaacaaaatcctcatcttttcgtatcaatcaagaattcctagctttggcagtcgaagatttcagtttctctcaacgtgtttaccgggatgaacttcggcatcttgatagttgggtgaaggagaacaagctggaccagctacaatttgctcggcagaaactgacatattgctatctgtctgctgctgctaccgtattttcttctgaattgtctgacgctcgcatttcatgggccaaaaatggtgtcctcacaactgtggttgatgacttcttcgatgttggtggatcaaaagaagaattagaaaacctgatagcactagttgagaaatggcatgggcaccatgcagttgagttctattcggaacaggtgaaaatagtattttctgctatttatacaacagtgaaccatcttggagcaatggcttctgcagcacaaggccgtgatcttacaaaccacctagtagaaatatggctggatttgttaagatctatgatggtcgaggcagaatggcagagatgccaatatgtaccaacagttgaagaatacatgacaaatgctgttgtctcatttgcactgggcccaattgtgctcccagcattgtattttgtagggcaagagctattagagcatgctgtcaaagatgaagagtacgataaattatttaggctagtgagcacttgcgggaggctcctcaatgactaccaaagtttagagagggaaggcaaccaggggaagctgaatagtgtttctctacttgtgctccacagtggtggttctatgtccatagaagccgctaaaaaggcaatgcagaagtccatagacgtgtctaggagagacttgctaagattggttctcaggaaagaaagtgctgttcctaggccatgcaaggagctcttctggaagatgtgtaagatacttcacctgttttactctcagaatgatggatttagctccccaaaggaaatggtcagtgcagtgaatgctgttatcaacgagccactcaaagtccaaaacagtactacgtttttgtctagttcatcaaggtagcgaggatatcatgtaatttatcctgttcatatggatcagaagcaacagcagcaagcttaagatatttgtaagtttgtgactgggctgctgtggatctgtgaagctacaactttgctgtatgtggatcaagctagtcacacttctgcactgcacatgcttggctgttgtctccaaatcaaacaccgtcaaaagaatgcatcttgatcagagataacaaatcctactacagcttaacatcagagataaaggtctccggagtaggcgtgagcatcaagttagcatgcttggctcaaaaataattgggcgaaaggtctgaaagtggaaa

SEQ ID NO: 24099 - DNA, 3397 bp, Zea Mays
gggtgggcaccgattcgaacgctttctctcctccgccgctgatcccctctcgatttgttgtgcctccagcccccgattcctactgttgtggtccagtgatccaatcgacgtcgacgactccgcagccaccgctcctctcctctcgtcgcttctgccgtctctcggcgtcgaatctcatccggccagtgaccacactctactggccgcccggaaggagttcttccaggattcgagccgttgctgccgtcacctctgcaggcccagcgtcgagcggagatccaatcggaaattcaactgacttcgtcttttatcctccgattcgaacgctttatactccgccgttgatcccctctcgatttgttgtgcctccagcccccgattcctcctcattcgtcggcgatcgaacgcagccagccagttctcctcgacttcttccagtcccacccaccgaggttcttctctcctccgcccccgacagctgattgccttcttgctggtgactaaaacctactagctgcttgcttcgttcttcctttttatttctgggtgcgggcgacgagttctcagatcttcgggttcgcgtcgcgagtggtacatacattcctataataagcagtcccaaaaactcaaacttctcgatcaggttcctcttcttcttcggcgcgcccgtctcggtggacgccacaggaattggctcctgacttttttcaacgggtggtttcgctgggcccgatgcccgacgttatggccgcagccctaaccggcttctcgcctcgcggggtgattccgagcagaggcagagcatctcttcccggggtcgctagagcgtatgccgagaggcggttggttgcagaaaacacaagcctgccaaacatgcataaagaacaacttgagactataataaggaatcagctccggaagccccagttgccaccttcttcatacgacacagcgtgggtttctatggtgccagtgcggggctctcatcagactccccgcttcccacagtgtgttgagtggatactgcagaaccagcaggatgatggatcttggggtgtcagccaatctgactcatcggtcagcaaggatgttctcctatccacgttggcatgtgttcttgcgttgaagagatggaatgttggcagagagaacatttggagaggactgcatttcatcgggaggaatttctctgttgctatggacgagcagttcacttctcctataggtttcaacttcacctttcctggtttgcttagcctcggcattgatatgggtttagaatttcctgtaagacaaattgatgtctgtggcattcttcaccgccgggagatggaattgaaaaggctggctgtggatagttcttttggaagaaaagcatatatggcttttatcccagaaggattcggaaatatgctggactgggatcaagttatgaagtttcagaggaagaatggatcattgttcagcactccttccacaactgctgttgcattaatccacaaatacaacgaccaagcccttcaatacctaaatttgcttgtcaatgaatttggcagtgcagcaatgtatccttcaagggtacattgtcagctttcaatggtggacgcgcttgaaaaaatgggaatttctcagcgctttgtcagtgaaatagaaagcatcctggacatggcatacaattgctggttacagaatgatgaggaactcatgatggacatagcaacatttgcaatggcatttcgccttttgaggatgaatggttacgatgtttcctcagatgagctgtctcacgttgctggagcttccactttccatgattcactacaaggatatttaaatgatacaaaatccctactggaattgtacaagacctcaaaagtcaccttatcagaaaacgatctgatcttagatcgcataggatcctggtctggcaacttattgaaggataagatgtgctgtagtagggtgcaaaaagactcgatttttggagaggtgctgcaaacaaaatttaaattctcattttcaccttggaggttcagtttatgtctgtgttttgtgatttcagatcgagtatgctgttaattttcccttgtattccacactggagcgtctagaacacaagagaaacatcgaacattttgatgcttggggttctctgatgctaacaacaaaatcctcatcttttcgtatcaatcaagaattcctagctttggcagtcgaagatttcagtttctctcaacgtgtttaccgggatgaacttcggcatcttgatagttgggtgaaggagaacaagctggaccagctacaatttgctcggcagaaactgacatattgctatctgtctgctgctgctaccgtattttcttctgaattgtctgacgctcgcatttcatgggccaaaaatggtgtcctcacaactgtggttgatgacttcttcgatgttggtggatcaaaagaagaattagaaaacctgatagcactagttgagaaatggcatgggcaccatgcagttgagttctattcggaacaggtgaaaatagtattttctgctatttatacaacagtgaaccatcttggagcaatggcttctgcagcacaaggccgtgatcttacaaaccacctagtagaaatatggctggatttgttaagatctatgatggtcgaggcagaatggcagagatgccaatatgtaccaacagttgaagaatacatgacaaatgctgttgtctcatttgcactgggcccaattgtgctcccagcattgtattttgtagggcaagagctattagagcatgctgtcaaagatgaagagtacgataaattatttaggctagtgagcacttgcgggaggctcctcaatgactaccaaagtttagagagggaaggcaaccaggggaagctgaatagtgtttctctacttgtgctccacagtggtggttctatgtccatagaagccgctaaaaaggcaatgcagaagtccatagacgtgtctaggagagacttgctaagattggttctcaggaaagaaagtgctgttcctaggccatgcaaggagctcttctggaagatgtgtaagatacttcacctgttttactctcagaatgatggatttagctccccaaaggaaatggtcagtgcagtgaatgctgttatcaacgagccactcaaagtccaaaacagtactacgtttttgtctagttcatcaaggtagcgaggatatcatgtaatttatcctgttcatatggatcagaagcaacagcagcaagcttaagatatttgtaagtttgtgactgggctgctgtggatctgtgaagctacaactttgctgtatgtggatcaaggtattaggaagatctggttcacatattgataacataatggataaaccataacgttaaat

SEQ ID NO: 24100 - DNA, 3002 bp, Zea Mays
gggtgggcaccgattcgaacgctttctctcctccgccgctgatcccctctcgatttgttgtgcctccagcccccgattcctactgttgtggtccagtgatccaatcgacgtcgacgactccgcagccaccgctcctctcctctcgtcgcttctgccgtctctcggcgtcgaatctcatccggccagtgaccacactctactggccgcccggaaggagttcttccaggattcgagccgttgctgccgtcacctctgcaggcccagcgtcgagcggagatccaatcggaaattcaactgacttcgtcttttatcctccgattcgaacgctttatactccgccgttgatcccctctcgatttgttgtgcctccagcccccgattcctcctcattcgtcggcgatcgaacgcagccagccagttctcctcgacttcttccagtcccacccaccgaggttcttctctcctccgcccccgacagctgattgccttcttgctggtgactaaaacctactagctgcttgcttcgttcttcctttttatttctgggtgcgggcgacgagttctcagatcttcgggttcgcgtcgcgagtggtacatacattcctataataagcagtcccaaaaactcaaacttctcgatcaggttcctcttcttcttcggcgcgcccgtctcggtggacgccacaggaattggctcctgacttttttcaacgggtggtttcgctgggcccgatgcccgacgttatggccgcagccctaaccggcttctcgcctcgcggggtgattccgagcagaggcagagcatctcttcccggggtcgctagagcgtatgccgagaggcggttggttgcagaaaacacaagcctgccaaacatgcataaagaacaacttgagactataataaggaatcagctccggaagccccagttgccaccttcttcatacgacacagcgtgggtttctatggtgccagtgcggggctctcatcagactccccgcttcccacagtgtgttgagtggatactgcagaaccagcaggatgatggatcttggggtgtcagccaatctgactcatcggtcagcaaggatgttctcctatccacgttggcatgtgttcttgcgttgaagagatggaatgttggcagagagaacatttggagaggactgcatttcatcgggaggaatttctctgttgctatggacgagcagttcacttctcctataggtttcaacttcacctttcctggtttgcttagcctcggcattgatatgggtttagaatttcctgtaagacaaattgatgtctgtggcattcttcaccgccgggagatggaattgaaaaggctggctgtggatagttcttttggaagaaaagcatatatggcttttatcccagaaggattcggaaatatgctggactgggatcaagttatgaagtttcagaggaagaatggatcattgttcagcactccttccacaactgctgttgcattaatccacaaatacaacgaccaagcccttcaatacctaaatttgcttgtcaatgaatttggcagtgcagtaccagcaatgtatccttcaagggtacattgtcagctttcaatggtggacgcgcttgaaaaaatgggaatttctcagcgctttgtcagtgaaatagaaagcatcctggacatggcatacaattgctggttacagaatgatgaggaactcatgatggacatagcaacatttgcaatggcatttcgccttttgaggatgaatggttacgatgtttcctcagatcttttcgtatcaatcaagaattcctagctttggcagtcgaagatttcagtttctctcaacgtgtttaccgggatgaacttcggcatcttgatagttgggtgaaggagaacaagctggaccagctacaatttgctcggcagaaactgacatattgctatctgtctgctgctgctaccgtattttcttctgaattgtctgacgctcgcatttcatgggccaaaaatggtgtcctcacaactgtggttgatgacttcttcgatgttggtggatcaaaagaagaattagaaaacctgatagcactagttgagaaatggcatgggcaccatgcagttgagttctattcggaacaggtgaaaatagtattttctgctatttatacaacagtgaaccatcttggagcaatggcttctgcagcacaaggccgtgatcttacaaaccacctagtagaaatatggctggatttgttaagatctatgatggtcgaggcagaatggcagagatgccaatatgtaccaacagttgaagaatacatgacaaatgctgttgtctcatttgcactgggcccaattgtgctcccagcattgtattttgtagggcaagagctattagagcatgctgtcaaagatgaagagtacgataaattatttaggctagtgagcacttgcgggaggctcctcaatgactaccaaagtttagagagggaaggcaaccaggggaagctgaatagtgtttctctacttgtgctccacagtggtggttctatgtccatagaagccgctaaaaaggcaatgcagaagtccatagacgtgtctaggagagacttgctaagattggttctcaggaaagaaagtgctgttcctaggccatgcaaggagctcttctggaagatgtgtaagatacttcacctgttttactctcagaatgatggatttagctccccaaaggaaatggtcagtgcagtgaatgctgttatcaacgagccactcaaagtccaaaacagtactacgtttttgtctagttcatcaaggtagcgaggatatcatgtaatttatcctgttcatatggatcagaagcaacagcagcaagcttaagatatttgtaagtttgtgactgggctgctgtggatctgtgaagctacaactttgctgtatgtggatcaaggtattaggaagatctggttcacatattgataacataatggataaaccataacgttaaat

SEQ ID NO: 24101 - DNA, 3360 bp, Zea Mays
cgtactgtagtcttcccacccataaacctgagcgtcagaaacggtgctcacaatcacagcgcagggtgggcaccgattcgaacgctttctctcctccgccgctgatcccctctcgatttgttgtgcctccagcccccgattcctactgttgtggtccagtgatccaatcgacgtcgacgactccgcagccaccgctcctctcctctcgtcgcttctgccgtctctcggcgtcgaatctcatccggccagtgaccacactctactggccgcccggaaggagttcttccaggattcgagccgttgctgccgtcacctctgcaggcccagcgtcgagcggagatccaatcggaaattcaactgacttcgtcttttatcctccgattcgaacgctttatactccgccgttgatcccctctcgatttgttgtgcctccagcccccgattcctcctcattcgtcggcgatcgaacgcagccagccagttctcctcgacttcttccagtcccacccaccgaggttcttctctcctccgcccccgacagctgattgccttcttgctggtgactaaaacctactagctgcttgcttcgttcttcctttttatttctgggtgcgggcgacgagttctcagatcttcgggttcgcgtcgcgagtggtacatacattcctataataagcagtcccaaaaactcaaacttctcgatcaggttcctcttcttcttcggcgcgcccgtctcggtggacgccacaggaattggctcctgacttttttcaacgggtggtttcgctgggcccgatgcccgacgttatggccgcagccctaaccggcttctcgcctcgcggggtgattccgagcagaggcagagcatctcttcccggggtcgctagagcgtatgccgagaggcggttggttgcagaaaacacaagcctgccaaacatgcataaagaacaacttgagactataataaggaatcagctccggaagccccagttgccaccttcttcatacgacacagcgtgggtttctatggtgccagtgcggggctctcatcagactccccgcttcccacagtgtgttgagtggatactgcagaaccagcaggatgatggatcttggggtgtcagccaatctgactcatcggtcagcaaggatgttctcctatccacgttggcatgtgttcttgcgttgaagagatggaatgttggcagagagaacatttggagaggactgcatttcatcgggaggaatttctctgttgctatggacgagcagttcacttctcctataggtttcaacttcacctttcctggtttgcttagcctcggcattgatatgggtttagaatttcctgtaagacaaattgatgtctgtggcattcttcaccgccgggagatggaattgaaaaggctggctgtggatagttcttttggaagaaaagcatatatggcttttatcccagaaggattcggaaatatgctggactgggatcaagttatgaagtttcagaggaagaatggatcattgttcagcactccttccacaactgctgttgcattaatccacaaatacaacgaccaagcccttcaatacctaaatttgcttgtcaatgaatttggcagtgcagtaccagcaatgtatccttcaagggtacattgtcagctttcaatggtggacgcgcttgaaaaaatgggaatttctcagcgctttgtcagtgaaatagaaagcatcctggacatggcatacaaaatgatgaggaactcatgatggacatagcaacatttgcaatggcatttcgccttttgaggatgaatggttacgatgtttcctcagatgagctgtctcacgttgctggagcttccactttccatgattcactacaaggatatttaaatgatacaaaatccctactggaattgtacaagacctcaaaagtcaccttatcagaaaacgatctgatcttagatcgcataggatcctggtctggcaacttattgaaggataagatgtgctgtagtagggtgcaaaaagactcgatttttggagagatcgagtatgctgttaattttcccttgtattccacactggagcgtctagaacacaagagaaacatcgaacattttgatgcttggggttctctgatgctaacaacaaaatcctcatcttttcgtatcaatcaagaattcctagctttggcagtcgaagatttcagtttctctcaacgtgtttaccgggatgaacttcggcatcttgatagttgggtgaaggagaacaagctggaccagctacaatttgctcggcagaaactgacatattgctatctgtctgctgctgctaccgtattttcttctgaattgtctgacgctcgcatttcatgggccaaaaatggtgtcctcacaactgtggttgatgacttcttcgatgttggtggatcaaaagaagaattagaaaacctgatagcactagttgagaattgagttctattcggaacaggtgaaaatagtattttctgctatttatacaacagtgaaccatcttggagcaatggcttctgcagcacaaggccgtgatcttacaaaccacctagtagaaatatggctggatttgttaagatctatgatggtcgaggcagaatggcagagatgccaatatgtaccaacagttgaagaatacatgacaaatgctgttgtctcatttgcactgggcccaattgtgctcccagcattgtattttgtagggcaagagctattagagcatgctgtcaaagatgaagagtacgataaattatttaggctagtgagcacttgcgggaggctcctcaatgactaccaaagtttagagagggaaggcaaccaggggaagctgaatagtgtttctctacttgtgctccacagtggtggttctatgtccatagaagccgctaaaaaggcaatgcagaagtccatagacgtgtctaggagagacttgctaagattggttctcaggaaagaaagtgctgttcctaggccatgcaaggagctcttctggaagatgtgtaagatacttcacctgttttactctcagaatgatggatttagctccccaaaggaaatggtcagtgcagtgaatgctgttatcaacgagccactcaaagtccaaaacagtactacgtttttgtctagttcatcaaggtagcgaggatatcatgtaatttatcctgttcatatggatcagaagcaacagcagcaagcttaagatatttgtaagtttgtgactgggctgctgtggatctgtgaagctacaactttgctgtatgtggatcaaggtattaggaagatctggttcacatattgataacataatggataaaccataacgttaaat

SEQ ID NO: 24102 - DNA, 3245 bp, Zea Mays
cagagattcagagctgagcatcgttgtgctagctgacagcgtactgtagtcttcccacccataaacctgagcgtcagaaacggtgctcacaatcacagcgcagggtgggcaccgattcgaacgctttctctcctccgccgctgatcccctctcgatttgttgtgcctccagcccccgattcctactgttgtggtccagtgatccaatcgacgtcgacgactccgcagccaccgctcctctcctctcgtcgcttctgccgtctctcggcgtcgaatctcatccggccagtgaccacactctactggccgcccggaaggagttcttccaggattcgagccgttgctgccgtcacctctgcaggcccagcgtcgagcggagatccaatcggaaattcaactgacttcgtcttttatcctccgattcgaacgctttatactccgccgttgatcccctctcgatttgttgtgcctccagcccccgattcctcctcattcgtcggcgatcgaacgcagccagccagttctcctcgacttcttccagtcccacccaccgaggttcgttcctcttcttcttcggcgcgcccgtctcggtggacgccacaggaattggctcctgacttttttcaacgggtggtttcgctgggcccgatgcccgacgttatggccgcagccctaaccggcttctcgcctcgcggggtgattccgagcagaggcagagcatctcttcccggggtcgctagagcgtatgccgagaggcggttggttgcagaaaacacaagcctgccaaacatgcataaagaacaacttgagactataataaggaatcagctccggaagccccagttgccaccttcttcatacgacacagcgtgggtttctatggtgccagtgcggggctctcatcagactccccgcttcccacagtgtgttgagtggatactgcagaaccagcaggatgatggatcttggggtgtcagccaatctgactcatcggtcagcaaggatgttctcctatccacgttggcatgtgttcttgcgttgaagagatggaatgttggcagagagaacatttggagaggactgcatttcatcgggaggaatttctctgttgctatggacgagcagttcacttctcctataggtttcaacttcacctttcctggtttgcttagcctcggcattgatatgggtttagaatttcctgtaagacaaattgatgtctgtggcattcttcaccgccgggagatggaattgaaaaggctggctgtggatagttcttttggaagaaaagcatatatggcttttatcccagaaggattcggaaatatgctggactgggatcaagttatgaagtttcagaggaagaatggatcattgttcagcactccttccacaactgctgttgcattaatccacaaatacaacgaccaagcccttcaatacctaaatttgcttgtcaatgaatttggcagtgcagtaccagcaatgtatccttcaagggtacattgtcagctttcaatggtggacgcgcttgaaaaaatgggaatttctcagcgctttgtcagtgaaatagaaagcatcctggacatggcatacaattgctggttacagaatgatgaggaactcatgatggacatagcaacatttgcaatggcatttcgccttttgaggatgaatggttacgatgtttcctcagatgagctgtctcacgttgctggagcttccactttccatgattcactacaaggatatttaaatgatacaaaatccctactggaattgtacaagacctcaaaagtcaccttatcagaaaacgatctgatcttagatcgcataggatcctggtctggcaacttattgaaggataagatgtgctgtagtagggtgcaaaaagactcgatttttggagagatcgagtatgctgttaattttcccttgtattccacactggagcgtctagaacacaagagaaacatcgaacattttgatgcttggggttctctgatgctaacaacaaaatcctcatcttttcgtatcaatcaagaattcctagctttggcagtcgaagatttcagtttctctcaacgtgtttaccgggatgaacttcggcatcttgatagttgggtgaaggagaacaagctggaccagctacaatttgctcggcagaaactgacatattgctatctgtctgctgctgctaccgtattttcttctgaattgtctgacgctcgcatttcatgggccaaaaatggtgtcctcacaactgtggttgatgacttcttcgatgttggtggatcaaaagaagaattagaaaacctgatagcactagttgagaaatggcatgggcaccatgcagttgagttctattcggaacaggtgaaaatagtattttctgctatttatacaacagtgaaccatcttggagcaatggcttctgcagcacaaggccgtgatcttacaaaccacctagtagaaatatggctggatttgttaagatctatgatggtcgaggcagaatggcagagatgccaatatgtaccaacagttgaagaatacatgacaaatgctgttgtctcatttgcactgggcccaattgtgctcccagcattgtattttgtagggcaagagctattagagcatgctgtcaaagatgaagagtacgataaattatttaggctagtgagcacttgcgggaggctcctcaatgactaccaaagtttagagagggaaggcaaccaggggaagctgaatagtgtttctctacttgtgctccacagtggtggttctatgtccatagaagccgctaaaaaggcaatgcagaagtccatagacgtgtctaggagagacttgctaagattggttctcaggaaagaaagtgctgttcctaggccatgcaaggagctcttctggaagatgtgtaagatacttcacctgttttactctcagaatgatggatttagctccccaaaggaaatggtcagtgcagtgaatgctgttatcaacgagccactcaaagtccaaaacagtactacgtttttgtctagttcatcaaggtagcgaggatatcatgtaatttatcctgttcatatggatcagaagcaacagcagcaagcttaagatatttgtaagtttgtgactgggctgctgtggatctgtgaagctacaactttgctgtatgtggatcaaggtattaggaagatctggttcacatattgataacataatggataaaccataacgttaaat

SEQ ID NO: 24103 - DNA, 3285 bp, Zea Mays
cagagattcagagctgagcatcgttgtgctagctgacagcgtactgtagtcttcccacccataaacctgagcgtcagaaacggtgctcacaatcacagcgcagggtgggcaccgattcgaacgctttctctcctccgccgctgatcccctctcgatttgttgtgcctccagcccccgattcctactgttgtggtccagtgatccaatcgacgtcgacgactccgcagccaccgctcctctcctctcgtcgcttctgccgtctctcggcgtcgaatctcatccggccagtgaccacactctactggccgcccggaaggagttcttccaggattcgagccgttgctgccgtcacctctgcaggcccagcgtcgagcggagatccaatcggaaattcaactgacttcgtcttttatcctccgattcgaacgctttatactccgccgttgatcccctctcgatttgttgtgcctccagcccccgattcctcctcattcgtcggcgatcgaacgcagccagccagttctcctcgacttcttccagtcccacccaccgaggttcttctctcctccgcccccgacagctgattgccttcttgctggttcctcttcttcttcggcgcgcccgtctcggtggacgccacaggaattggctcctgacttttttcaacgggtggtttcgctgggcccgatgcccgacgttatggccgcagccctaaccggcttctcgcctcgcggggtgattccgagcagaggcagagcatctcttcccggggtcgctagagcgtatgccgagaggcggttggttgcagaaaacacaagcctgccaaacatgcataaagaacaacttgagactataataaggaatcagctccggaagccccagttgccaccttcttcatacgacacagcgtgggtttctatggtgccagtgcggggctctcatcagactccccgcttcccacagtgtgttgagtggatactgcagaaccagcaggatgatggatcttggggtgtcagccaatctgactcatcggtcagcaaggatgttctcctatccacgttggcatgtgttcttgcgttgaagagatggaatgttggcagagagaacatttggagaggactgcatttcatcgggaggaatttctctgttgctatggacgagcagttcacttctcctataggtttcaacttcacctttcctggtttgcttagcctcggcattgatatgggtttagaatttcctgtaagacaaattgatgtctgtggcattcttcaccgccgggagatggaattgaaaaggctggctgtggatagttcttttggaagaaaagcatatatggcttttatcccagaaggattcggaaatatgctggactgggatcaagttatgaagtttcagaggaagaatggatcattgttcagcactccttccacaactgctgttgcattaatccacaaatacaacgaccaagcccttcaatacctaaatttgcttgtcaatgaatttggcagtgcagtaccagcaatgtatccttcaagggtacattgtcagctttcaatggtggacgcgcttgaaaaaatgggaatttctcagcgctttgtcagtgaaatagaaagcatcctggacatggcatacaattgctggttacagaatgatgaggaactcatgatggacatagcaacatttgcaatggcatttcgccttttgaggatgaatggttacgatgtttcctcagatgagctgtctcacgttgctggagcttccactttccatgattcactacaaggatatttaaatgatacaaaatccctactggaattgtacaagacctcaaaagtcaccttatcagaaaacgatctgatcttagatcgcataggatcctggtctggcaacttattgaaggataagatgtgctgtagtagggtgcaaaaagactcgatttttggagagatcgagtatgctgttaattttcccttgtattccacactggagcgtctagaacacaagagaaacatcgaacattttgatgcttggggttctctgatgctaacaacaaaatcctcatcttttcgtatcaatcaagaattcctagctttggcagtcgaagatttcagtttctctcaacgtgtttaccgggatgaacttcggcatcttgatagttgggtgaaggagaacaagctggaccagctacaatttgctcggcagaaactgacatattgctatctgtctgctgctgctaccgtattttcttctgaattgtctgacgctcgcatttcatgggccaaaaatggtgtcctcacaactgtggttgatgacttcttcgatgttggtggatcaaaagaagaattagaaaacctgatagcactagttgagaaatggcatgggcaccatgcagttgagttctattcggaacaggtgaaaatagtattttctgctatttatacaacagtgaaccatcttggagcaatggcttctgcagcacaaggccgtgatcttacaaaccacctagtagaaatatggctggatttgttaagatctatgatggtcgaggcagaatggcagagatgccaatatgtaccaacagttgaagaatacatgacaaatgctgttgtctcatttgcactgggcccaattgtgctcccagcattgtattttgtagggcaagagctattagagcatgctgtcaaagatgaagagtacgataaattatttaggctagtgagcacttgcgggaggctcctcaatgactaccaaagtttagagagggaaggcaaccaggggaagctgaatagtgtttctctacttgtgctccacagtggtggttctatgtccatagaagccgctaaaaaggcaatgcagaagtccatagacgtgtctaggagagacttgctaagattggttctcaggaaagaaagtgctgttcctaggccatgcaaggagctcttctggaagatgtgtaagatacttcacctgttttactctcagaatgatggatttagctccccaaaggaaatggtcagtgcagtgaatgctgttatcaacgagccactcaaagtccaaaacagtactacgtttttgtctagttcatcaaggtagcgaggatatcatgtaatttatcctgttcatatggatcagaagcaacagcagcaagcttaagatatttgtaagtttgtgactgggctgctgtggatctgtgaagctacaactttgctgtatgtggatcaaggtattaggaagatctggttcacatattgataacataatggataaaccataacgttaaat

SEQ ID NO: 24104 - DNA, 3315 bp, Zea Mays
caccaactagtactcagagattcagagctgagcatcgttgtgctagctgacagcgtactgtagtcttcccacccataaacctgagcgtcagaaacggtgctcacaatcacagcgcagggtgggcaccgattcgaacgctttctctcctccgccgctgatcccctctcgatttgttgtgcctccagcccccgattcctactgttgtggtccagtgatccaatcgacgtcgacgactccgcagccaccgctcctctcctctcgtcgcttctgccgtctctcggcgtcgaatctcatccggccagtgaccacactctactggccgcccggaaggagttcttccaggattcgagccgttgctgccgtcacctctgcaggcccagcgtcgagcggagatccaatcggaaattcaactgacttcgtcttttatcctccgattcgaacgctttatactccgccgttgatcccctctcgatttgttgtgcctccagcccccgattcctcctcattcgtcggcgatcgaacgcagccagccagttctcctcgacttcttccagtcccacccaccgaggttcctcttcttcttcggcgcgcccgtctcggtggacgccacaggaattggctcctgacttttttcaacgggtggtttcgctgggcccgatgcccgacgttatggccgcagccctaaccggcttctcgcctcgcggggtgattccgagcagaggcagagcatctcttcccggggtcgctagagcgtatgccgagaggcggttggttgcagaaaacacaagcctgccaaacatgcataaagaacaacttgagactataataaggaatcagctccggaagccccagttgccaccttcttcatacgacacagcgtgggtttctatggtgccagtgcggggctctcatcagactccccgcttcccacagtgtgttgagtggatactgcagaaccagcaggatgatggatcttggggtgtcagccaatctgactcatcggtcagcaaggatgttctcctatccacgttggcatgtgttcttgcgttgaagagatggaatgttggcagagagaacatttggagaggactgcatttcatcgggaggaatttctctgttgctatggacgagcagttcacttctcctataggtttcaacttcacctttcctggtttgcttagcctcggcattgatatgggtttagaatttcctgtaagacaaattgatgtctgtggcattcttcaccgccgggagatggaattgaaaaggctggctgtggatagttcttttggaagaaaagcatatatggcttttatcccagaaggattcggaaatatgctggactgggatcaagttatgaagtttcagaggaagaatggatcattgttcagcactccttccacaactgctgttgcattaatccacaaatacaacgaccaagcccttcaatacctaaatttgcttgtcaatgaatttggcagtgcagtaccagcaatgtatccttcaagggtacattgtcagctttcaatggtggacgcgcttgaaaaaatgggaatttctcagcgctttgtcagtgaaatagaaagcatcctggacatggcatacaaaatgatgaggaactcatgatggacatagcaacatttgcaatggcatttcgccttttgaggatgaatggttacgatgtttcctcagatgagctgtctcacgttgctggagcttccactttccatgattcactacaaggatatttaaatgatacaaaatccctactggaattgtacaagacctcaaaagtcaccttatcagaaaacgatctgatcttagatcgcataggatcctggtctggcaacttattgaaggataagatgtgctgtagtagggtgcaaaaagactcgatttttggagaggtgctgcaaacaaaatttaaattctcattttcaccttggaggttcagtttatgtctgtgttttgtgatttcagatcgagtatgctgttaattttcccttgtattccacactggagcgtctagaacacaagagaaacatcgaacattttgatgcttggggttctctgatgctaacaacaaaatcctcatcttttcgtatcaatcaagaattcctagctttggcagtcgaagatttcagtttctctcaacgtgtttaccgggatgaacttcggcatcttgatagttgggtgaaggagaacaagctggaccagctacaatttgctcggcagaaactgacatattgctatctgtctgctgctgctaccgtattttcttctgaattgtctgacgctcgcatttcatgggccaaaaatggtgtcctcacaactgtggttgatgacttcttcgatgttggtggatcaaaagaagaattagaaaacctgatagcactagttgagaaatggcatgggcaccatgcagttgagttctattcggaacaggtgaaaatagtattttctgctatttatacaacagtgaaccatcttggagcaatggcttctgcagcacaaggccgtgatcttacaaaccacctagtagaaatatggctggatttgttaagatctatgatggtcgaggcagaatggcagagatgccaatatgtaccaacagttgaagaatacatgacaaatgctgttgtctcatttgcactgggcccaattgtgctcccagcattgtattttgtagggcaagagctattagagcatgctgtcaaagatgaagagtacgataaattatttaggctagtgagcacttgcgggaggctcctcaatgactaccaaagtttagagagggaaggcaaccaggggaagctgaatagtgtttctctacttgtgctccacagtggtggttctatgtccatagaagccgctaaaaaggcaatgcagaagtccatagacgtgtctaggagagacttgctaagattggttctcaggaaagaaagtgctgttcctaggccatgcaaggagctcttctggaagatgtgtaagatacttcacctgttttactctcagaatgatggatttagctccccaaaggaaatggtcagtgcagtgaatgctgttatcaacgagccactcaaagtccaaaacagtactacgtttttgtctagttcatcaaggtagcgaggatatcatgtaatttatcctgttcatatggatcagaagcaacagcagcaagcttaagatatttgtaagtttgtgactgggctgctgtggatctgtgaagctacaactttgctgtatgtggatcaaggtattaggaagatctggttcacatattgataacataatggataaaccataacgttaaat

SEQ ID NO: 24105 - DNA, 3308 bp, Zea Mays
caccaactagtactcagagattcagagctgagcatcgttgtgctagctgacagcgtactgtagtcttcccacccataaacctgagcgtcagaaacggtgctcacaatcacagcgcagggtgggcaccgattcgaacgctttctctcctccgccgctgatcccctctcgatttgttgtgcctccagcccccgattcctactgttgtggtccagtgatccaatcgacgtcgacgactccgcagccaccgctcctctcctctcgtcgcttctgccgtctctcggcgtcgaatctcatccggccagtgaccacactctactggccgcccggaaggagttcttccaggattcgagccgttgctgccgtcacctctgcaggcccagcgtcgagcggagatccaatcggaaattcaactgacttcgtcttttatcctccgattcgaacgctttatactccgccgttgatcccctctcgatttgttgtgcctccagcccccgattcctcctcattcgtcggcgatcgaacgcagccagccagttctcctcgacttcttccagtcccacccaccgaggttcctcttcttcttcggcgcgcccgtctcggtggacgccacaggaattggctcctgacttttttcaacgggtggtttcgctgggcccgatgcccgacgttatggccgcagccctaaccggcttctcgcctcgcggggtgattccgagcagaggcagagcatctcttcccggggtcgctagagcgtatgccgagaggcggttggttgcagaaaacacaagcctgccaaacatgcataaagaacaacttgagactataataaggaatcagctccggaagccccagttgccaccttcttcatacgacacagcgtgggtttctatggtgccagtgcggggctctcatcagactccccgcttcccacagtgtgttgagtggatactgcagaaccagcaggatgatggatcttggggtgtcagccaatctgactcatcggtcagcaaggatgttctcctatccacgttggcatgtgttcttgcgttgaagagatggaatgttggcagagagaacatttggagaggactgcatttcatcgggaggaatttctctgttgctatggacgagcagttcacttctcctataggtttcaacttcacctttcctggtttgcttagcctcggcattgatatgggtttagaatttcctgtaagacaaattgatgtctgtggcattcttcaccgccgggagatggaattgaaaaggctggctgtggatagttcttttggaagaaaagcatatatggcttttatcccagaaggattcggaaatatgctggactgggatcaagttatgaagtttcagaggaagaatggatcattgttcagcactccttccacaactgctgttgcattaatccacaaatacaacgaccaagcccttcaatacctaaatttgcttgtcaatgaatttggcagtgcagtaccagcaatgtatccttcaagggtacattgtcagctttcaatggtggacgcgcttgaaaaaatgggaatttctcagcgctttgtcagtgaaatagaaagcatcctggacatggcatacaattgctggttacagaatgatgaggaactcatgatggacatagcaacatttgcaatggcatttcgccttttgaggatgaatggttacgatgtttcctcagatgagctgtctcacgttgctggagcttccactttccatgattcactacaaggatatttaaatgatacaaaatccctactggaattgtacaagacctcaaaagtcaccttatcagaaaacgatctgatcttagatcgcataggatcctggtctggcaacttattgaaggataagatgtgctgtagtagggtgcaaaaagactcgatttttggagaggtgctgcaaacaaaatttaaattctcattttcaccttggaggttcagtttatgtctgtgttttgtgatttcagatcgagtatgctgttaattttcccttgtattccacactggagcgtctagaacacaagagaaacatcgaacattttgatgcttggggttctctgatgctaacaacaaaatcctcatcttttcgtatcaatcaagaattcctagctttggcagtcgaagatttcagtttctctcaacgtgtttaccgggatgaacttcggcatcttgatagttgggtgaaggagaacaagctggaccagctacaatttgctcggcagaaactgacatattgctatctgtctgctgctgctaccgtattttcttctgaattgtctgacgctcgcatttcatgggccaaaaatggtgtcctcacaactgtggttgatgacttcttcgatgttggtggatcaaaagaagaattagaaaacctgatagcactagttgagaattgagttctattcggaacaggtgaaaatagtattttctgctatttatacaacagtgaaccatcttggagcaatggcttctgcagcacaaggccgtgatcttacaaaccacctagtagaaatatggctggatttgttaagatctatgatggtcgaggcagaatggcagagatgccaatatgtaccaacagttgaagaatacatgacaaatgctgttgtctcatttgcactgggcccaattgtgctcccagcattgtattttgtagggcaagagctattagagcatgctgtcaaagatgaagagtacgataaattatttaggctagtgagcacttgcgggaggctcctcaatgactaccaaagtttagagagggaaggcaaccaggggaagctgaatagtgtttctctacttgtgctccacagtggtggttctatgtccatagaagccgctaaaaaggcaatgcagaagtccatagacgtgtctaggagagacttgctaagattggttctcaggaaagaaagtgctgttcctaggccatgcaaggagctcttctggaagatgtgtaagatacttcacctgttttactctcagaatgatggatttagctccccaaaggaaatggtcagtgcagtgaatgctgttatcaacgagccactcaaagtccaaaacagtactacgtttttgtctagttcatcaaggtagcgaggatatcatgtaatttatcctgttcatatggatcagaagcaacagcagcaagcttaagatatttgtaagtttgtgactgggctgctgtggatctgtgaagctacaactttgctgtatgtggatcaaggtattaggaagatctggttcacatattgataacataatggataaaccataacgttaaat

SEQ ID NO: 24106 - DNA, 384 bp, Zea Mays
cggctatgatgtggagatgtccgatgaaggaaacaacaggtctaaaaccttcttgaagccacttggcatcattagcaagaagaaggtacagcttcatttgaagatcaagaaagacaagagaaaagctaggaagaaggggaagttttcttttaaaaagtagacgcgtaaagcttgtagtcttataaatcatgtagttctgtttccagtttgaacaacaaatctaaaggcagtcatgcgcacctaagtccattcatggctagcttactatgtcgaaatgagtatggaaaagatggcgctgacctatcagttgtgttcatcttcacatggtatcgttgtgaactatttccttcacgccattttatgactgtatattcttgccttgca

SEQ ID NO: 24107 - DNA, 3460 bp, Zea Mays
cgagcaaccaccagcccggcccgtcttgctccatgcataaggtctccgcccgccatgccgcaccgccgccgagcccttaacccgacgctgcccccgccacctcccgccgccaccgcgttccacctcggcggggacgaggcgcggctgccgctcctcgcggactacgcgctgctccaccagcccgccgcctccgccgtcgacgcgccggcgtcgtccgagtggagcgccgggagcgccttcaccgccacctccgacgcggccaccaccaccgcctcctccaccgccacggcgccgccgggctcctcccagtcccagctgctggccgccggcggtagggacagcgacacgtgggtccgccgcgccagggagggctactacctccagctgtccctcgccatccgcctcacctcgcaggccttcctcgccggcgctcctcccgcgcccgacctcctcttcggctgcagccccgtcgtcgtcgccgaccaccacgccgctgctggcgacggcgcggatgattcggaggccatctcctaccggctctgggtgaacgggtgcctgtcgtggggcgacaagatcgcgcacgggttctacaacatcctgggcatcgacccgcacctgtgggccatgtgcaacgtcgcggaggagggccgccggctgccgtcgctggcggcgctgcgggcggtgggcgccagcgagtcctcgctggaggtggtgctcgtcgacaagggcgccgactcggtgctcctcgacctcgagcgccgcgcgctcgacctcgtccgcagcctcgccgtcctcgtctccgaccacatggggtgagcacaccgcccgcgcgcgcgcgcgctgcctgcctgcctgcatctgcgtgcatgggcgtgtcgcccgtgttccttccttcctttttgcttcgctgcagaaaagctaaatcagcaccaccggcttacatgccaggctcgtgcgcatgcactggtctatgtgctagaccaatcgctaggctgctggtaggccgaagctgcaagatgttccgtgaatccggtggtcatggtcaccgacgaacacgtgaacccaatatagttcgactgtttgagtccaccaccttcatgtgacgttgtctcttttgtgtgtgtgctttcccttttccttctgaagaggtgcgttgcgatcggaggatggggacctgtacctgcggtggaaggcggtgagcaagaagctgaagaagaggcagaagtgcgtcgtcgtccccattggcggcctgtccataggcttctgccggcaccgtgccattcttttcaaggtacttgcagacttcatcggcctgccatgccggattgcgcaaggttgcaagtactgctctgcgcctcaccgatcatcttgccttgtcaaagttgacagtgagagaagatacgtaagggaatacgtcgtggaccttgtagttgagccggggagcatcagctgcccggactcatccatcaacggccagctgctgtccaccgtgccttcacctttcaagacttcgtccgcagtcggctcagggaactacacaacaccagtcgcagcctggaaccaatcaacagccggtgaacgtcgcaacatggtatcatcgaatccccagtgctcaggtacgctacctactgagtatcgtgcagtaactcaaccgtaccgctggcctccgatactgtgctacatgtagttgctaggtgccgcgttgtggagaacagctctgctcaggtagccagaagcaaagaagacttggtgccgaagtgtggacagatcacacagaatggaaactgtaatggcgtatcagtgttacaagtgtcgatgcagttgaaggcaatggacatcggtgctgagaacggcaacaaggagaacgtccctggtgctgatcttccgaaacccatgagcattgagccgccttttgccgtagattggctggagatatcatgggaggagctcgagctcaaggaacgcgtgggcgccggtactcctttgcctccaggatttctgctaatttactctgtgctctgcatttgatcacggttagttacaaatgcaggttctttcggcacggtttatcgcgcagactggcatggttcagatgttgcagtaaaggtgcttacagaccaggatgttggcgaagcccagctgaaggaattcctaagagagattgctattatgaaacgagtccgccatccgaatgtggtattgttcatgggtgcggtgacaaaatgcccacaattgtcgatagtgacagagtatttgcccagagggagcctcttccgactcatcaacaaggcagctaatggagagatgctggatctcaagcgtcgtttgcgcatggcactagatgttgcaaaaggcatcaactatctccactgcctgaatcctcctattgtgcattgggatctcaagacaccaaacatgctggtcgaccggaactggtccgtgaagatttaaggcaaacaccttcatatcatccaaatcagttgctggaacaccagaatggatggcgcctgagtttctgcgcggcgagccatcgaacgagaagtgcgatgtttacagcttcggcgtcatcttgtgggagctcctgacgatgcagcaaccatggagtggcctaggccctgcgcaggtagtaggagctgtagcgtttcagaacagaaggcttccgattccgaaagataccagtccagaacttgctgctctagtggaagcctgctgggatgacgatccaaggcagcggccttcgttttcgagcattgtggatacgctgaagaagttactgaaggctcttcttggaggttcatgaggactcttgctggatgtcttggctgccattgtgtcctccatttttctcttgttttctcattccttttctgtctttgtccatgctaaactacggaaaggaataaggctgtttgccttaggaatggagatgagatagccgaagcagcacaagtgcattgctgcctcgagtgggctaggtcacttatctttttatcctctcttgcctttgtacagcgattcctagtgctaatagaaattgctcgtttgcctcatgggagttggtgatctgaatatctgctatccctgaatgttctaattggtcctattattggttgtgcaataagactggatatatgtgctctggtctctaggagaaaggaaagacagttttgacgccaaattagaatagatcacgggatatagatagagtttctatacaggtctcgaacagaactcagttgagatctgagtggctagagtgagcaaaacaactacggggaactaatagttagggaaaactatcttcttcctgtccaacagttcaattgtgattttgtccttgttttctttttttactatgtagatttatcctcactattttaaaatgaatcctccatttaccctggtttcgatgtccgttaaatgagcatagataaatgacaaaggcaagagttggggggcc

SEQ ID NO: 24108 - DNA, 596 bp, Zea Mays
attgatccctgaaacccatccacaattggtagctcgttgatccaaatccaagacctcacgtcaacgcactgtctcgcctgttaattagtcgtcgacgtcgtcgtctatgtccaggccatcggggacatggcgaagcaggcggcgcggagcacctgggacgcggccaaggacaccgcgcacggcgtcaaggagcgcgtggtccccgacgcggaggacgtggacgccgccgtgaaggagcgggaccggatcgcgcgggatgtggacagggtagagcgggagcggaacatgagggaggccagggagaagggctcgggcttgccgtaggcccagctccaattttccctctccagaagacgaattttactcaactagctagctgaataaatgtttggcgatacatcgtgcgcgcgccagtttggttgtgttgaataattagacaaattccaaattaaattccgaatataaatcatgaccaaatcagaagaactgaaataaaagccaaatcagataatgcgtactgattagacttactgattgttggcgcgcgccaggatcagctgagtcgacgatgtcagaagatcacgactagtcgcgtg

SEQ ID NO: 24109 - DNA, 1209 bp, Zea Mays
attgatccctgaaacccatccacaattggtagctcgttgatccaaatccaagacctcacgtcaacgcactgtctcgcctgttaattagtcgtcgacgtcgtcgtctatgtccaggctgatggctgccatgctgctcggaggcgcgcgcgtcgccggcgccgcaaagctcaccggtaacggcaacgctgctggcatgcaggctcttcccatgccggcgtgcttccttccgccgcgcccgcaggcagcgacctggacccgcctctgcttgcaggctgcgccaagatcgtcccaggcatacgacaacgcgccggaagaccggagagaaataggggacaagtacaaggacgcggcggaggaggcgaaggacgccaccggggacgccaaggagcacgccaagaggatggccggggagacgaagagcagggcgcaggacaaggccggccgcgtggcggaccaggcgtcgggcatggccgagcgggccaaggaccaggcgaagggcgtggcggaggacgccgcggacacggcgtcccgggcgacggagcgagcgaagaacgagacgcgtgacgcggcgcgggaggccgcggacagggcggggcacgtgaaggagcgggccaaggaggcgggacacgaggccaaggaccgggccgtggaggggaccgcgtcgtacggggagaaggtggtggagatgaccaaggagggcgcggggaaggtggccgagacggcgcaggccatcggggacatggcgaagcaggcggcgcggagcacctgggacgcggccaaggacaccgcgcacggcgtcaaggagcgcgtggtccccgacgcggaggacgtggacgccgccgtgaaggagcgggaccggatcgcgcgggatgtggacagggtagagcgggagcggaacatgagggaggccagggagaagggctcgggcttgccgtaggcccagctccaattttccctctccagaagacgaattttactcaactagctagctgaataaatgtttggcgatacatcgtgcgcgcgccagtttggttgtgttgaataattagacaaattccaaattaaattccgaatataaatcatgaccaaatcagaagaactgaaataaaagccaaatcagataatgcgtactgattagacttactgattgttggcgcgcgccaggatcagctgagtcgacgatgtcagaagatcacgactagtcgcgtg

SEQ ID NO: 24110 - DNA, 775 bp, Zea Mays
ctcctcatcagacaattgagatgtttctgaacacgatgtgacgcagatctgttcttaaaggctctgaaggctgctggtgaggtttggctgttatcaaacatggactcccaggaggacattgtatacccaaatgatccaaaagcaaagatcaaggttgatgatgacctgaagcaactcttccgtgaaatagagctgccacgtgacatggtcgacatagagaaggagctacagaaaaacggtttcaagcccatgacaaatactgccaaacgacgagcagctgcccagatcaatggcgtaaaacccaaggctaagcccaagaagaagcagcgtgagatcacaaaacggaccaagctcacgaatgcccatctgcctgagctgttccagaatcttaacacttaaacgtgctacagtatctgacgacggaagatggttcattttactcctatttattgctacgttgtgtgtatgtgttatgcagctatgctgtatggcttatggttatgagcgccacaaatttgtttgtcaagattctggatgatatacttatgcattctgacataataggaggcaaaacctcaagattttccttatttttattttatcaattacagcattttctgagtttgcggcattatgtttggttgattttgggtcaattaggttggtgtgaggacaagctgaacatattttgatggattgcttagcttgaaatgataccagaatttaaacctcataattacgagtactgcggatctgcaggtttagctgatgcgtg

SEQ ID NO: 24111 - DNA, 902 bp, Zea Mays
cttaactctgtccttctgtacctggctgcctttgtcttccctgctacttgcaactgcttcctgccataagtccaagcatgacctgaagggaaaagatcaactgcttgttttgattagaaagttcccagaaggtcttgctgttgtggaagtcaaggatgcatattcaaatgtattggaagatttgcaggctctgaaggctgctggtgaggtttggctgttatcaaacatggactcccaggaggacattgtatacccaaatgatccaaaagcaaagatcaaggttgatgatgacctgaagcaactcttccgtgaaatagagctgccacgtgacatggtcgacatagagaaggagctacagaaaaacggtttcaagcccatgacaaatactgccaaacgacgagcagctgcccagatcaatggcgtaaaacccaaggctaagcccaagaagaagcagcgtgagatcacaaaacggaccaagctcacgaatgcccatctgcctgagctgttccagaatcttaacacttaaacgtgctacagtatctgacgacggaagatggttcattttactcctatttattgctacgttgtgtgtatgtgttatgcagctatgctgtatggcttatggttatgagcgccacaaatttgtttgtcaagattctggatgatatacttatgcattctgacataataggaggcaaaacctcaagattttccttatttttattttatcaattacagcattttctgagtttgcggcattatgtttggttgattttgggtcaattaggttggtgtgaggacaagctgaacatattttgatggattgcttagcttgaaatgataccagaatttaaacctcataattacgagtactgcggatctgcaggtttagctgatgcgtg

SEQ ID NO: 24112 - DNA, 1402 bp, Zea Mays
atctcccgtagcagcatgttttagcagccgtccgattcatccaacggtagagagcagctgagtgcgtgctctaccttcaaagggcgaaggcagccgatctcaatcccgattccccatctcgccctgcccgccgaagagcgcgcaagcaccaccgtcccggcagcgcggagatcggtccactccatccacgcggcgtcaggcgagcggggcgcacggacgctgcgaccggagagatgccagtcatcactggcgagcatagctgcttcgacctcaaagccaaagcacagggcccaaccagcgcatgctcctaacgtcccagcaagaccatcacaacctattaagttttcaaatgatacagaaaggctgcagcacatcaattcgattaggaaatctcctgttggagcacagatcaagcttgtcattgaacttctttacaagacaagacaagcttttactgcagagcagataaatgaagcaacttatgttgatattcacggtaataaagctgtctttgacagcttgagaaacaaccccaaagtaagctatgatgggaggcgtttctcttacaagtccaagcatgacctgaagggaaaagatcaactgcttgttttgattagaaagttcccagaaggtcttgctgttgtggaagtcaaggatgcatattcaaatgtattggaagatttgcaggctctgaaggctgctggtgaggtttggctgttatcaaacatggactcccaggaggacattgtatacccaaatgatccaaaagcaaagatcaaggttgatgatgacctgaagcaactcttccgtgaaatagagctgccacgtgacatggtcgacatagagaaggagctacagaaaaacggtttcaagcccatgacaaatactgccaaacgacgagcagctgcccagatcaatggcgtaaaacccaaggctaagcccaagaagaagcagcgtgagatcacaaaacggaccaagctcacgaatgcccatctgcctgagctgttccagaatcttaacacttaaacgtgctacagtatctgacgacggaagatggttcattttactcctatttattgctacgttgtgtgtatgtgttatgcagctatgctgtatggcttatggttatgagcgccacaaatttgtttgtcaagattctggatgatatacttatgcattctgacataataggaggcaaaacctcaagattttccttatttttattttatcaattacagcattttctgagtttgcggcattatgtttggttgattttgggtcaattaggttggtgtgaggacaagctgaacatattttgatggattgcttagcttgaaatgataccagaatttaaacctcataattacgagtactgcggatctgcaggtttagctgatgcgtg

SEQ ID NO: 24113 - DNA, 1387 bp, Zea Mays
ggattgagatcgcctgccttcgccctttgaaggcagccgatctcaatcccgattccccatctcgccctgcccgccgaagagcgcgcaagcaccaccgtcccggcagcgcggagatcggtccactccatccacgcggcgtcaggcgagcggggcgcacggacgctgcgaccgatggatctcaaggatagcctctccaaatttaagcaacagcaggagagatgccagtcatcactggcgagcatagctgcttcgacctcaaagccaaagcacagggcccaaccagcgcatgctcctaacgtcccagcaagaccatcacaacctattaagttttcaaatgatacagaaaggctgcagcacatcaattcgattaggaaatctcctgttggagcacagatcaagcttgtcattgaacttctttacaagacaagacaagcttttactgcagagcagataaatgaagcaacttatgttgatattcacggtaataaagctgtctttgacagcttgagaaacaaccccaaagtaagctatgatgggaggcgtttctcttacaagtccaagcatgacctgaagggaaaagatcaactgcttgttttgattagaaagttcccagaaggtcttgctgttgtggaagtcaaggatgcatattcaaatgtattggaagatttgcaggctctgaaggctgctggtgaggtttggctgttatcaaacatggactcccaggaggacattgtatacccaaatgatccaaaagcaaagatcaaggttgatgatgacctgaagcaactcttccgtgaaatagagctgccacgtgacatggtcgacatagagaaggagctacagaaaaacggtttcaagcccatgacaaatactgccaaacgacgagcagctgcccagatcaatggcgtaaaacccaaggctaagcccaagaagaagcagcgtgagatcacaaaacggaccaagctcacgaatgcccatctgcctgagctgttccagaatcttaacacttaaacgtgctacagtatctgacgacggaagatggttcattttactcctatttattgctacgttgtgtgtatgtgttatgcagctatgctgtatggcttatggttatgagcgccacaaatttgtttgtcaagattctggatgatatacttatgcattctgacataataggaggcaaaacctcaagattttccttatttttattttatcaattacagcattttctgagtttgcggcattatgtttggttgattttgggtcaattaggttggtgtgaggacaagctgaacatattttgatggattgcttagcttgaaatgataccagaatttaaacctcataattacgagtactgcggatctgcaggtttagctgatgcgtg

SEQ ID NO: 24114 - DNA, 222 bp, Zea Mays
atgtcgccaagctggacgacgagggtggacccagcggcccatgaggtggaggcggcagatggggagtcggggctacggggcatgaggccgatgaggtggagcacggagaaagccgatccacgacgcgatgcttctaggagcaatggacaacaggccggtgggttcttttcctcaccccgttcgttcgccgtctggaaccatcgaggctattccaggatttga

SEQ ID NO: 24115 - DNA, 2260 bp, Zea Mays
gcgccgacgcgggcctcagcggaaggggcgaggaggcggagggggtgcaggaggcggagctcgtcgccaccacggtaaagatgtcgccaagctggacggcgagggtggacccggcggcccatgaggtggaggcggcagatggagagtcggggctacggggcatgaggccgacgaggtggagcacggagaaagccgatccacgacgcgatgcttctaggagcaatggacagcaggccggtgggttcttttcctcacccggttcgttcgccatctggaaccatcgaggctattccaggatttgaggagttttttctcggatactcatgtgtccttcttgaacctgttggtgaattatggaaaaaatagtgagttggtacatatattttcatttatggactgatttgtttttgaatctttttttcacaaatggaactttatgtaaagatacaagaagaactttaagcagaatcataagtgcaggttttgactcaccattatcataacaattgttttatagattattgttaagtcttaacaaagtagaacatgacatacatgatgcctgtgaagtttgttgtgtcctagaattagagcattagactggaaatagtatggtatgcacattggacatgaagcgtctgttcggcatacaatatagtgagattactaattagaaatagcagctaggcaaggcgtaatgccttaaatcaagtattctctttaggcccattgagaacgaaagtcactttcttcaaagtaaagcagtagaactctgtctaaacttgtgtttccttaattaaaaaaattgtatggtgaccagaatcactaaaaaatttgaaaatttatggtaaccaaacactcacctgagtttccttcaagcgatcacctgtacaaccacttttagcaagacgatcgctgcagcaaaatcaatcaagttaatgactctttggccaggttggtctgttttcttcaaccaaaaaaatgggagctatactttctcaggattagttatttggcatgcaaaatatttgtttaaaaagggattgtcgcgagtctgaaagagagcataaggaacactatattttggtagatcttggtatgataatagtgaatgttccattctacctcattagatttggatatctttaatgtaaatacaaaatggcctctagacggctgttcattcatatgagtcttacccacaggtccatttaaatgcagataacattatcatattcaatacagatatgcagttatagggatatatgttgaattagaaagccactatcaacagagcatttacacaatcaactttgtgtttgttgtatacatataataaatatttaagctttattaggatagtaggacctaggtcaccaacagaataggcttcacttttgagaacttgattatgcgggtattttgtacagaatttgacagctactcttcctaagtaaagcaatggtatgaccgtatgaggttgtgaaatgttaaagagaggttctataaatacttggcataatggtattcctcgtaggcagtctaattcaaggaacataaaaggcatatattgtgattacctccatgaccatcaaaaacatcgaagaacgttgtctcgctaccaagatctagcattgttgaatgatgtatggatgtatagattggtaaatattatgtcgtggaacaattttaagaaatagtctgaccgataaaaatggtaggcatctttaaaaaataaccatgcttgtagtgtgatgttgaacgtactaaaagcaatgtattaaacatattaaatgagatcaaaggatgaaaggaatatggatttagtatcaaaagagagctaatgcctgtagtctatgacaaatcattggttcactctttacagtgtgatattgaacttattaaaatcattgtgttaaacaaataaaatgagatgaaaggaatatggtttcagtattgttacaacttggtgcaaaaataataattgattttttggaagataattagtggttgttagattctttcacttattttaatgagggagattttttctgtcatttcttataaataaatacaaaaagatttattgggttgcatgtcatttcttttcctatacctatttttttgtatttatatgcgcaaagaacaattttagtatgtcattgatctggaaatacatggtaaccaaacactcacctaagttcacctgtggagccacttttagcaagacgcttactccctgctgctaaatcaatcaagg

SEQ ID NO: 24116 - DNA, 1967 bp, Zea Mays
cggatactcatgtgtccttcttgaacctgttggtgaattatggaaaaaatagtgagttggtacatatattttcatttatggactgatttgtatttgtatcttttttcacaaatggaactttatgtaaagatacaagaagaactttaagcagaatcataagtgcaggttttgactcaccattatcataacaattgttttatagattattgttaagtcttaacaaagtagaacatgacatacatgatgcctgtgaagtttgttgtgtcctagaattagagcattagactagaaatagtatggtatgcacattggacatgaagcgtctgttcggcatacaatatagtgagattactaattagaaatagcagctaggcaaggcgtaatgccttaaatcaagtattctctttaggcccattgagaacgaaagtcactttcttcaaagtaaagcagtagaactctgtctaaacttgtgtttccttaattaaaaaaattgtatggtgaccagaatcactaaaaattttgaaaatttatggtaaccaaacactcacctgagtttccttcaagcgatcacctgtacaaccacttttagcaagacgatcgctgcagcaaaatcaatcaagttaatgactctttggccaggttggtctgttttcttcaaccaaaaaaatgggagctatactttctcaggattagttatttggcatgcaaaatatttgtttaaaaagggattgtcgcgagtctgaaagagagcataaggaacactatattttggtagatcttggtatgataatagtgaatgttccattctacctcattagatttggatatctttaatgtaaatacaaaatggcctctagacggttgttcattcatatgagtcttacccacaggtccatttaaatgcagataacattatcatattcaatacagatatgcagttatagggatatatgttgaattagaaagccactatcaacagagcatttacacaatcaactttgtgtttgttgtatacatataataaatatttaagctttattaggacagtaggacctaggtcaccaactgaataggcttcacttttgagaacttgattatgcgggtattttgtacagaatttgacagctactcttcctaagtaaagcaatggtatgaccgtatgaggttgtgaaatgttaaagagaggttctataaatacttggcataatggtattcctcgtaggcagtctaattcaaggaacataaaaggcatatattgtgattacctccatgaccatcaaaaacatcgaagaacgttgtctcgctaccaagatctagcattgttgaatgatgtatggatgtatagattggtaaatattatgtcgtggaacaattttaagaaatagtctgaccgataaaaatggtaggcatctttaaaaaataaccatgcttgtagtgtgatgttgaacgtactaaaatcaatgtattaaacatattaaatgagatcaaaggatgaaaggaatatggatttagtatcaaaagagagctaatgcctgtagtctatgacaaatcattggttcactctttacagtgtgatattgaacttattaaaatcattgtgttaaacagatagaatgagatgaaaggaatatggtttcagtattgttacaacttggtgcaaaaataataattgattttttggaagataattagtggttgttagattctttcacttattttaatgagggagattttttctgtcatttcttataaataaatacaaaaagatttattgggttgcatgtcatttcttttcctatacctattttttttgtatttatatgtgcaaagaacaaatttagtatgtcattgatctggaaatacatggtaaccaaacactcacctaagttcacctgtggagccacttttagcaagacgcttactccctgctgctaaatcaatcaaggactacttggatatgttgtcat

SEQ ID NO: 24117 - DNA, 2838 bp, Zea Mays
cctgcatcggctgggctctcgccaccgcagcaccgccccgccgctcgccgaccacgcctcccgccgccgcagagctccagctctcactcactgctctcgcaggcgtcctcttccttccgcttccgcttctgctggagacggtatccgtctggacctggaggactggactgggctctcctttcgctggtcatatggtgccatcggaaccacagactgtagttgagaacaagcattccacaagtgtgggtgccgaagagcttcttttgacaaaagatgaaagcacatctaccactgtcgtccaaggtgcaggctccttaatgtcaccaaaaggtgttcaagaggaagctagctttatgggatactcgaaccatttggatcaatgggagggatacccatatgctgtgagtgcagagggacttgatgctgcataccctgtgacgtatggagcttattcccctttgtcagccattggagatagccatacatatttctctttgctctgccccttgtcaaggccttgctaccagccacctgcttctccaaacatgagatattcaagtcctggtactggaatatctcaattttatcctatgcaccagtattacagtcctgacgaagttcattactcagtgactcctagcttctatcagccttttggttcttttaacggagttccaatgcaaccgagtagttttcctggattttttgggcaaggaaacatacccctgacttctagaatggagtccatgtctaattctggatcacacaaggcattccagcaaggtggtaaatttggaggcagtacacaaagttggagcactgctagttgcaaattcggtaccttcaaggatgagaagtgctctcctgactttctgaatgagcaatgccgtggcccaagggccaccaaaacaaggaaagaagtggggagctcttcaaccgaagacaaaaataagaatgtcttgccaatagctgattctgataaatacaaccaccctggttttgtgactgagtacaaggatgccagattttatgtaataaaatcctacactgaagatcacattcacaagagcataaagtataatgtttgggccagcactcccagagggaacagaaagttaaatgctggttatcatgaggcaaaagcgaaggaagatcattgtcctattttcttgtttttctcggttaatagcagcggtcatttctgcggtgtggctgagatgattggacctgtcaattttgacaagagtgttgattactggcagaatgaaagatggaatggccaattccctgtcaaatggcacattgttaaggatgtcccaaacaacattgtccggcacatcatcctagagaacaatgagaacaagcgagttacaaatagcagggacacgcaggaggtgaaactgaagcagggtctccagatgttagccatcttcaagaaccatgaagcccagacaaacatccttgaggacttcgacttctatgagcaacgagagaaagctatgctagatgacaggcaacaacagaagccagagtgttccgatactggcaagcaggtgcaggccagtgcaccggtggatattgtgactggtatgtcggacgcatttgcacaggcagttcaattggaaaaaaccaatgacaaagaaaataaaccaaggattgaagatgctgatgctgctgataatgctcccgctgctcctgtgaagatcgaagaggacatgctgaaaacagcggaagtgggaggcctcttgaaggaaagcgggtgattgctcgttctccattcatgactaatccagagcagcagctgggcccatttctgaagccatttcagggatgagagaataagagttatgcaaatatttgcagccacaggttcaaagcagcctctccgcatttgttgctcagacctcttatgtggagtctgacactgggcccttttgtacagcatggtaggctagagacataggctttgttttaccttcagttagctttgttttttaccttcagttaaacagactacagctagttacagagattcctaaattgtcaccgttttcctccgctcactgctttgttaactttttttccactgaccccctgaagaattgtgctcaatgtagccaattagccaggaaaaaaaagaaaaatactattttctattagtcccgaccaaattctacatgttagcttggactgacgctatcagaactattgccattggaacaattcattgtcaggaaattatacatgctatatgctcaagcaacgaagtatttgtgcatattccagtaggagggttataacatgaacagaccacctccagtaggaggcacattccagtagcaggatcacaagaacattacaagaataggaaccctgcatgatgtttcgacaggacatagactagccctaaaacatctcaagagtctgaaaacgcgaactaggtatatttctaagtgcaggaatatttcaaagacaacaaggcttacacctgagtatacacacatacagccataaactcaggtgtgctttctacttcagctgagcgaagtttggacacatgataaatacactcaattacgcttccatggagttcatttcaactctcttgtttgattcagtcggtagtcatcggttgggacatgcaacaccgaaatcgggccttgcggacagtgctcaggatctccatctcagcatgctccagcatcctcacaacttcagtgaatggcggacggacatcaggatttggatcccagcacctggtcatgatctcagcaagggtgggcaggcagtcctggggtatagctgggcggacacccttgttcaccacagcgaaagcag

SEQ ID NO: 24118 - DNA, 2919 bp, Zea Mays
cctgcatcggctgggctctcgccaccgcagcaccgccccgccgctcgccgaccacgcctcccgccgccgcagagctccagctctcactcactgctctcgcaggcgtcctcttccttccgcttccgcttctgctggagacggtatccgtctggacctggaggactggactgggctctcctttcgctggtcatatggtgccatcggaaccacagactgtagttgagaacaagcattccacaagtgtgggtgccgaagagcttcttttgacaaaagatgaaagcacatctaccactgtcgtccaaggtgcaggctccttaatgtcaccaaaaggtgttcaagaggaagctagctttatgggtaagggtaaaggtggagaacaacagttgggctaccagcccaatgtgtatgtttctcagccacacacacccttttctggaggatactcgaaccatttggatcaatgggagggatacccatatgctgtgagtgcagagggacttgatgctgcataccctgtgacgtatggagcttattcccctttgtcagccattggagatagccatacatatttctctttgctctgccccttgtcaaggccttgctaccagccacctgcttctccaaacatgagatattcaagtcctggtactggaatatctcaattttatcctatgcaccagtattacagtcctgacgaagttcattactcagtgactcctagcttctatcagccttttggttcttttaacggagttccaatgcaaccgagtagttttcctggattttttgggcaaggaaacatacccctgacttctagaatggagtccatgtctaattctggatcacacaaggcattccagcaaggtggtaaatttggaggcagtacacaaagttggagcactgctagttgcaaattcggtaccttcaaggatgagaagtgctctcctgactttctgaatgagcaatgccgtggcccaagggccaccaaaacaaggaaagaagtggggagctcttcaaccgaagacaaaaataagaatgtcttgccaatagctgattctgataaatacaaccaccctggttttgtgactgagtacaaggatgccagattttatgtaataaaatcctacactgaagatcacattcacaagagcataaagtataatgtttgggccagcactcccagagggaacagaaagttaaatgctggttatcatgaggcaaaagcgaaggaagatcattgtcctattttcttgtttttctcggttaatagcagcggtcatttctgcggtgtggctgagatgattggacctgtcaattttgacaagagtgttgattactggcagaatgaaagatggaatggccaattccctgtcaaatggcacattgttaaggatgtcccaaacaacattgtccggcacatcatcctagagaacaatgagaacaagcgagttacaaatagcagggacacgcaggaggtgaaactgaagcagggtctccagatgttagccatcttcaagaaccatgaagcccagacaaacatccttgaggacttcgacttctatgagcaacgagagaaagctatgctagatgacaggcaacaacagaagccagagtgttccgatactggcaagcaggtgcaggccagtgcaccggtggatattgtgactggtatgtcggacgcatttgcacaggcagttcaattggaaaaaaccaatgacaaagaaaataaaccaaggattgaagatgctgatgctgctgataatgctcccgctgctcctgtgaagatcgaagaggacatgctgaaaacagcggaagtgggaggcctcttgaaggaaagcgggtgattgctcgttctccattcatgactaatccagagcagcagctgggcccatttctgaagccatttcagggatgagagaataagagttatgcaaatatttgcagccacaggttcaaagcagcctctccgcatttgttgctcagacctcttatgtggagtctgacactgggcccttttgtacagcatggtaggctagagacataggctttgttttaccttcagttagctttgttttttaccttcagttaaacagactacagctagttacagagattcctaaattgtcaccgttttcctccgctcactgctttgttaactttttttccactgaccccctgaagaattgtgctcaatgtagccaattagccaggaaaaaaaagaaaaatactattttctattagtcccgaccaaattctacatgttagcttggactgacgctatcagaactattgccattggaacaattcattgtcaggaaattatacatgctatatgctcaagcaacgaagtatttgtgcatattccagtaggagggttataacatgaacagaccacctccagtaggaggcacattccagtagcaggatcacaagaacattacaagaataggaaccctgcatgatgtttcgacaggacatagactagccctaaaacatctcaagagtctgaaaacgcgaactaggtatatttctaagtgcaggaatatttcaaagacaacaaggcttacacctgagtatacacacatacagccataaactcaggtgtgctttctacttcagctgagcgaagtttggacacatgataaatacactcaattacgcttccatggagttcatttcaactctcttgtttgattcagtcggtagtcatcggttgggacatgcaacaccgaaatcgggccttgcggacagtgctcaggatctccatctcagcatgctccagcatcctcacaacttcagtgaatggcggacggacatcaggatttggatcccagcacctggtcatgatctcagcaagggtgggcaggcagtcctggggtatagctgggcggacacccttgttcaccacagcgaaagcag

SEQ ID NO: 24119 - DNA, 2892 bp, Zea Mays
cctgcatcggctgggctctcgccaccgcagcaccgccccgccgctcgccgaccacgcctcccgccgccgcagagctccagctctcactcactgctctcgcaggcgtcctcttccttccgcttccgcttctgctggagacggtatccgtctggacctggaggactggactgggctctcctttcgctggtcatatggtgccatcggaaccacagactgtagttgagaacaagcattccacaagtgtgggtgccgaagagcttcttttgacaaaagatgaaagcacatctaccactgtcgtccaaggtgcaggctccttaatgtcaccaaaaggtgttcaagaggaagctagctttatgggtaagggtaaaggtggagaacaacagttgggctaccagcccaatgtgtatgtttctcagccacacacacccttttctggaggatactcgaaccatttggatcaatgggagggatacccatatgctgtgacgtatggagcttattcccctttgtcagccattggagatagccatacatatttctctttgctctgccccttgtcaaggccttgctaccagccacctgcttctccaaacatgagatattcaagtcctggtactggaatatctcaattttatcctatgcaccagtattacagtcctgacgaagttcattactcagtgactcctagcttctatcagccttttggttcttttaacggagttccaatgcaaccgagtagttttcctggattttttgggcaaggaaacatacccctgacttctagaatgcatcaggagtccatgtctaattctggatcacacaaggcattccagcaaggtggtaaatttggaggcagtacacaaagttggagcactgctagttgcaaattcggtaccttcaaggatgagaagtgctctcctgactttctgaatgagcaatgccgtggcccaagggccaccaaaacaaggaaagaagtggggagctcttcaaccgaagacaaaaataagaatgtcttgccaatagctgattctgataaatacaaccaccctggttttgtgactgagtacaaggatgccagattttatgtaataaaatcctacactgaagatcacattcacaagagcataaagtataatgtttgggccagcactcccagagggaacagaaagttaaatgctggttatcatgaggcaaaagcgaaggaagatcattgtcctattttcttgtttttctcggttaatagcagcggtcatttctgcggtgtggctgagatgattggacctgtcaattttgacaagagtgttgattactggcagaatgaaagatggaatggccaattccctgtcaaatggcacattgttaaggatgtcccaaacaacattgtccggcacatcatcctagagaacaatgagaacaagcgagttacaaatagcagggacacgcaggaggtgaaactgaagcagggtctccagatgttagccatcttcaagaaccatgaagcccagacaaacatccttgaggacttcgacttctatgagcaacgagagaaagctatgctagatgacaggcaacaacagaagccagagtgttccgatactggcaagcaggtgcaggccagtgcaccggtggatattgtgactggtatgtcggacgcatttgcacaggcagttcaattggaaaaaaccaatgacaaagaaaataaaccaaggattgaagatgctgatgctgctgataatgctcccgctgctcctgtgaagatcgaagaggacatgctgaaaacagcggaagtgggaggcctcttgaaggaaagcgggtgattgctcgttctccattcatgactaatccagagcagcagctgggcccatttctgaagccatttcagggatgagagaataagagttatgcaaatatttgcagccacaggttcaaagcagcctctccgcatttgttgctcagacctcttatgtggagtctgacactgggcccttttgtacagcatggtaggctagagacataggctttgttttaccttcagttagctttgttttttaccttcagttaaacagactacagctagttacagagattcctaaattgtcaccgttttcctccgctcactgctttgttaactttttttccactgaccccctgaagaattgtgctcaatgtagccaattagccaggaaaaaaaagaaaaatactattttctattagtcccgaccaaattctacatgttagcttggactgacgctatcagaactattgccattggaacaattcattgtcaggaaattatacatgctatatgctcaagcaacgaagtatttgtgcatattccagtaggagggttataacatgaacagaccacctccagtaggaggcacattccagtagcaggatcacaagaacattacaagaataggaaccctgcatgatgtttcgacaggacatagactagccctaaaacatctcaagagtctgaaaacgcgaactaggtatatttctaagtgcaggaatatttcaaagacaacaaggcttacacctgagtatacacacatacagccataaactcaggtgtgctttctacttcagctgagcgaagtttggacacatgataaatacactcaattacgcttccatggagttcatttcaactctcttgtttgattcagtcggtagtcatcggttgggacatgcaacaccgaaatcgggccttgcggacagtgctcaggatctccatctcagcatgctccagcatcctcacaacttcagtgaatggcggacggacatcaggatttggatcccagcacctggtcatgatctcagcaagggtgggcaggcagtcctggggtatagctgggcggacacccttgttcaccacagcgaaagcag

SEQ ID NO: 24120 - DNA, 2910 bp, Zea Mays
cctgcatcggctgggctctcgccaccgcagcaccgccccgccgctcgccgaccacgcctcccgccgccgcagagctccagctctcactcactgctctcgcaggcgtcctcttccttccgcttccgcttctgctggagacggtatccgtctggacctggaggactggactgggctctcctttcgctggtcatatggtgccatcggaaccacagactgtagttgagaacaagcattccacaagtcttcttttgacaaaagatgaaagcacatctaccactgtcgtccaaggtgcaggctccttaatgtcaccaaaaggtgttcaagaggaagctagctttatgggtaagggtaaaggtggagaacaacagttgggctaccagcccaatgtgtatgtttctcagccacacacacccttttctggaggatactcgaaccatttggatcaatgggagggatacccatatgctgtgagtgcagagggacttgatgctgcataccctgtgacgtatggagcttattcccctttgtcagccattggagatagccatacatatttctctttgctctgccccttgtcaaggccttgctaccagccacctgcttctccaaacatgagatattcaagtcctggtactggaatatctcaattttatcctatgcaccagtattacagtcctgacgaagttcattactcagtgactcctagcttctatcagccttttggttcttttaacggagttccaatgcaaccgagtagttttcctggattttttgggcaaggaaacatacccctgacttctagaatgcatcaggagtccatgtctaattctggatcacacaaggcattccagcaaggtggtaaatttggaggcagtacacaaagttggagcactgctagttgcaaattcggtaccttcaaggatgagaagtgctctcctgactttctgaatgagcaatgccgtggcccaagggccaccaaaacaaggaaagaagtggggagctcttcaaccgaagacaaaaataagaatgtcttgccaatagctgattctgataaatacaaccaccctggttttgtgactgagtacaaggatgccagattttatgtaataaaatcctacactgaagatcacattcacaagagcataaagtataatgtttgggccagcactcccagagggaacagaaagttaaatgctggttatcatgaggcaaaagcgaaggaagatcattgtcctattttcttgtttttctcggttaatagcagcggtcatttctgcggtgtggctgagatgattggacctgtcaattttgacaagagtgttgattactggcagaatgaaagatggaatggccaattccctgtcaaatggcacattgttaaggatgtcccaaacaacattgtccggcacatcatcctagagaacaatgagaacaagcgagttacaaatagcagggacacgcaggaggtgaaactgaagcagggtctccagatgttagccatcttcaagaaccatgaagcccagacaaacatccttgaggacttcgacttctatgagcaacgagagaaagctatgctagatgacaggcaacaacagaagccagagtgttccgatactggcaagcaggtgcaggccagtgcaccggtggatattgtgactggtatgtcggacgcatttgcacaggcagttcaattggaaaaaaccaatgacaaagaaaataaaccaaggattgaagatgctgatgctgctgataatgctcccgctgctcctgtgaagatcgaagaggacatgctgaaaacagcggaagtgggaggcctcttgaaggaaagcgggtgattgctcgttctccattcatgactaatccagagcagcagctgggcccatttctgaagccatttcagggatgagagaataagagttatgcaaatatttgcagccacaggttcaaagcagcctctccgcatttgttgctcagacctcttatgtggagtctgacactgggcccttttgtacagcatggtaggctagagacataggctttgttttaccttcagttagctttgttttttaccttcagttaaacagactacagctagttacagagattcctaaattgtcaccgttttcctccgctcactgctttgttaactttttttccactgaccccctgaagaattgtgctcaatgtagccaattagccaggaaaaaaaagaaaaatactattttctattagtcccgaccaaattctacatgttagcttggactgacgctatcagaactattgccattggaacaattcattgtcaggaaattatacatgctatatgctcaagcaacgaagtatttgtgcatattccagtaggagggttataacatgaacagaccacctccagtaggaggcacattccagtagcaggatcacaagaacattacaagaataggaaccctgcatgatgtttcgacaggacatagactagccctaaaacatctcaagagtctgaaaacgcgaactaggtatatttctaagtgcaggaatatttcaaagacaacaaggcttacacctgagtatacacacatacagccataaactcaggtgtgctttctacttcagctgagcgaagtttggacacatgataaatacactcaattacgcttccatggagttcatttcaactctcttgtttgattcagtcggtagtcatcggttgggacatgcaacaccgaaatcgggccttgcggacagtgctcaggatctccatctcagcatgctccagcatcctcacaacttcagtgaatggcggacggacatcaggatttggatcccagcacctggtcatgatctcagcaagggtgggcaggcagtcctggggtatagctgggcggacacccttgttcaccacagcgaaagcag

SEQ ID NO: 24121 - DNA, 2859 bp, Zea Mays
cctgcatcggctgggctctcgccaccgcagcaccgccccgccgctcgccgaccacgcctcccgccgccgcagagctccagctctcactcactgctctcgcaggcgtcctcttccttccgcttccgcttctgctggagacggtatccgtctggacctggaggactggactgggctctcctttcgctggtcatatggtgccatcggaaccacagactgtagttgagaacaagcattccacaagtgtgggtgccgaagagcttcttttgacaaaagatgaaagcacatctaccactgtcgtccaaggtgcaggctccttaatgtcaccaaaaggtgttcaagaggaagctagctttatgggtaagggtaaaggtggagaacaacagttgggctaccagcccaatgtgtatgtttctcagccacacacacccttttctggaggatactcgaaccatttggatcaatgggagggatacccatatgctgtgagtgcagagggacttgatgctgcataccctgtgacgtatggagcttattcccctttgtcagccattggagatagccatacatatttctctttgctctgccccttgtcaaggccttgctaccagccacctgcttctccaaacatgagatattcaagtcctgtgactcctagcttctatcagccttttggttcttttaacggagttccaatgcaaccgagtagttttcctggattttttgggcaaggaaacatacccctgacttctagaatgcatcaggagtccatgtctaattctggatcacacaaggcattccagcaaggtggtaaatttggaggcagtacacaaagttggagcactgctagttgcaaattcggtaccttcaaggatgagaagtgctctcctgactttctgaatgagcaatgccgtggcccaagggccaccaaaacaaggaaagaagtggggagctcttcaaccgaagacaaaaataagaatgtcttgccaatagctgattctgataaatacaaccaccctggttttgtgactgagtacaaggatgccagattttatgtaataaaatcctacactgaagatcacattcacaagagcataaagtataatgtttgggccagcactcccagagggaacagaaagttaaatgctggttatcatgaggcaaaagcgaaggaagatcattgtcctattttcttgtttttctcggttaatagcagcggtcatttctgcggtgtggctgagatgattggacctgtcaattttgacaagagtgttgattactggcagaatgaaagatggaatggccaattccctgtcaaatggcacattgttaaggatgtcccaaacaacattgtccggcacatcatcctagagaacaatgagaacaagcgagttacaaatagcagggacacgcaggaggtgaaactgaagcagggtctccagatgttagccatcttcaagaaccatgaagcccagacaaacatccttgaggacttcgacttctatgagcaacgagagaaagctatgctagatgacaggcaacaacagaagccagagtgttccgatactggcaagcaggtgcaggccagtgcaccggtggatattgtgactggtatgtcggacgcatttgcacaggcagttcaattggaaaaaaccaatgacaaagaaaataaaccaaggattgaagatgctgatgctgctgataatgctcccgctgctcctgtgaagatcgaagaggacatgctgaaaacagcggaagtgggaggcctcttgaaggaaagcgggtgattgctcgttctccattcatgactaatccagagcagcagctgggcccatttctgaagccatttcagggatgagagaataagagttatgcaaatatttgcagccacaggttcaaagcagcctctccgcatttgttgctcagacctcttatgtggagtctgacactgggcccttttgtacagcatggtaggctagagacataggctttgttttaccttcagttagctttgttttttaccttcagttaaacagactacagctagttacagagattcctaaattgtcaccgttttcctccgctcactgctttgttaactttttttccactgaccccctgaagaattgtgctcaatgtagccaattagccaggaaaaaaaagaaaaatactattttctattagtcccgaccaaattctacatgttagcttggactgacgctatcagaactattgccattggaacaattcattgtcaggaaattatacatgctatatgctcaagcaacgaagtatttgtgcatattccagtaggagggttataacatgaacagaccacctccagtaggaggcacattccagtagcaggatcacaagaacattacaagaataggaaccctgcatgatgtttcgacaggacatagactagccctaaaacatctcaagagtctgaaaacgcgaactaggtatatttctaagtgcaggaatatttcaaagacaacaaggcttacacctgagtatacacacatacagccataaactcaggtgtgctttctacttcagctgagcgaagtttggacacatgataaatacactcaattacgcttccatggagttcatttcaactctcttgtttgattcagtcggtagtcatcggttgggacatgcaacaccgaaatcgggccttgcggacagtgctcaggatctccatctcagcatgctccagcatcctcacaacttcagtgaatggcggacggacatcaggatttggatcccagcacctggtcatgatctcagcaagggtgggcaggcagtcctggggtatagctgggcggacacccttgttcaccacagcgaaagcag

SEQ ID NO: 24122 - DNA, 2820 bp, Zea Mays
cctgcatcggctgggctctcgccaccgcagcaccgccccgccgctcgccgaccacgcctcccgccgccgcagagctccagctctcactcactgctctcgcaggcgtcctcttccttccgcttccgcttctgctggagacggtatccgtctggacctggaggactggactgggctctcctttcgctggtcatatggtgccatcggaaccacagactgtagttgagaacaagcattccacaagtgtgggtgccgaagagcttcttttgacaaaagatgaaagcacatctaccactgtcgtccaaggtgcaggctccttaatgtcaccaaaaggtgttcaagaggaagctagctttatgggtaagggtaaaggtggagaacaacagttgggctaccagcccaatgtgtatgtttctcagccacacacacccttttctggaggatactcgaaccatttggatcaatgggagggatacccatatgctgtgacgtatggagcttattcccctttgtcagccattggagatagccatacatatttctctttgctctgccccttgtcaaggccttgctaccagccacctgcttctccaaacatgagatattcaagtcctgtgactcctagcttctatcagccttttggttcttttaacggagttccaatgcaaccgagtagttttcctggattttttgggcaaggaaacatacccctgacttctagaatggagtccatgtctaattctggatcacacaaggcattccagcaaggtggtaaatttggaggcagtacacaaagttggagcactgctagttgcaaattcggtaccttcaaggatgagaagtgctctcctgactttctgaatgagcaatgccgtggcccaagggccaccaaaacaaggaaagaagtggggagctcttcaaccgaagacaaaaataagaatgtcttgccaatagctgattctgataaatacaaccaccctggttttgtgactgagtacaaggatgccagattttatgtaataaaatcctacactgaagatcacattcacaagagcataaagtataatgtttgggccagcactcccagagggaacagaaagttaaatgctggttatcatgaggcaaaagcgaaggaagatcattgtcctattttcttgtttttctcggttaatagcagcggtcatttctgcggtgtggctgagatgattggacctgtcaattttgacaagagtgttgattactggcagaatgaaagatggaatggccaattccctgtcaaatggcacattgttaaggatgtcccaaacaacattgtccggcacatcatcctagagaacaatgagaacaagcgagttacaaatagcagggacacgcaggaggtgaaactgaagcagggtctccagatgttagccatcttcaagaaccatgaagcccagacaaacatccttgaggacttcgacttctatgagcaacgagagaaagctatgctagatgacaggcaacaacagaagccagagtgttccgatactggcaagcaggtgcaggccagtgcaccggtggatattgtgactggtatgtcggacgcatttgcacaggcagttcaattggaaaaaaccaatgacaaagaaaataaaccaaggattgaagatgctgatgctgctgataatgctcccgctgctcctgtgaagatcgaagaggacatgctgaaaacagcggaagtgggaggcctcttgaaggaaagcgggtgattgctcgttctccattcatgactaatccagagcagcagctgggcccatttctgaagccatttcagggatgagagaataagagttatgcaaatatttgcagccacaggttcaaagcagcctctccgcatttgttgctcagacctcttatgtggagtctgacactgggcccttttgtacagcatggtaggctagagacataggctttgttttaccttcagttagctttgttttttaccttcagttaaacagactacagctagttacagagattcctaaattgtcaccgttttcctccgctcactgctttgttaactttttttccactgaccccctgaagaattgtgctcaatgtagccaattagccaggaaaaaaaagaaaaatactattttctattagtcccgaccaaattctacatgttagcttggactgacgctatcagaactattgccattggaacaattcattgtcaggaaattatacatgctatatgctcaagcaacgaagtatttgtgcatattccagtaggagggttataacatgaacagaccacctccagtaggaggcacattccagtagcaggatcacaagaacattacaagaataggaaccctgcatgatgtttcgacaggacatagactagccctaaaacatctcaagagtctgaaaacgcgaactaggtatatttctaagtgcaggaatatttcaaagacaacaaggcttacacctgagtatacacacatacagccataaactcaggtgtgctttctacttcagctgagcgaagtttggacacatgataaatacactcaattacgcttccatggagttcatttcaactctcttgtttgattcagtcggtagtcatcggttgggacatgcaacaccgaaatcgggccttgcggacagtgctcaggatctccatctcagcatgctccagcatcctcacaacttcagtgaatggcggacggacatcaggatttggatcccagcacctggtcatgatctcagcaagggtgggcaggcagtcctggggtatagctgggcggacacccttgttcaccacagcgaaagcag

SEQ ID NO: 24123 - DNA, 632 bp, Zea Mays
caacaacaacaaacaaaacataacaccataataacatatatgttatactgttatctaaaaaaagatagtgcaattgtgatatttaaaatatcaatattctataagtcttgtaaaggatggataattaaaatataactcttaagctttactgtgaagcttgtggtttaaaatattattgctgctactcgaggagaatttcagaggccctgacatcttgcctatccatcgactctttggctccagctacatggccagactccacttcgatcaagcagtggtggctcgtgatcgactcatccgcagtgccgaaaaaggggacccgctccctgctacttctggtgggctggaaaatctggatggaaagaaacatccgcactttccaaaggcgagagaggtcagtggtagacctgttagcaccaattaagacggaggcaaggctatgagatgttgcaggtgctaaacacatttttacgcttttacctcctgatgtaattatataacttatttatactctcgctgtggggcttcttggctcccgcttgattctcttctttattgatagaagcgagcacatcctcgtgccgttcgttataaagccatagttctttcaactaacaaaaaaagataaaaac

SEQ ID NO: 24124 - DNA, 792 bp, Zea Mays
gttcgttcgcatgtgacgggatacggagaaggattttgcgcctgagtagtggccgcttgcagaacgaagatcgacagctgaagaataagaagaacatgcatgtgtaaaaaaaagaaagaataagaacgaagatcgtgtgagattctgagacgaaggtttcagaacatgtctgttgtctctggtatggtatggccagtagtatgtctctgctaatggactacaactatacaagtattgattacgacgaccgcagtttccatggttgcctagctaataatacttgatactgtcattcatgtgacaaggtagctcttcttttctgcatcttcatgtcgtagggcagggacgcctcaaaacccttcagatatggatgatcgatatgtgccgtcatgaagaactgaagctacatggccagactccacttcgatcaagcagtggtggctcgtgatcgactcatccgcagtgccgaaaaaggggacccgctccctgctacttctggtgggctggaaaatctggatggaaagaaacatccgcactttccaaaggcgagagaggtcagtggtagacctgttagcaccaattaagacggaggcaaggctatgagatgttgcaggtgctaaacacatttttacgcttttacctcctgatgtaattatataacttatttatactctcgctgtggggcttcttggctcccgcttgattctcttctttattgatagaagcgagcacatcctcgtgccgttcgttataaagccatagttctttcaactaacaaaaaaagataaaaac

SEQ ID NO: 24125 - DNA, 1282 bp, Zea Mays
cgcctctcgaacctcctggaggccgtctgccggcgacttggagttggaggtggacgcctcgagcggtcgagcctcgctggaccagtcggtcgccgcggtgtcgtacccgtacgcgtggaagcgggagcatgcgcgatgcgggcgtgtgcgtggggaggagtcgacgacgggtaaccacggcgagcggcgaatgcaaagcccgcccagtctcgtcgttctcctccccttcgcctcccgccaggcacgtctgccagtgcgtggcggccgcggcgcgagtgttggaggtctcgaggggctggtggttcggagcacgtcgaatttgttcgcgtgggctactatagccgccgcatggggcacgaaagctagcgtcgagagctctggatggcgatgctcggcgaatcggccatccaatcaccaagcttcgaacggaccgccggcaaccggcggtgaggaggcgaacgtcgtaaagcttcttctccaggagcctcgaggaatcttgtcgtgcagcgcctgctgtacttcgatttggccttttcgtctgtatcgccatcaggcgaataggggatacaagtaagtggctcttttccatcaaacatcaaagattagcatgcgataatggtacaaaatagtgaggatatatattgtctgacagatgcatgtatgaaatttgacgtatgatgccagatggggcttgggcttgtattgtatgcaagccctgtatgtttgtaataatattcatatatctcaaatttctgatttttttggaagacccaaaattgcaggagaaatagaaatatgtcaacttgaggttagatgcatacttgcccttacgtttcctctggagtgggctgatgatatatgaatgcaggtcctagatctcttgacggtgcttgagggccatacacgagaggaagagaactaggtgtagccaaggacagacttgccgactaagttctaagccacagcacagcaagctgagacgcctccaggttccaggagccggcaagtcatccttggctgcatcccgttctctacctcatagcacatggcaacccagcagaagccaccctccctcctctcccttcccctacgactgtggtgtggtttctttgcttctctgtgtggagggagagtctgcaagtgttgtgcattgctgtgggttgtggtatggtgtgcatttataggcaccaacaagttggatttggaataatggaggtcactgcacattggattctttatatcacaaaagtttcaacctaaagctttccatttttgggatgcg

SEQ ID NO: 24126 - DNA, 10443 bp, Zea Mays
ctcgaacctcctggaggccgtctgccggcgacttggagttggaggtggacgcctcgagcggtcgagcctcgctggaccagtcggtcgccgcggtgtcgtacccgtacgcgtggaagcgggagcatgcgcgatgcgggcgtgtgcgtggggaggagtcgacgacgggtaaccacggcgagcggcgaatgcaaagcccgcccagtctcgtcgttctcctccccttcgcctcccgccaggcacgtctgccagtgcgtggcggccgcggcgcgagtgttggaggtctcgaggggctggtggttcggagcacgtcgaatttgttcgcgtgggctactatagccgccgcatggggcacgaaagctagcgtcgagagctctggatggcgatgctcggcgaatcggccatccaatcaccaagcttcgaacggaccgccggcaaccggcggtgaggaggcgaacgtcgtaaagcttcttctccaggtgtgctttgcattcgcccattcgccctactctcttctcgcgcacgggactgctggtgggattacactatcggagcgggcctgaaaattgatcttgcatttacagaccagcttaatttaatcggttgaggtggattgtgttttatggggtagctcatagctggagtcaatgtttggttcatttataggcccaattaggtgggctgaagctgcataatgtaggacccgtctcctccaggtatcgatgctattagcctattacacgaaccttgtgcatgcttcctcaaattgggtcttgtcggccaggaactaccgtgcgcttttgctgagcaacatccatgttagggcttgttcggtttcatctcaatccatgtggattggaggggattgagcgggttcaaatccatagtaagtcaaaatgtctactaaaattttccaatcccgtccaatccatgtgacgtaggaataaccgaacaaacccttattggttgctatggttcttatggaaaagtaggtaacttgcagattgagttttgggaccagttatagtaaggctcactgttgggatcttcttggctaattgtttgtttggatcttcttgtttttcagtgattaacaattagccaacaaatacttagttggcaaacaattagtcaggtatgtttggagtctaggcacatatgtctttttatttttttaatctattagcacatattagcaagttctaatgtctaataggcaaacaatttgtcagccttccggctaataattaaccaatttattattcatcccttggagtacaaggtgctaaaattagccgacagtgtcagatggatccaaacagggatcacaaaacttgtcactgagagaccacgttaggcctcgcatttggatcaacgactaaacttttatcatctgcaacggcaagaggggaaacaagctaatactccctccatttttatttgacgtttttagtttaattttgtactatttggcgtcaaatataaaaggatggaggcaatacctttttaacagttagcaacttattttagatcatccgaacagggctggtagtgaaagcggagtgcaactaataactcatgtattttaacttagcaacctatttgcacaccatatgcattttctattggatctgtgactgaatcttggaggagcaccagaacaaattgtagatgcatgatggtgttcatggaggagtaaggtcgattagggtttaggggtgtcacttcagtggtcgagttggaacactagtgtccattatacattaattgataaatcaataacataacatatataaactgctattcttatgtggctttaggcccccggcctgaggggggaatagagtgtgtttctatatttattttcctttttgttagaaactcaggacactctaaccagtaatagttcctatgaattattataatattgttaggaactcttttttttatcatgcatggaacataaattatgttagcctttcttagtattcaacttttgtttggcataagctactatacatatatattagaagaaagcttctacaatttttttgtgtaccacatccatatgttttgcatttattggactgtgtatctctatggattccttaatgcggtcatagaaattttcaattttagtgttattttttctcataaataatgcgaagcaaatcacataggtaccagtctaccaatttataatgtttttgtagacataaatgaccgattaacatctcaaggagccaattactgattaaggtaaaatacttttttcttgcgtgagttccaaggaaaccttggtactattgttctctgtcatctcaagtgaattgccatttgttattttgccatgggcatactttgatagccctgagccaaactgtgaaactattatgatgcccggcggctgcactgtacaaagggcaggaataagacagaaaataggaactcttgatctattttgtacttaatccaaagtagatgtttttttctcaaacacataggagagttagagtataagaatacaacacaacctaaaatatagactatgtttgcgctattagcagaataaaatgaccccaccataagaataactatatgagtgaggggacaacctcggattttgggatccatgcctccagggtggccgcccctcttgcccaaggttattaaaaacgttttaaaatgataaaacgttgaaacgcatatgggttaagttttgacttttaaacgacattgggaaaataccaatatattataattttaaacaataacatgaagttaaatactaaaacagaaagtctagtagcttaccaaaacagaggcatagaggatgagtggagtcgactgctgggtgctggccaccgcctgctagtaaacataggcgtggagagagagggcagcacgaagggagaggagaggcgtggatggcgcagacggctcacggtgcggagaaacgactgcacatgccgcggaaggagggtacactcggcacggagggaaagggagagggctcacaaggtgcaacaaacgacgacaacaacacctttaggcagtggcggcgatagagagcagagtagtgcgctactagccattgggcttggtaggggagtagagcaagcgtgtggagactgggttggattggacccaaaagtaactaacaaattggacccaaaagtagctaatggtctaaaacgcatgaaactacgttttacagtttagaacgccaaaacacagtttcaacctctaattagagttttgacaaacgtagttttaataacactgctctgccccctagattatgtgtggggacttcaatatgattaggtttgccagtgaaaagaaatagtagcaacttccgtttggcggaggccgaggcttttaacgatattattaggaggtaccttggcctccttgagttagctctcgttgttagaaaatatacctagtctaacatgagatctaccccaccctcgaacgccttgatagggcctttttaaaccttgcttgggactaggctctccctaacaccactctttcatctttcccttgtaccacttctgatcataccccccttaaggtctgcattttgatgactgctctcatgtctaaagtttttcgtttcaaaattttctggtgttgtcggccgggctacaaggatatggtggctagtgtctagcacctcaactaccccccgatgatgttgttgcctccctatgtgtgtgtctgaaacgggtcaggaaagcggccaaaagtttttttaagcgaaccaagcaaagcttgccgattatatttaaaaaggagaaaccagactgatcaacaaaacaaacaaaaccggacgatcggattaggacatcaacacacaccacaaaacattcgaattgctatggaccgacacgttggattgggacatcaacgcacgccacgccacaagcacagtccgagaaggtagctctgcacggagcaaacaaatgatacacgaagggctaaccaaccaacacgatgtaggagggcacacaaaactgctaaggtcatcattgccaaacaaggatgcagagcatcgagcagcttcgacttcccatggcagcctacaggctaaccaaactaaaacagacagccagccagaagcgaaagctctcaataggccatcgttgtcgacacataacagctacgacttccaatattgaccctcaaagcggccaagagttggagtaagaaaacaagttctattaagctaagagaaattgactgcaagcttgttctctaccttttggactatatggtggaaaatcgcccttatctctttccaagcttactctctgccttgagattattgttgtcctcaaccgtacggtaaaagaaaaaaaattacgttttggcgcctctgcccaaagtcagggcgactattgaagggaatgactgatgagaatacccgttattatttccatgctttcgcctctgcccgcctcaaagctaataaagtcgagatttttgaagaagatggtcgtgagtattataagcatgcttagaaagcctgaatccttcatgacttctacgccgatttattagggacgacccaacctccacctggaacttcgtcctgtctgatctctatccaacatacaatcccgatttatctagcctcgatggctagtttagtagggaagagcttgaggttgttatcatgcacatgaaaaaggattcgagcagggctggatggttttggtcctagtttttactccactacctgggatgttacttcggtggttattcaagatttcttctctaccttctatgattgcaaattgcaatgccgaccttgagaggatcaacacatcttatgttgttctcctgccaaaaaaagattcggccaggtctcctgcggactttcgctctatttgcctgtaaaattgccctatcaaagctattacaaaagttctttctcatagattatagccccttatccccagtctcgtactcttgttgggggcgttcagactagtttcgttcgaaatagaaacattggaaaaattatgcttatgccatggatcttttactctgttgtttcaagcggaaaattcataccattgttctaaaaattgactttcataaggctttcgactctgttagggcttgttcggttagttctcaatccacatggattgagagggattgggtgagtttaaatcccaagtaagtcaaactccttcttaattttttccaatctcattcaatccatgggtaatgggattaacagaacaaaggacaagcttacacttggtaattttaacttggtaatcagtcagttggggcttcaagaaattcctctcaaaggacaagcttacacttgatcaaatatgcaacgtcaccctctactcgaaaaattggattggtgctttgtttcacaggcatggtctgtcaacttcccggccacttttgcactttcgctccctagaggaacctcggatcacattctttggatggtcaatgtccaaattaatgttcccaaaccgccaatcttcagatttgaaaattattagcttcagcttgaagatttccactcaattttccaagattcttggagtcagcctctatttcaaccagacctagctaaaaggctcatggccaagtttaaaagggcatgcaaagcaatccaagtttggtgtaagtctctccctaatttagcaaaattgattggtaaggttaaattggtgattcagctattggacttcattgaggagagtagagacttaactatacaggaatggaacttcaaaggaattcttattctccatctgcatgaccttttatctaaatagcggacctattggaaacaaagaggtcaaattaaatgggtcaccttaggtgatgctggcactaagttctttcacgccaacgctactgtcaagcaccgacacgacctcatttcttcgctaaaggatgacaatggaaatacgactctttctcatacaggcaaaaatttgtacttttcaatgccttcaagaacagattggggacctctcaacaaacatccatggtttttaacttaccttccttgattcagccgattgacaatttgtcagaacttgagcaccccttctcttgtcatgagattgatcagatcattaaaagtctgccgtcaaataaatcgcccggtccagatggatttaatacggactttgtaaaaaagtgctggccggtgattgcccctgacttctatgaattatgcaataaattctttgaaggatctctctgcatgcgcagcattaatggttcatacgtgactctcatccccaaaaacagttctccagactcagttggtgactataggcctatctccctacttaacacaagtgttaaagtgttgacaaaaattttagccaatcgtttgcaacaggtgatcacaaagttagttcatcagaatcaatatggtttcatcaaggccaggtcgatccaggattgcttagcctgggcttttgaatatatttccctttgccacaagtccagaaaagaaatggtcattctaaagctagattttgaaaaggcttttgacaaattggaacatgcaactcttatagaggttttgagacacaaggtgttcggtgacaaatgaattcactgggtttctatgattcttgattccggcaccttagaagttcttttgaatggagttcctgggaaaagatttcactgcaaatgcggagtcagacaaggagatcctctgtccccacttctttttgttcttgcagctgatcttctgcagttaattgttaacaaggcttgtgaatgtggcattctacggctccccctaccgagcaattgtggtccagatttccctattatccaatatgcagatgatactattctcataatggaagcttgccctagacaacttttctttttaaaagcgatgctcaattcttttgctgaatccatagggctacatgttaactatcacaaatctaatatttatccaatcaatgtcacataccagaaaatggaaatccttgcaaatacatttcactgcaaaattggatcaatgccattcacttacttagggcttcccttgggatcacaaagacccaacatgggtgcttttcttcctcttatccagaaaattgaaaaaagactggcgtcaacctctatcttcttatcacaggctgacatgcttcaaatggttaatgcaatcttctcctcacttccaacatactacatgtgcactctcaagctccccaaaacggtgatcaaacatattgacaaactcagacgacattgcctttggagaggtgcagatttaaatgccaagaaaccccaagttgcctggaaatcggcctgcaagccaaaatttcagggggattgggtgtcataaatttggccttacaaaataaatccctgctcatgaaaaatcttcataaattctataacagagccgacatcccatggatcaatataatctgggccaatcattatagccattcactgccctcagataaaccagttggttctttctggtggagagacgtccttaaaactcttgaatcctttaaggccccgtttgtttcgttggaattgaattccattttaataattataatttagacaaaactaattaagttcatatatttatatatttaatatatttgtatattattctaaattatatgaaagagatagttatatactatatttatgttatagcaaaacaagtagaatagtgtgctataagttgtacatcggaaacatagcatgtaaatctatagaatcaatttctatctctcaccccatgaatttgagataggcttatatgataactttggaaagtggtggaatgtcacattctaaaaaattagcatattctattagtaagattccaattcctcaaaatgaaaggaaacaaacgggacctaagggaattgctcgggtggagatcggagatggaaaaacaacgcttctatggcatgacaactgggatggtatttgcaaatcggcacaatatccagaactttggtctttcgcctcatgcaaggacatcaccatccaacaagcaagattggcagcttcgcacgagatgtttcacaccccactgtcagcagatgcctttgttcaatttcaagctttgaatggtcgtttggttaatcttccgcataataatcagagagacaaatggctctgcaatgcttcttctagcctcttttcatcacaaaagatttattctcacttgatgggcaaccagtggactcatcccatcttcacttggctgtggaaatcaaaatgtcaacccaagcacaaggtcttcttctggcttttacttaaggacagattaaatacccgggcatttttaaggcagtgagctatgctactggactcatacacatgtgacaactgtattctacaagctgaagagacaatcacccatctttttttccgatgcaattttgctaggagatgctggtcctttataagaatctccccgtcatggtcaactgatttaatcaacatcattctgaggatcagaagacggtgccaagtaccacatggaaacttgaaactatcatactattaacctggtgcatctggaaaagcagaaacaattgggtgttcaatgagattccgcccacggtggagggatgtcgggacatgttcaaaacagaaatgaatttattgtgtcaccgagttaaaccagtgataggagataaaattaaaacctggattcagtgttctgtaatgtaattttcgttttctttcctgtatctgctctcctctgccctcctgtattgactttttctttttctctttatgcaataaaaatactgtaggtcctccctacagtaatttaagcttaaaaaaaacgggattaaccgtacaaggccttaactggatgagcctaattcagatccttaagcagagaggattcacccagaggtggttataagtgtctggtggcgtgggacaatgtctatattcctaggaatgccggcgacctaggcataaaaaatctgaagactcaaaaacctttgcctccttctcaagttcgctgacaaagccctccatggcccctatgtcccttggagagactggtgcttcgagggtaacgatccggacttggttcccacccctcctcccccacgtacttgggtcgtgtctacaattatgttattgatcacttcagagaccatactcatctatgtcagggatggtagatccacttcttttttgtttgatcggtggctttcaaacgactcgctctattgtaccttcctctccctcttttctcatactacccagcctgacctcgcagtgtctagagtttttgggcataatttcgatttgcacttatgcccagctggttaactaacactgctgcggccgagctagatttgctgcctgctctcctgtcacaggttctttggtcagcgtgatgctcgaaggatggtggcttcaaggaaacccttcttagtgaagcttattcctttcgcaggtctggaaactaaagttgtcgaataattttgatgtttctctagttgtttttcaaagactggttgaacatgcggatgagtttgtttaacaataatatcctccccgaccctacatgcccaatgtggcgcgacgactgaggatagattccacatcttcctggagtgtgcccgtgtcagaaacgtttggcgatctctctgcctccacattgctaggttggatgggtccctcctacttcgtacatgtttgccctctgatgttgtccccaccgacatccatacgcaagttctttgtgccatcttctggaggatttaggagaataggaataaccatgtgtttaggggagaagatcatcatgtgcatgtcattattgcgaggggtagttagtgatcttaacatttagctccatcgtttgtgtgcgtgaaggaacttgtcacacaacggtgtgcacacatgcatgtaacctcaaattaaaactgcttgtcctctcaatagcattctgcttgaatgtttccaatcaatcaataaaaggtgggcatcacccctcgttattctaaaaaataattcaataccctcctatctccatgcaacccgataaagacttgttgatatttttctaagatgttttttaactgaaaaaaaatgaaaagttgcaataggattggtgccactacctatattcaataccctcctctctggtattctttgagtcgttgttctgacgattctacctttactaattatttcaaagatttggtcgaatggtttccacaagttgtactataatttattaatggatgaggcaataactgggtcacaacaaaattgcaatgacgggctaaaaattaatcctttatatataatgtttacataccttaagcttgccatgttattatgcttcatttattgttagcaaatattttctcataacactgtcatagttcacatagatagttgaacactgcgactggg

SEQ ID NO: 24127 - DNA, 1559 bp, Zea Mays
aagaaaaacacacggacttcagcagttgcagtgccggctgcctccctctcgcgtgcgctcgccctgtgcctctcgcgtgcggaagctaggcaaaccgccggcgccctagctaggtgcccaggccatcgtcggtcccttcgccaagccatcgtcggggtctcggggattagcacccgcacccacaagatggccacaccgaacggtccttctgcttctccgatggtgtaccctgtctacctttctggggtatttccccagcaaggcggggatgatcaggctcaaggtccagggatatatgccatacaacagaaccagttagcagcggcgatgggaatgggttgctatgctccaaccacactcattcccctcacttacaatatcccaacagaaagcattggtgctcctgctggtgaagagaatgtacaggatgctaggcagcaaaatgtacctcaaagacaagttgttgtgaggaggtttcacttcgcttttcagcttgacttgaccctgatcttcctactagctgcagtggtgtttctcttagccaggaaggctcaaaacaaaggctatttcttctcatactgtttgcatcattcgatttactttgtaagtactttgctcaaatcgtctccaaaatacttaatgctatttcacagtttattcttcattacttgtatagcctatatatggtgctgctagataacctcatgcttctgtatcctgcagatatcaaaccggagctattataccttttgttagatggcttcagcgggcgggaggtgcagctgctcatccaccacaggctcctgctcgggccgagaaccgtgctgctctgcctgcccagaatgatggcaatgagcagcccaatgaccctgcaaaccctgaccaagctgcagagaaccgtgaacaagatgctgcagctggtaacgagaatccacaagaggcagaggtagaaggcaatcggcgtaattggctggaaggtgtcttgaaagagatccagctggttgttgtagggtttgttgcatcgcttcttcctggttttcagcacaatgactaggcctcatcttgtcactgtggaataagctatgtgcagtgatttggttatggtgacataggggaagtaattatatgaagctgctcaaagctttctgtttatattgtttcaagttcaaagacttattgaaccaatcctatcatacttccagcaatacttgcagctcacatgtaaagagtagcctggcaccccatcaaatgagctatgatttgagtttctgaaatatgggatgcctacacctgaatacagaatcagcccctgttgtaagatgtctgaaacatgaaggatgtgaacgttttttcggggctgaaaccttgaataatgtgagtcgcgtcaagaaggatgctccctttatacttaagagtactagcagagcagaaaaataatgtcagagtgagatacaccaattattatttttctcggttgattttgtcagtattcttcagttactcgtcgttgaatcagctcaatataagtgtgcaaacaagcgttcagcacaaagaactgt

SEQ ID NO: 24128 - DNA, 1147 bp, Zea Mays
ggcggagatacgggctgcattaaacgtacagaagggccaaactgaaaaataagaaaaacacacggacttcagcagttgcagtgccggctgcctccctctcgcgtgcgctcgccctgtgcctctcgcgtgcggaagctaggcaaaccgccggcgccctagctaggtgcccaggccatcgtcggtcccttcgccaagccatcgtcggggtctcggggattagcacccgcacccacaagatggccacaccgaacggtccttctgcttctccgatggtgtaccctgtctacctttctggggtatttccccagcaaggcggggatgatcaggctcaaggtccagggatatatgccatacaacagaaccagtgcagctgctcatccaccacaggctcctgctcgggccgagaaccgtgctgctctgcctgcccagaatgatggcaatgagcagcccaatgaccctgcaaaccctgaccaagctgcagagaaccgtgaacaagatgctgcagctggtaacgagaatccacaagaggcagaggtagaaggcaatcggcgtaattggctggaaggtgtcttgaaagagatccagctggttgttgtagggtttgttgcatcgcttcttcctggttttcagcacaatgactaggcctcatcttgtcactgtggaataagctatgtgcagtgatttggttatggtgacataggggaagtaattatatgaagctgctcaaagctttctgtttatattgtttcaagttcaaagacttattgaaccaatcctatcatacttccagcaatacttgcagctcacatgtaaagagtagcctggcaccccatcaaatgagctatgatttgagtttctgaaatatgggatgcctacacctgaatacagaatcagcccctgttgtaagatgtctgaaacatgaaggatgtgaacgttttttcggggctgaaaccttgaataatgtgagtcgcgtcaagaaggatgctccctttatacttaagagtactagcagagcagaaaaataatgtcagagtgagatacaccaattattatttttctcggttgattttgtcagtattcttcagttactcgtcgttgaatcagctcaatataagtgtgcaaacaagcgttcagcacaaagaactgt

SEQ ID NO: 24129 - DNA, 596 bp, Zea Mays
aagaaaaacacacggacttcagcagttgcagtgccggctgcctccctctcgcgtgcgctcgccctgtgcctctcgcgtgcggaagctaggcaaaccgccggcgccctagctaggtgcccaggccatcgtcggtcccttcgccaagccatcgtcggggtctcggggattagcacccgcacccacaagatggccacaccgaacggtccttctgcttctccgatggtgtaccctgtctacctttctggggtatttccccagcaaggcggggatgatcaggctcaaggtccagggatatatgccatacaacagaaccagttagcagcggcgatgggaatgggttgctatgctccaaccacactcattcccctcacttacaatatcccaaccattggtgctcctgctggtgaagagaatgtacaggatgctaggcagcaaaatgtacctcaaagacaagttgttgtgaggaggtttcacttcgcttttcagcttgacttgaccctgatcttcctactagctgcagtggtgtttctcttagccaggaaggctcaaaacaaaggctatttcttctcatactgtttgcatcattcgatttactt

SEQ ID NO: 24130 - DNA, 447 bp, Zea Mays
ggaaactcaaggcccccagctaaactggagagctgtcatgtgcacatgcttttattcagaattttattcagaaggaaaaatctggtacaaacactattacattatgcgccacggttacgcgcaccatgtccaggtgctagcgcatcgggttctgccaaatacatacgattgaaccagcatcattttaccagctgtgagcacgccagccgaagatccttgtggggctccctagctgtctacatctacaatcatcagaggagcttcacagccccgagcagccctcttcggtaggagccccaggtgaagcagcatagaattagctttcatcatcatcgtcagtttgagtagcatcttcccttgatttcttcactggacgcagaaattttcctgtgcagagctacccaacccagaccagagtacatgcacacggcttggtttgcgaacccg

SEQ ID NO: 24131 - DNA, 1167 bp, Zea Mays
tgggactattatcagactattgtcacttgtcagcctggcttcagaatacaaatgtgggagacatcaatggaaggtctattaagtttaaccaagaaaactacaccatctaattactactacatttgtgaaaagaatggtggctcgttgtctgacaagatggatgaacttgcttgctttgctcctggtatgctggccttaggagcctctggttacgggccagaaaaatcagagcaaattatgaatcttgcaaaagagcttgctaggacctgctataatttctaccaaaccactcccacgaagttggctggagaaaattattttttccatactggacaggacatgggtgtgggcacgtcgtggaacatcttgagaccggagactgttgaatcactgatgtacctgtggcgcttgacggggaataaaacataccaagattgggggtgggacatattccaggcatttgagaagaactcccgcatagaatctggatatgtgggactgagagatgtgaacactggtgaaaaagacaacatgatgcagagtttcttcctggcagagacgctgaagtacctgtacctacttttctcccctccatcagtcatatccttcgacgagtgggttttcaatactgaagctcacccattgagaattgttccagtaagtgataacaaaggcattggaacaccggtccgacaattcgggagaaaacagggaaagcctgagtaaccttggatatagagcagtggatttttgaatctgccgtctgattctgacctccctgttgatgtgttctgacacgagggaactttctgcctgaagcagtaagggttagaaattacggcgatagattgtttagagcaaaaatcataggtagaggatgatgttatatgcggggcagtgacctccgtgaggtcaagagccccatagaagcttttatctttggatttgcttacgcaccctgaggtgcattgttgatgtgtagcatacatctaactcactgtccatatgttgttgctttcctgggggctctgcgagctgtattgtcattatgtaccccctagttattacttcttttcagatatgattcatataaatataaaacgtaaagtatctatgttattagttgggttttcgtattaatattaacaatagattattatggttaat

SEQ ID NO: 24132 - DNA, 1741 bp, Zea Mays
gaatggtatcaacagctttggtggtcttggagcaacccttgttgactcacttgataccctatacataatgggcctgaaagatgaatttcagaaagctagagactgggtggcggagtcattagactttgacaaggattatgatgcgagtgtttttgaaacgaccataagggttgttggaggtctgcttagttcatacgatctatctggtgataaagtatttcttgataaggctaaagatattacagatcgactcttacctgcttgggatacaacatctggcatcccttataatagaataaacctagctcatggacgagcccataatcctggatggactaacggtgatagtatccttgcagattctggtacggagcaacttgaattcatagctctgtcacagaggactggagatcccaaataccagcagaaggcggagaacgtcattaaacagcttcaaaagatatatccaagtgatggtttactgcctatttacataaatcctcattctgggacagcatcatactcaactatcacatttggtgctatgggagacagcttctacgaatatttgctcaaggtctggatccaggggaataaaactgagcatgtaaaacactacagacaaatgtgggagacatcaatggaaggtctattaagtttaaccaagaaaactacaccatctaattactactacatttgtgaaaagaatggtggctcgttgtctgacaagatggatgaacttgcttgctttgctcctggtatgctggccttaggagcctctggttacgggccagaaaaatcagagcaaattatgaatcttgcaaaagagcttgctaggacctgctataatttctaccaaaccactcccacgaagttggctggagaaaattattttttccatactggacaggacatgggtgtgggcacgtcgtggaacatcttgagaccggagactgttgaatcactgatgtacctgtggcgcttgacggggaataaaacataccaagattgggggtgggacatattccaggcatttgagaagaactcccgcatagaatctggatatgtgggactgagagatgtgaacactggtgaaaaagacaacatgatgcagagtttcttcctggcagagacgctgaagtacctgtacctacttttctcccctccatcagtcatatccttcgacgagtgggttttcaatactgaagctcacccattgagaattgttccagtaagtgataacaaaggcattggaacaccggtccgacaattcgggagaaaacagggaaagcctgagtaaccttggatatagagcagtggatttttgaatctgccgtctgattctgacctccctgttgatgtgttctgacacgagggaactttctgcctgaagcagtaagggttagaaattacggcgatagattgtttagagcaaaaatcataggtagaggatgatgttatatgcggggcagtgacctccgtgaggtcaagagccccatagaagcttttatctttggatttgcttacgcaccctgaggtgcattgttgatgtgtagcatacatctaactcactgtccatatgttgttgctttcctgggggctctgcgagctgtattgtcattatgtaccccctagttattacttcttttcagatatgattcatataaatataaaacgtaaagtatctatgttattagttgggttttcgtattaatattaacaatagattattatggttaat

SEQ ID NO: 24133 - DNA, 2460 bp, Zea Mays
ctctctggctgttgacctccttgctccttgtgttccatccgaggcccgtccaaacgcaaaaccccacggcgacgtgttccatccatccggacaagctcgttgcacctcacgaccccgtcttaccacatggcctccagtccccgcttcataagggaaaaaggaaaactaattattactagtatactgttactgctactacaaggttcaactggtaggccctcctgcggtcctgccgatgaccacggccgatacagaagcacataaacacattcgacgaggtcacgactcacgaggggactcccgagcgcacgcgcgaatcgccgcggacctcgccggaggcggcgacgagctcggatcccggcgatctagtcgccggaggcggtcccgatggctcggcggtcgtcttcctcgtcgtcggggacctggcggtacctgaacccggcgtactacctcaagcggcccaagcgcctggcgctcctcttcttcgtcttcgtcgcggccaccttcgccttctgggaccgccagtcgctcgtcagcgagtacgagtctgagatttcccgattagaagatgatataaatcggttgcatgaccagctaagaaaggctggagttaatctggatgaaaatccagtagtaagcaataagaattccagaaaagatcttgtagtagaaattgatcctgtcaataatgaaagacgggaaaaagttaaagaggcaatgctccatgcttggaattcttatgttaagtatgcctggggaatggacgagcttcagccacaatcgaagaatggtatcaacagctttggtggtcttggagcaacccttgttgactcacttgataccctatacataatgggcctgaaagatgaatttcagaaagctagagaggttgttggaggtctgcttagttcatacgatctatctggtgataaagtatttcttgataaggctaaagatattacagatcgactcttacctgcttgggatacaacatctggcatcccttataatagaataaacctagctcatggacgagcccataatcctggatggactaacggtgatagtatccttgcagattctggtacggagcaacttgaattcatagctctgtcacagaggactggagatcccaaataccagcagaaggcggagaacgtcattaaacagcttcaaaagatatatccaagtgatggtttactgcctatttacataaatcctcattctgggacagcatcatactcaactatcacatttggtgctatgggagacagcttctacgaatatttgctcaaggtctggatccaggggaataaaactgagcatgtaaaacactacagacaaatgtgggagacatcaatggaaggtctattaagtttaaccaagaaaactacaccatctaattactactacatttgtgaaaagaatggtggctcgttgtctgacaagatggatgaacttgcttgctttgctcctggtatgctggccttaggagcctctggttacgggccagaaaaatcagagcaaattatgaatcttgcaaaagagcttgctaggacctgctataatttctaccaaaccactcccacgaagttggctggagaaaattattttttccatactggacaggacatgggtgtgggcacgtcgtggaacatcttgagaccggagactgttgaatcactgatgtacctgtggcgcttgacggggaataaaacataccaagattgggggtgggacatattccaggcatttgagaagaactcccgcatagaatctggatatgtgggactgagagatgtgaacactggtgaaaaagacaacatgatgcagagtttcttcctggcagagacgctgaagtacctgtacctacttttctcccctccatcagtcatatccttcgacgagtgggttttcaatactgaagctcacccattgagaattgttccagtaagtgataacaaaggcattggaacaccggtccgacaattcgggagaaaacagggaaagcctgagtaaccttggatatagagcagtggatttttgaatctgccgtctgattctgacctccctgttgatgtgttctgacacgagggaactttctgcctgaagcagtaagggttagaaattacggcgatagattgtttagagcaaaaatcataggtagaggatgatgttatatgcggggcagtgacctccgtgaggtcaagagccccatagaagcttttatctttggatttgcttacgcaccctgaggtgcattgttgatgtgtagcatacatctaactcactgtccatatgttgttgctttcctgggggctctgcgagctgtattgtcattatgtaccccctagttattacttcttttcagatatgattcatataaatataaaacgtaaagtatctatgttattagttgggttttcgtattaatattaacaatagattattatggttaat

SEQ ID NO: 24134 - DNA, 2539 bp, Zea Mays
ctctctggctgttgacctccttgctccttgtgttccatccgaggcccgtccaaacgcaaaaccccacggcgacgtgttccatccatccggacaagctcgttgcacctcacgaccccgtcttaccacatggcctccagtccccgcttcataagggaaaaaggaaaactaattattactagtatactgttactgctactacaaggttcaactggtaggccctcctgcggtcctgccgatgaccacggccgatacagaagcacataaacacattcgacgaggtcacgactcacgaggggactcccgagcgcacgcgcgaatcgccgcggacctcgccggaggcggcgacgagctcggatcccggcgatctagtcgccggaggcggtcccgatggctcggcggtcgtcttcctcgtcgtcggggacctggcggtacctgaacccggcgtactacctcaagcggcccaagcgcctggcgctcctcttcttcgtcttcgtcgcggccaccttcgccttctgggaccgccagtcgctcgtcagcgagtacgagtctgagatttcccgattagaagatgatataaatcggttgcatgaccagctaagaaaggctggagttaatctggatgaaaatccagtagtaagcaataagaattccagaaaagatcttgtagtagaaattgatcctgtcaataatgaaagacgggaaaaagttaaagaggcaatgctccatgcttggaattcttatgttaagtatgcctggggaatggacgagcttcagccacaatcgaagaatggtatcaacagctttggtggtcttggagcaacccttgttgactcacttgataccctatacataatgggcctgaaagatgaatttcagaaagctagagactgggtggcggagtcattagactttgacaaggattatgatgcgagtgtttttgaaacgaccataaggttgcattataagggttgttggaggtctgcttagttcatacgatctatctggtgataaagtatttcttgataaggctaaagatattacagatcgactcttacctgcttgggatacaacatctggcatcccttataatagaataaacctagctcatggacgagcccataatcctggatggactaacggtgatagtatccttgcagattctggtacggagcaacttgaattcatagctctgtcacagaggactggagatcccaaataccagcagaaggcggagaacgtcattaaacagcttcaaaagatatatccaagtgatggtttactgcctatttacataaatcctcattctgggacagcatcatactcaactatcacatttggtgctatgggagacagcttctacgaatatttgctcaaggtctggatccaggggaataaaactgagcatgtaaaacactacagacaaatgtgggagacatcaatggaaggtctattaagtttaaccaagaaaactacaccatctaattactactacatttgtgaaaagaatggtggctcgttgtctgacaagatggatgaacttgcttgctttgctcctggtatgctggccttaggagcctctggttacgggccagaaaaatcagagcaaattatgaatcttgcaaaagagcttgctaggacctgctataatttctaccaaaccactcccacgaagttggctggagaaaattattttttccatactggacaggacatgggtgtgggcacgtcgtggaacatcttgagaccggagactgttgaatcactgatgtacctgtggcgcttgacggggaataaaacataccaagattgggggtgggacatattccaggcatttgagaagaactcccgcatagaatctggatatgtgggactgagagatgtgaacactggtgaaaaagacaacatgatgcagagtttcttcctggcagagacgctgaagtacctgtacctacttttctcccctccatcagtcatatccttcgacgagtgggttttcaatactgaagctcacccattgagaattgttccagtaagtgataacaaaggcattggaacaccggtccgacaattcgggagaaaacagggaaagcctgagtaaccttggatatagagcagtggatttttgaatctgccgtctgattctgacctccctgttgatgtgttctgacacgagggaactttctgcctgaagcagtaagggttagaaattacggcgatagattgtttagagcaaaaatcataggtagaggatgatgttatatgcggggcagtgacctccgtgaggtcaagagccccatagaagcttttatctttggatttgcttacgcaccctgaggtgcattgttgatgtgtagcatacatctaactcactgtccatatgttgttgctttcctgggggctctgcgagctgtattgtcattatgtaccccctagttattacttcttttcagatatgattcatataaatataaaacgtaaagtatctatgttattagttgggttttcgtattaatattaacaatagattattatggttaat

SEQ ID NO: 24135 - DNA, 2018 bp, Zea Mays
attttctgtaacattgacaaagtttctggtgattcaaacatggttattcagtacaaaaagaagcattgcatagatgaaagattctgtttcttccagggttgctgtgtctacttgcataatgcgcccttagtgaatgcggactacaatgtaatatctgatcttgcactgaagagggtgaagcaggatctaacaatgcatggtggtcaagtctgcagcagtattgctccagctactcatttggtagtagtttcggttttacaggtctataactttgataacctgtacaagagcttccctcccgctgaaagacgttatctacatgacaaaagattacatgttgtcagtaacaagtggttggaagattcagtggagaaacaaatgaagctctctgaaactgcttacagccttaaaccagatacactagaagaactagaaattaaaaggagcctccggagcataagtttgaggaacacaaggaggttgaaagatctcatgcggaaaatatgccaaggaaaaggagtaggccaaccagttcaagaactgcaagggctgctcctagagcagtccgccgaataaggcctagaagaggaaaccagaaagcaaaaataggtgatgttgaatctgaagaaagtggccccagcgaatgccaagatgatgaaaatttggacacagatgatacctctaagattgaagaaggtattaccaacaaaaacaaaggactccctgcacctgcttcaaaaccagcctggagaacaggggctacaaaaggaaatcagcatacaaaaatagatgacagcggatctgaagaaagtgggccttgtgaaacagcgcaagatgattacatctctaagatggaagtagataacattgataatgaccgtggaccaccgccaggtgctcagcttttcacgttgggggagcaagaggtcaaaggtgtcaaattgaacaccgtggaggagaaacaagacagccctttccagagaacaaccgctgctgaagcgatgagtagcacgcctggtgagaagatagaacaaatggctgatccgttgcacgccatgcttctggatatgttgccactcctgggccagaaaaggacagaagatacaagcaaggcgcccttggcgaaagctgagaaggatccacctgcgataggaagctccacatccaattctgagattctgttgccagatgctggaacatccggggttccagccccagagccaagtgcagctccaccaaagaagaaaaaagtgagttacagagatgtcgttagtgaacttctgaaagattggtgagcgagcttggtcagtggggatagcctgcagtctatgttttactcccgtaatcgctatctttgtaaataggacagcgccatctaagtaaccatgtttgtagggtcaccttggctgcttgtcgtgccctgccctctggagctcacttgttttgcctgttgagaattttgactgttaagcctaacaacactgacgttgagttggaccaatatgcacgcggaatgctaggattctacaaagtggaagtggaagcctgttgtccgctctctgcaattggttttggatctttgcactgcagccaatgttgtcgctttcgctgtatacgagaatgtggtctgagccgaagccgagaaagaggaagctctccgtttggcggcctcggcgtgtggtcgtcgtgcgctgtgccgtgccgggccgagtcggtttaccaccaaactggcgtgtgtctgaaacgaaaaggaggggaatggagtcatggagatttgtcgccgaatcgccgttatttcacgcttgtcggaccattcactgttgctcgatcgagtctcgactctcgactgtgcaagtcgttggattggacatttggaccacagcagagtctgtagaggtagtagcagtattcaccaacgtactgactggattattctctctcttttaaaagaaaccctgactggatttttcttccttgctcgctcgacatgtatactaattttctttcttacgatgccg

SEQ ID NO: 24136 - DNA, 3061 bp, Zea Mays
ctgagagatcttgcaacggaggcaaggtataacttctggcggattgacgataaaggaggtcaatgatgcacttgatcgtctagctacaactgagaacaggtctgagaaggctttaatactttccaatctgatcaagaaaaccaatgcccttgaaatgaagtggcttctgatgataattcttaaagatttgaaattagggataagcgagaagagcatattcgaagaatttcatcctgatgcgcaagacttgttcaatgtcacttgtgacttgaaatttgtctgtgagaagctcaatgatcgaagccaaaggcataaacgccaggatatagaaattgggaaggctgtcaggcctcagctagctttgagagttcgtgattcttcagttgcttggaagaagcttcatggaaaacaagtagttgctgagtgcaaatttgatggtgaccgtattcaaatccacaaaaatggggaagagattcatttcttctctaggagctttcttgatcacactgaatacgcacctgggatgtcaaagattattaaagaaaatatcttggttgacagatgtatattggacggagaaatgcttgtctgggacactgtacttaaccgttttgctgaatttggctcaaaccaggaaatagctaaggctgcaagagagggattggagactgatcgacagttgtgttgtatcctttattttctttactacctgcattcttactttttgtcttgatattcttcactattccttttttttaagtaagacccttagctgcatgtttggcaacaagatatacatttgttttaatttccgttaaccttttttttgtttttggatctgtttcctagcatatgtcggcctaggtttaatgtttgctctcaaatttccagatgttttatatttttttgtttgtcatgttttacttgacactagcgatgcatagatgttgtttttgacatcctttatgctggagacaccagtgttatccaccaaagtttgacggagcggcatcaaattctgcagaaggttgtgaaacagttaaagggtcatcttgagattttgatcccaagacgtggtttaaatgtccctcgcccttcagatgaaagattctgtttcttccagggttgctgtgtctacttgcataatgcgcccttagtgaatgcggactacaatgtaatatctgatcttgcactgaagagggtgaagcaggatctaacaatgcatggtggtcaagtctgcagcagtattgctccagctactcatttggtagtagtttcggttttacaggtctataactttgataacctgtacaagagcttccctcccgctgaaagacgttatctacatgacaaaagattacatgttgtcagtaacaagtggttggaagattcagtggagaaacaaatgaagctctctgaaactgcttacagccttaaaccagatacactagaagaactagaaattaaaaggagtgaggaaaatgttcagcctccggagcataagtttgaggaacacaaggaggttgaaagatctcatgcggaaaatatgccaaggaaaaggagtaggccaaccagttcaagaactgcaagggctgctcctagagcagtccgccgaataaggcctagaagaggaaaccagaaagcaaaaataggtgatgttgaatctgaagaaagtggccccagcgaatgccaagatgatgaaaatttggacacagatgatacctctaagattgaagaaggtattaccaacaaaaacaaaggactccctgcacctgcttcaaaaccagcctggagaacaggggctacaaaaggaaatcagcatacaaaaatagatgacagcggatctgaagaaagtgggccttgtgaaacagcgcaagatgattacatctctaagatggaagtagataacattgataatgaccgtggaccaccgccaggtgctcagcttttcacgttgggggagcaagaggtcaaaggtgtcaaattgaacaccgtggaggagaaacaagacagccctttccagagaacaaccgctgctgaagcgatgagtagcacgcctggtgagaagatagaacaaatggctgatccgttgcacgccatgcttctggatatgttgccactcctgggccagaaaaggacagaagatacaagcaaggcgcccttggcgaaagctgagaaggatccacctgcgataggaagctccacatccaattctgagattctgttgccagatgctggaacatccggggttccagccccagagccaagtgcagctccaccaaagaagaaaaaagtgagttacagagatgtcgttagtgaacttctgaaagattggtgagcgagcttggtcagtggggatagcctgcagtctatgttttactcccgtaatcgctatctttgtaaataggacagcgccatctaagtaaccatgtttgtagggtcaccttggctgcttgtcgtgccctgccctctggagctcacttgttttgcctgttgagaattttgactgttaagcctaacaacactgacgttgagttggaccaatatgcacgcggaatgctaggattctacaaagtggaagtggaagcctgttgtccgctctctgcaattggttttggatctttgcactgcagccaatgttgtcgctttcgctgtatacgagaatgtggtctgagccgaagccgagaaagaggaagctctccgtttggcggcctcggcgtgtggtcgtcgtgcgctgtgccgtgccgggccgagtcggtttaccaccaaactggcgtgtgtctgaaacgaaaaggaggggaatggagtcatggagatttgtcgccgaatcgccgttatttcacgcttgtcggaccattcactgttgctcgatcgagtctcgactctcgactgtgcaagtcgttggattggacatttggaccacagcagagtctgtagaggtagtagcagtattcaccaacgtactgactggattattctctctcttttaaaagaaaccctgactggatttttcttccttgctcgctcgacatgtatactaattttctttcttacgatgccg

SEQ ID NO: 24137 - DNA, 3664 bp, Zea Mays
ccggtcgtccctctcgaactcgagcacgcagccggcagggaagagacaagcgccggagccagagaagcctgcggccaggccactaggccagggtactccggggaggcgagggagcgcttgagggcaacaggtaggagaagtgaggtgactgctatgaatcctatttattttccaaatattcatttgttttgacacctttcatttttttcctttctgaaaggaaattgcattttcgttttgaccttgggcccctgctgtcccaccgccggtaatggcggcgaaggtgcggttcggcctactggtggcgatgttccaggccatgtcgggcgacaagagttcggcgaagaagcgcggccgcctgcgcgcgttcctcgaccgcgcctacgtgccctgtggcggtagggatgactacttcagcgcgctccgcctcgtgctgccggggctcgaccgtgagcgcggctcctacggtctcaaggaggcggccctcgccgccgtgcttgtggacgcccttggcatcgccaaggactctaccgacgccgtccggctcaccaactggcgccgcggtgggggtggccgcaacgccggcaacttttcgcttgtggccgctgagatcttgcaacggaggcaaggtataacttctggcggattgacgataaaggaggtcaatgatgcacttgatcgtctagctacaactgagaacaggtctgagaaggctttaatactttccaatctgatcaagaaaaccaatgcccttgaaatgaagtggcttctgatgataattcttaaagatttgaaattagggataagcgagaagagcatattcgaagaatttcatcctgatgcgcaagacttgttcaatgtcacttgtgacttgaaatttgtctgtgagaagctcaatgatcgaagccaaaggcataaacgccaggatatagaaattgggaaggctgtcaggcctcagctagctttgagagttcgtgattcttcagttgcttggaagaagcttcatggaaaacaagtagttgctgagtgcaaatttgatggtgaccgtattcaaatccacaaaaatggggaagagattcatttcttctctaggagctttcttgatcacactgaatacgcacctgggatgtcaaagattattaaagaaaatatcttggttgacagatgtatattggacggagaaatgcttgtctgggacactgtacttaaccgttttgctgaatttggctcaaaccaggaaatagctaaggctgcaagagagggattggagactgatcgacagttgtgttgtatcctttattttctttactacctgcattcttactttttgtcttgatattcttcactattccttttttttaagtaagacccttagctgcatgtttggcaacaagatatacatttgttttaatttccgttaaccttttttttgtttttggatctgtttcctagcatatgtcggcctaggtttaatgtttgctctcaaatttccagatgttttatatttttttgtttgtcatgttttacttgacactagcgatgcatagatgttgtttttgacatcctttatgctggagacaccagtgttatccaccaaagtttgacggagcggcatcaaattctgcagaaggttgtgaaacagttaaagggtcatcttgagattttgatcccaagacgtggtttaaatgtccctcgcccttcagatgaaagattctgtttcttccagggttgctgtgtctacttgcataatgcgcccttagtgaatgcggactacaatgtaatatctgatcttgcactgaagagggtgaagcaggatctaacaatgcatggtggtcaagtctgcagcagtattgctccagctactcatttggtagtagtttcggttttacaggtctataactttgataacctgtacaagagcttccctcccgctgaaagacgttatctacatgacaaaagattacatgttgtcagtaacaagtggttggaagattcagtggagaaacaaatgaagctctctgaaactgcttacagccttaaaccagatacactagaagaactagaaattaaaaggagtgaggaaaatgttcagcctccggagcataagtttgaggaacacaaggaggttgaaagatctcatgcggaaaatatgccaaggaaaaggagtaggccaaccagttcaagaactgcaagggctgctcctagagcagtccgccgaataaggcctagaagaggaaaccagaaagcaaaaataggtgatgttgaatctgaagaaagtggccccagcgaatgccaagatgatgaaaatttggacacagatgatacctctaagattgaagaaggtattaccaacaaaaacaaaggactccctgcacctgcttcaaaaccagcctggagaacaggggctacaaaaggaaatcagcatacaaaaatagatgacagcggatctgaagaaagtgggccttgtgaaacagcgcaagatgattacatctctaagatggaagtagataacattgataatgaccgtggaccaccgccaggtgctcagcttttcacgttgggggagcaagaggtcaaaggtgtcaaattgaacaccgtggaggagaaacaagacagccctttccagagaacaaccgctgctgaagcgatgagtagcacgcctggtgagaagatagaacaaatggctgatccgttgcacgccatgcttctggatatgttgccactcctgggccagaaaaggacagaagatacaagcaaggcgcccttggcgaaagctgagaaggatccacctgcgataggaagctccacatccaattctgagattctgttgccagatgctggaacatccggggttccagccccagagccaagtgcagctccaccaaagaagaaaaaagtgagttacagagatgtcgttagtgaacttctgaaagattggtgagcgagcttggtcagtggggatagcctgcagtctatgttttactcccgtaatcgctatctttgtaaataggacagcgccatctaagtaaccatgtttgtagggtcaccttggctgcttgtcgtgccctgccctctggagctcacttgttttgcctgttgagaattttgactgttaagcctaacaacactgacgttgagttggaccaatatgcacgcggaatgctaggattctacaaagtggaagtggaagcctgttgtccgctctctgcaattggttttggatctttgcactgcagccaatgttgtcgctttcgctgtatacgagaatgtggtctgagccgaagccgagaaagaggaagctctccgtttggcggcctcggcgtgtggtcgtcgtgcgctgtgccgtgccgggccgagtcggtttaccaccaaactggcgtgtgtctgaaacgaaaaggaggggaatggagtcatggagatttgtcgccgaatcgccgttatttcacgcttgtcggaccattcactgttgctcgatcgagtctcgactctcgactgtgcaagtcgttggattggacatttggaccacagcagagtctgtagaggtagtagcagtattcaccaacgtactgactggattattctctctcttttaaaagaaaccctgactggatttttcttccttgctcgctcgacatgtatactaattttctttcttacgatgccg

SEQ ID NO: 24138 - DNA, 3808 bp, Zea Mays
ccggtcgtccctctcgaactcgagcacgcagccggcagggaagagacaagcgccggagccagagaagcctgcggccaggccactaggccagggtactccggggaggcgagggagcgcttgagggcaacaggtaggagaagtgaggtgactgctatgaatcctatttattttccaaatattcatttgttttgacacctttcatttttttcctttctgaaaggaaattgcattttcgttttgaccttgggcccctgctgtcccaccgccggtaatggcggcgaaggtgcggttcggcctactggtggcgatgttccaggccatgtcgggcgacaagagttcggcgaagaagcgcggccgcctgcgcgcgttcctcgaccgcgcctacgtgccctgtggcggtagggatgactacttcagcgcgctccgcctcgtgctgccggggctcgaccgtgagcgcggctcctacggtctcaaggaggcggccctcgccgccgtgcttgtggacgcccttggcatcgccaaggactctaccgacgccgtccggctcaccaactggcgccgcggtgggggtggccgcaacgccggcaacttttcgcttgtggccgctgagatcttgcaacggaggcaaggtataacttctggcggattgacgataaaggaggtcaatgatgcacttgatcgtctagctacaactgagaacaggtctgagaaggctttaatactttccaatctgatcaagaaaaccaatgcccttgaaatgaagtggcttctgatgataattcttaaagatttgaaattagggataagcgagaagagcatattcgaagaatttcatcctgatgcgcaagacttgttcaatgtcacttgtgacttgaaatttgtctgtgagaagctcaatgatcgaagccaaaggcataaacgccaggatatagaaattgggaaggctgtcaggcctcagctagctttgagagttcgtgattcttcagttgcttggaagaagcttcatggaaaacaagtagttgctgagtgcaaatttgatggtgaccgtattcaaatccacaaaaatggggaagagattcatttcttctctaggagctttcttgatcacactgaatacgcacctgggatgtcaaagattattaaagaaaatatcttggttgacagatgtatattggacggagaaatgcttgtctgggacactgtacttaaccgttttgctgaatttggctcaaaccaggaaatagctaaggctgcaagagagggattggagactgatcgacaggttgttttcacaaaactttttttccgtgtttcagagcgatccttctataaaatttcctatctaacttaatttactctgtgcctgcagttgtgttgtatcctttattttctttactacctgcattcttactttttgtcttgatattcttcactattccttttttttaagtaagacccttagctgcatgtttggcaacaagatatacatttgttttaatttccgttaaccttttttttgtttttggatctgtttcctagcatatgtcggcctaggtttaatgtttgctctcaaatttccagatgttttatatttttttgtttgtcatgttttacttgacactagcgatgcatagatgttgtttttgacatcctttatgctggagacaccagtgttatccaccaaagtttgacggagcggcatcaaattctgcagaaggttgtgaaacagttaaagggtcatcttgagattttgatcccaagacgtggtttaaatgtccctcgcccttcagatgaaccatgctggtcgattattgcacataatgctgaagacgttgataaattcttcaaagagactatcgagaacaggtttctttgtaccttcttagttaatcgaacccatttagtgaatgcggactacaatgtaatatctgatcttgcactgaagagggtgaagcaggatctaacaatgcatggtggtcaagtctgcagcagtattgctccagctactcatttggtagtagtttcggttttacaggtctataactttgataacctgtacaagagcttccctcccgctgaaagacgttatctacatgacaaaagattacatgttgtcagtaacaagtggttggaagattcagtggagaaacaaatgaagctctctgaaactgcttacagccttaaaccagatacactagaagaactagaaattaaaaggagtgaggaaaatgttcagcctccggagcataagtttgaggaacacaaggaggttgaaagatctcatgcggaaaatatgccaaggaaaaggagtaggccaaccagttcaagaactgcaagggctgctcctagagcagtccgccgaataaggcctagaagaggaaaccagaaagcaaaaataggtgatgttgaatctgaagaaagtggccccagcgaatgccaagatgatgaaaatttggacacagatgatacctctaagattgaagaaggtattaccaacaaaaacaaaggactccctgcacctgcttcaaaaccagcctggagaacaggggctacaaaaggaaatcagcatacaaaaatagatgacagcggatctgaagaaagtgggccttgtgaaacagcgcaagatgattacatctctaagatggaagtagataacattgataatgaccgtggaccaccgccaggtgctcagcttttcacgttgggggagcaagaggtcaaaggtgtcaaattgaacaccgtggaggagaaacaagacagccctttccagagaacaaccgctgctgaagcgatgagtagcacgcctggtgagaagatagaacaaatggctgatccgttgcacgccatgcttctggatatgttgccactcctgggccagaaaaggacagaagatacaagcaaggcgcccttggcgaaagctgagaaggatccacctgcgataggaagctccacatccaattctgagattctgttgccagatgctggaacatccggggttccagccccagagccaagtgcagctccaccaaagaagaaaaaagtgagttacagagatgtcgttagtgaacttctgaaagattggtgagcgagcttggtcagtggggatagcctgcagtctatgttttactcccgtaatcgctatctttgtaaataggacagcgccatctaagtaaccatgtttgtagggtcaccttggctgcttgtcgtgccctgccctctggagctcacttgttttgcctgttgagaattttgactgttaagcctaacaacactgacgttgagttggaccaatatgcacgcggaatgctaggattctacaaagtggaagtggaagcctgttgtccgctctctgcaattggttttggatctttgcactgcagccaatgttgtcgctttcgctgtatacgagaatgtggtctgagccgaagccgagaaagaggaagctctccgtttggcggcctcggcgtgtggtcgtcgtgcgctgtgccgtgccgggccgagtcggtttaccaccaaactggcgtgtgtctgaaacgaaaaggaggggaatggagtcatggagatttgtcgccgaatcgccgttatttcacgcttgtcggaccattcactgttgctcgatcgagtctcgactctcgactgtgcaagtcgttggattggacatttggaccacagcagagtctgtagaggtagtagcagtattcaccaacgtactgactggattattctctctcttttaaaagaaaccctgactggatttttcttccttgctcgctcgacatgtatactaattttctttcttacgatgccg

SEQ ID NO: 24139 - DNA, 1774 bp, Zea Mays
tgggggtggccgcaacgccggcaacttttcgcttgtggccgctgagagatcttgcaacggaggcaaggtataacttctggcggattgacgataaaggaggtcaatgatgcacttgatcgtctagctacaactgagaacaggtctgagaaggctttaatactttccaatctgatcaagaaaaccaatgcccttgaaatgaagtggcttctgatgataattcttaaagatttgaaattagggataagcgagaagagcatattcgaagaatttcatcctgatgcgcaagacttgttcaatgtcacttgtgacttgaaatttgtctgtgagaagctcaatgatcgaagccaaaggcataaacgccaggatatagaaattgggaaggctgtcaggcctcagctagctttgagagttcgtgattcttcagttgcttggaagaagcttcatggaaaacaagtagttgctgagtgcaaatttgatggtgaccgtattcaaatccacaaaaatggggaagagattcatttcttctctaggagctttcttgatcacactgaatacgcacctgggatgtcaaagattattaaagaaaatatcttggttgacagatgtatattggacggagaaatgcttgtctgggacactgtacttaaccgttttgctgaatttggctcaaaccaggaaatagctaaggctgcaagagagggattggagactgatcgacagttgtgttgtatcctttattttctttactacctgcattcttactttttgtcttgatattcttcactattccttttttttaagtaagacccttagctgcatgtttggcaacaagatatacatttgttttaatttccgttaaccttttttttgtttttggatctgtttcctagcatatgtcggcctaggtttaatgtttgctctcaaatttccagatgttttatatttttttgtttgtcatgttttacttgacactagcgatgcatagatgttgtttttgacatcctttatgctggagacaccagtgttatccaccaaagtttgacggagcggcatcaaattctgcagaaggttgtgaaacagttaaagggtcatcttgagattttgatcccaagacgtggtttaaatgtccctcgcccttcagatgaaccatgctggtcgattattgcacataatgctgaagacgttgataaattcttcaaagagactatcgagaacagagatgagggcattgtactgaaggaccttgattccaaatgggaacctggtgatcgaaatggaaagtggcttaaactaaagcctgattatatacacgcgggtgccgatctggatgttattattatagggggatactatggatcaggacgtcaaggtggagaggtcgcacagtttttagttggccttgcagtcccttcagatgataatagttatcccaaaaggttcctttcgttttgccgagttggtactggcctctctgatgaagagcgtgatgctcttgtcaccaaactgaacccttatttcaggaaaaatgagtaccccaaaaaaccaccaaaattctatgaagttacaaataactcaaaggagagaccagatgtttggattgaaagtcctgataagtcagtcataatatctgtaacaagtgacattcgtacaatcaagtctgaggtatttgctgctccatactgtttgaggttcccccgtattcagcgagtgagatatgacaagccatggcatgagtgccttgatgtgcagggttatatctcgaagatgatttctc

SEQ ID NO: 24140 - DNA, 2183 bp, Zea Mays
ccggtcgtccctctcgaactcgagcacgcagccggcagggaagagacaagcgccggagccagagaagcctgcggccaggccactaggccagggtactccggggaggcgagggagcgcttgagggcaacaggtgcggttcggcctactggtggcgatgttccaggccatgtcgggcgacaagagttcggcgaagaagcgcggccgcctgcgcgcgttcctcgaccgcgcctacgtgccctgtggcggtagggatgactacttcagcgcgctccgcctcgtgctgccggggctcgaccgtgagcgcggctcctacggtctcaaggaggcggccctcgccgccgtgcttgtggacgcccttggcatcgccaaggactctaccgacgccgtccggctcaccaactggcgccgcggtgggggtggccgcaacgccggcaacttttcgcttgtggccgctgagatcttgcaacggaggcaaggtataacttctggcggattgacgataaaggaggtcaatgatgcacttgatcgtctagctacaactgagaacaggtctgagaaggctttaatactttccaatctgatcaagaaaaccaatgcccttgaaatgaagtggcttctgatgataattcttaaagatttgaaattagggataagcgagaagagcatattcgaagaatttcatcctgatgcgcaagacttgttcaatgtcacttgtgacttgaaatttgtctgtgagaagctcaatgatcgaagccaaaggcataaacgccaggatatagaaattgggaaggctgtcaggcctcagctagctttgagagttcgtgattcttcagttgcttggaagaagcttcatggaaaacaagtagttgctgagtgcaaatttgatggtgaccgtattcaaatccacaaaaatggggaagagattcatttcttctctaggagctttcttgatcacactgaatacgcacctgggatgtcaaagattattaaagaaaatatcttggttgacagatgtatattggacggagaaatgcttgtctgggacactgtacttaaccgttttgctgaatttggctcaaaccaggaaatagctaaggctgcaagagagggattggagactgatcgacagttgtgttgtatcctttattttctttactacctgcattcttactttttgtcttgatattcttcactattccttttttttaagtaagacccttagctgcatgtttggcaacaagatatacatttgttttaatttccgttaaccttttttttgtttttggatctgtttcctagcatatgtcggcctaggtttaatgtttgctctcaaatttccagatgttttatatttttttgtttgtcatgttttacttgacactagcgatgcatagatgttgtttttgacatcctttatgctggagacaccagtgttatccaccaaagtttgacggagcggcatcaaattctgcagaaggttgtgaaacagttaaagggtcatcttgagattttgatcccaagacgtggtttaaatgtccctcgcccttcagatgaaccatgctggtcgattattgcacataatgctgaagacgttgataaattcttcaaagagactatcgagaacagagatgagggcattgtactgaaggaccttgattccaaatgggaacctggtgatcgaaatggaaagtggcttaaactaaagcctgattatatacacgcgggtgccgatctggatgttattattatagggggatactatggatcaggacgtcaaggtggagaggtcgcacagtttttagttggccttgcagtcccttcagatgataatagttatcccaaaaggttcctttcgttttgccgagttggtactggcctctctgatgaagagcgtgatgctcttgtcaccaaactgaacccttatttcaggaaaaatgagtaccccaaaaaaccaccaaaattctatgaagttacaaataactcaaaggagagaccagatgtttggattgaaagtcctgataagtcagtcataatatctgtaacaagtgacattcgtacaatcaagtctgaggtatttgctgctccatactgtttgaggttcccccgtattcagcgagtgagatatgacaagccatggcatgagtgccttgatgtgcagggttatatctcgaagatgatttctc

SEQ ID NO: 24141 - DNA, 425 bp, Zea Mays
ctaagtgtcagtttttcctctggttggtcttacataacaaatgttggacgactgaccggctcactaagaagggtcttccccatcctagtacttgccccttatgtgaccaggttcctttcgttttgccgagttggtactggcctctctgatgaagagcgtgatgctcttgtcaccaaactgaacccttatttcaggaaaaatgagtaccccaaaaaaccaccaaaattctatgaagttacaaataactcaaaggagagaccagatgtttggattgaaagtcctgataagtcagtcataatatctgtaacaagtgacattcgtacaatcaagtctgaggtatttgctgctccatactgtttgaggttcccccgtattcagcgagtgagatatgacaagccatggcatgagtgccttgatgtgcaggg

SEQ ID NO: 24142 - DNA, 557 bp, Zea Mays
gttttacttgacactagcgatgcatagatgttgtttttgacatcctttatgctggagacaccagtgttatccaccaaagtttgacggagcggcatcaaattctgcagaaggttgtgaaacagttaaagggtcatcttgagattttgatcccaagacgtggtttaaatgtccctcgcccttcaggtcgcacagtttttagttggccttgcagtcccttcagatgataatagttatcccaaaaggttcctttcgttttgccgagttggtactggcctctctgatgaagagcgtgatgctcttgtcaccaaactgaacccttatttcaggaaaaatgagtaccccaaaaaaccaccaaaattctatgaagttacaaataactcaaaggagagaccagatgtttggattgaaagtcctgataagtcagtcataatatctgtaacaagtgacattcgtacaatcaagtctgaggtatttgctgctccatactgtttgaggttcccccgtattcagcgagtgagatatgacaagccatggcatgagtgccttgatgtgcaggg

SEQ ID NO: 24143 - DNA, 545 bp, Zea Mays
gagaacagagatgagggcattgtactgaaggaccttgattccaaatgggaacctggtgatcgaaatggaaagtggcttaaactaaagcctgattatatacacgcgggtgccgatctggatgttattattatagggggatactatggatcaggacgtcaaggtggagaggtcgcacagtttttagttggccttgcagtcccttcagatgataatagttatcccaaaaggttcctttcgttttgccgagttggtactggcctctctgatgaagagcgtgatgctcttgtcaccaaactgaacccttatttcaggaaaaatgagtaccccaaaaaaccaccaaaattctatgaagttacaaataactcaaaggagagaccagatgtttggattgaaagtcctgataagtcagtcataatatctgtaacaagtgacattcgtacaatcaagtctgaggtagtatttgctgctccatactgtttgaggttcccccgtattcagcgagtgagatatgacaagccatggcatgagtgccttgatgtgcaggg

SEQ ID NO: 24144 - DNA, 1486 bp, Zea Mays
ccggtcgtccctctcgaactcgagcacgcagccggcagggaagagacaagcgccggagccagagaagcctgcggccaggccactaggccagggtactccggggaggcgagggagcgcttgagggcaacaggtctgagaaggctttaatactttccaatctgatcaagaaaaccaatgcccttgaaatgaagtggcttctgatgataattcttaaagatttgaaattagggataagcgagaagagcatattcgaagaatttcatcctgatgcgcaagacttgttcaatgtcacttgtgacttgaaatttgtctgtgagaagctcaatgatcgaagccaaaggcataaacgccaggatatagaaattgggaaggctgtcaggcctcagctagctttgagagttcgtgattcttcagttgcttggaagaagcttcatggaaaacaagtagttgctgagtgcaaatttgatggtgaccgtattcaaatccacaaaaatggggaagagattcatttcttctctaggagctttcttgatcacactgaatacgcacctgggatgtcaaagattattaaagaaaatatcttggttgacagatgtatattggacggagaaatgcttgtctgggacactgtacttaaccgttttgctgaatttggctcaaaccaggaaatagctaaggctgcaagagagggattggagactgatcgacagttgtgttatgttgtttttgacatcctttatgctggagacaccagtgttatccaccaaagtttgacggagcggcatcaaattctgcagaaggttgtgaaacagttaaagggtcatcttgagattttgatcccaagacgtggtttaaatgtccctcgcccttcagatgaaccatgctggtcgattattgcacataatgctgaagacgttgataaattcttcaaagagactatcgagaacagagatgagggcattgtactgaaggaccttgattccaaatgggaacctggtgatcgaaatggaaagtggcttaaactaaagcctgattatatacacgcgggtgccgatctggatgttattattatagggggatactatggatcaggacgtcaaggtggagaggtcgcacagtttttagttggccttgcagtcccttcagatgataatagttatcccaaaagaaggttcctttcgttttgccgagttggtactggcctctctgatgaagagcgtgatgctcttgtcaccaaactgaacccttatttcaggaaaaatgagtaccccaaaaaaccaccaaaattctatgaagttacaaataactcaaaggagagaccagatgtttggattgaaagtcctgataagtcagtcataatatctgtaacaagtgacattcgtacaatcaagtctgaggtatttgctgctccatactgtttgaggttcccccgtattcagcgagtgagatatgacaagccatggcatgagtgccttgatgtgcaggg

SEQ ID NO: 24145 - DNA, 2235 bp, Zea Mays
ccggtcgtccctctcgaactcgagcacgcagccggcagggaagagacaagcgccggagccagagaagcctgcggccaggccactaggccagggtactccggggaggcgagggagcgcttgagggcaacaggtaggagaagtgaggtgactgctatgaatcctatttattttccaaatattcatttgttttgacacctttcatttttttcctttctgaaaggaaattgcattttcgttttgaccttgggcccctgctgtcccaccgccggtaatggcggcgaaggtgcggttcggcctactggtggcgatgttccaggccatgtcgggcgacaagagttcggcgaagaagcgcggccgcctgcgcgcgttcctcgaccgcgcctacgtgccctgtggcggtagggatgactacttcagcgcgctccgcctcgtgctgccggggctcgaccgtgagcgcggctcctacggtctcaaggaggcggccctcgccgccgtgcttgtggacgcccttggcatcgccaaggactctaccgacgccgtccggctcaccaactggcgccgcggtgggggtggccgcaacgccggcaacttttcgcttgtggccgctgagatcttgcaacggaggcaaggtataacttctggcggattgacgataaaggaggtcaatgatgcacttgatcgtctagctacaactgagaacaggtctgagaaggctttaatactttccaatctgatcaagaaaaccaatgcccttgaaatgaagtggcttctgatgataattcttaaagatttgaaattagggataagcgagaagagcatattcgaagaatttcatcctgatgcgcaagacttgttcaatgtcacttgtgacttgaaatttgtctgtgagaagctcaatgatcgaagccaaaggcataaacgccaggatatagaaattgggaaggctgtcaggcctcagctagctttgagagttcgtgattcttcagttgcttggaagaagcttcatggaaaacaagtagttgctgagtgcaaatttgatggtgaccgtattcaaatccacaaaaatggggaagagattcatttcttctctaggagctttcttgatcacactgaatacgcacctgggatgtcaaagattattaaagaaaatatcttggttgacagatgtatattggacggagaaatgcttgtctgggacactgtacttaaccgttttgctgaatttggctcaaaccaggaaataggtttttggatattccattgaaaatcagaaagttttatttctccaggatatttttatagtggattaatgttactatttttgcagctaaggctgcaagagagggattggagactgatcgacaggttgttttcacaaaactttttttccgtgtttcagagcgatccttctataaaatttcctatctaacttaatttactctgtgcctgcagttgtgttcgatgcatagatgttgtttttgacatcctttatgctggagacaccagtgttatccaccaaagtttgacggagcggcatcaaattctgcagaaggttgtgaaacagttaaagggtcatcttgagattttgatcccaagacgtggtttaaatgtccctcgcccttcagatgaaccatgctggtcgattattgcacataatgctgaagacgttgataaattcttcaaagagactatcgagaacagagatgagggcattgtactgaaggaccttgattccaaatgggaacctggtgatcgaaatggaaagtggcttaaactaaagcctgattatatacacgcgggtgccgatctggatgttattattatagggggatactatggatcaggacgtcaaggtggagaggtcgcacagtttttagttggccttgcagtcccttcagatgataatagttatcccaaaaggttcctttcgttttgccgagttggtactggcctctctgatgaagagcgtgatgctcttgtcaccaaactgaacccttatttcaggaaaaatgagtaccccaaaaaaccaccaaaattctatgaagttacaaataactcaaaggagagaccagatgtttggattgaaagtcctgataagtcagtcataatatctgtaacaagtgacattcgtacaatcaagtctgaggtatttgctgctccatactgtttgaggttcccccgtattcagcgagtgagatatgacaagccatggcatgagtgccttgatgtgcaggg

SEQ ID NO: 24146 - DNA, 2055 bp, Zea Mays
ccggtcgtccctctcgaactcgagcacgcagccggcagggaagagacaagcgccggagccagagaagcctgcggccaggccactaggccagggtactccggggaggcgagggagcgcttgagggcaacaggtaggagaagtgaggtgactgctatgaatcctatttattttccaaatattcatttgttttgacacctttcatttttttcctttctgaaaggaaattgcattttcgttttgaccttgggcccctgctgtcccaccgccggtaatggcggcgaaggtgcggttcggcctactggtggcgatgttccaggccatgtcgggcgacaagagttcggcgaagaagcgcggccgcctgcgcgcgttcctcgaccgcgcctacgtgccctgtggcggtagggatgactacttcagcgcgctccgcctcgtgctgccggggctcgaccgtgagcgcggctcctacggtctcaaggaggcggccctcgccgccgtgcttgtggacgcccttggcatcgccaaggactctaccgacgccgtccggctcaccaactggcgccgcggtgggggtggccgcaacgccggcaacttttcgcttgtggccgctgagatcttgcaacggaggcaaggtataacttctggcggattgacgataaaggaggtcaatgatgcacttgatcgtctagctacaactgagaacaggtctgagaaggctttaatactttccaatctgatcaagaaaaccaatgcccttgaaatgaagtggcttctgatgataattcttaaagatttgaaattagggataagcgagaagagcatattcgaagaatttcatcctgatgcgcaagacttgttcaatgtcacttgtgacttgaaatttgtctgtgagaagctcaatgatcgaagccaaaggcataaacgccaggatatagaaattgggaaggctgtcaggcctcagctagctttgagagttcgtgattcttcagttgcttggaagaagcttcatggaaaacaagtagttgctgagtgcaaatttgatggtgaccgtattcaaatccacaaaaatggggaagagattcatttcttctctaggagctttcttgatcacactgaatacgcacctgggatgtcaaagattattaaagaaaatatcttggttgacagatgtatattggacggagaaatgcttgtctgggacactgtacttaaccgttttgctgaatttggctcaaaccaggaaatagctaaggctgcaagagagggattggagactgatcgacagttgtgttatgttgtttttgacatcctttatgctggagacaccagtgttatccaccaaagtttgacggagcggcatcaaattctgcagaaggttgtgaaacagttaaagggtcatcttgagattttgatcccaagacgtggtttaaatgtccctcgcccttcagatgaaccatgctggtcgattattgcacataatgctgaagacgttgataaattcttcaaagagactatcgagaacagagatgagggcattgtactgaaggaccttgattccaaatgggaacctggtgatcgaaatggaaagtggcttaaactaaagcctgattatatacacgcgggtgccgatctggatgttattattatagggggatactatggatcaggacgtcaaggtggagaggtcgcacagtttttagttggccttgcagtcccttcagatgataatagttatcccaaaaggttcctttcgttttgccgagttggtactggcctctctgatgaagagcgtgatgctcttgtcaccaaactgaacccttatttcaggaaaaatgagtaccccaaaaaaccaccaaaattctatgaagttacaaataactcaaaggagagaccagatgtttggattgaaagtcctgataagtcagtcataatatctgtaacaagtgacattcgtacaatcaagtctgaggtatttgctgctccatactgtttgaggttcccccgtattcagcgagtgagatatgacaagccatggcatgagtgccttgatgtgcaggg

SEQ ID NO: 24147 - DNA, 1945 bp, Zea Mays
cttatatactgcgacggacggagtatttgcacatttcataacctgcttcattgtttgagctcatgcaaggcgtaaatcttattgcaagaagggcagctgtgcatgttaagtctcaaatatagactcacttgataacactgcatgagaggttgaaaacttgaggtacagttgatattctggttcagagtatgggttcaaggtttgcatcacatcagctgagcaatggcctgtatgtttctggtcgacctgagcaacctaaggagaaggccccaaccatttgttccactgcgatgccatatactgggggtgacatcaagaagtctggagagcttgggaagatgtttgatctccatgttgagaaatcaagaaaatctggtcctctaggaaacgctccttcaaggaatacttcatttggaggcactgcttccaattctgggcctgtctccaatgctggtggtcggtccaactactctggttccctttcatcttcagttcctggtgctggtggatcagccagagcgaaatcaaactccggaccactcaataagcatggagagccaacaaagaggtcatctggtccccagtctggaggagtaaccccaatggcacgccagaattctggcccccttcctcctgtgcttccgacaactgggcttatcacatctgggcctatctcttcagggccacttaattcgtctggtgctccaaggaaagtatctgggccacttgattctgctgcatcgatgaaaatgcgggctacttcctttgctcacaatcaagctgttactaatctgaacactgaagatggttactcaattcagggaagctttccgaagccaatactctgggctgtgattttgctctttgtgatgggttttatagcaggtggcttcattttgggggctgttcacaatgcaattttgctgatagttgttgtggtcatatttggttttgttgctgcacttcttatctggaatgcttgctggggtagcagaggtggaattgggtttgttagtcgctaccctgatgctgatctcagaacggccaaagatggacaatatgtaaaggttacaggggttgttacttgtggaaatttccccctcgaatcctcgttccaaagggttccaagatgcgtatacacttctactggcttgtatgagtacaggggttgggattccaaagctgccaataccgaacatcggcgttttacatggggtttacgttcaatggagcgacatgcggttgatttctacatttcagattttcagtccgggcttcgagcattggtgaaaacaggatatggtgcacgtgtgaccccatacgttgatgaatctgttataattgacatcgatccagacaacaaggatatgtcccctgaatttttgagatggctaagagagagaaacctttcaagcgatgatcggacaatgcgcctaaaagaaggatacatcaaggaaggtagcactgtaagtgtgatgggggttgtccaaaggaacgacaacgttctgatgattgttcctccatcagagcccatctcaactggttgtcagtgggccaagtgcgttctcccgaccaaccttgacgggcttgttttaagatgcgaagatacttcgaacattgatgtggtgccagtttaattagcggtgaagagtcgttgccaaagaaagtgtctgttaaatatgagtctgaattgtttcatgcaatgttagttgacaaaaatgtgcaaatgttgggtgtgattatggcaggtggagggtggttcgttaagctggcttttggatgtatagtttctttttcttttagttgtgttttgtcatttctttttaattttcagctccgagatctgaaacttgtgtaaccagatgcctcttaatctaaatcagcgtggcatttagatcgatttgaaagcttacaggtgacaggacttcggatgtacattcttccc

SEQ ID NO: 24148 - DNA, 2037 bp, Zea Mays
ccactttttattctagtcctataatataaggtgtgctctctctacacatgcatacattgatatagtagtatagagagaattaaatacatttcttggtctttgaaccagaggtggttgagacttatatactgcgacggacggagtatttgcacatttcataacctgcttcattgtttgagctcatgcaaggcgtaaatcttattgcaagaagggcagctgtgcatgttaagtctcaaatatagactcacttgataacactgcatgagaggttgaaaacttgaggtacagttgatattctggttcagagtatgggttcaaggtttgcatcacatcagctgagcaatggcctgtatgtttctggtcgacctgagcaacctaaggagaaggccccaaccatttgttccactgcgatgccatatactgggggtgacatcaagaagtctggagagcttgggaagatgtttgatctccatgttgagaaatcaagaaaatctggtcctctaggaaacgctccttcaaggaatacttcatttggaggcactgcttccaattctgggcctgtctccaatgctggtggtcggtccaactactctggttccctttcatcttcagttcctggtgctggtggatcagccagagcgaaatcaaactccggaccactcaataagcatggagagccaacaaagaggtcatctggtccccagtctggaggagtaaccccaatggcacgccagaattctggcccccttcctcctgtgcttccgacaactgggcttatcacatctgggcctatctcttcagggccacttaattcgtctggtgctccaaggaaagtatctgggccacttgattctgctgcatcgatgaaaatgcgggctacttcctttgctcacaatcaagctgttactaatctgaacactgaagatggttactcaattcagggaagctttccgaagccaatactctgggctgtgattttgctctttgtgatgggttttatagcaggtggcttcattttgggggctgttcacaatgcaattttgctgatagttgttgtggtcatatttggttttgttgctgcacttcttatctggaatgcttgctggggtagcagaggtggaattgggtttgttagtcgctaccctgatgctgatctcagaacggccaaagatggacaatatgtaaaggttacaggggttgttacttgtggaaatttccccctcgaatcctcgttccaaagggttccaagatgcgtatacacttctactggcttgtatgagtacaggggttgggattccaaagctgccaataccgaacatcggcgttttacatggggtttacgttcaatggagattttcagtccgggcttcgagcattggtgaaaacaggatatggtgcacgtgtgaccccatacgttgatgaatctgttataattgacatcgatccagacaacaaggatatgtcccctgaatttttgagatggctaagagagagaaacctttcaagcgatgatcggacaatgcgcctaaaagaaggatacatcaaggaaggtagcactgtaagtgtgatgggggttgtccaaaggaacgacaacgttctgatgattgttcctccatcagagcccatctcaactggttgtcagtgggccaagtgcgttctcccgaccaaccttgacgggcttgttttaagatgcgaagatacttcgaacattgatgtggtgccagtttaattagcggtgaagagtcgttgccaaagaaagtgtctgttaaatatgagtctgaattgtttcatgcaatgttagttgacaaaaatgtgcaaatgttgggtgtgattatggcaggtggagggtggttcgttaagctggcttttggatgtatagtttctttttcttttagttgtgttttgtcatttctttttaattttcagctccgagatctgaaacttgtgtaaccagatgcctcttaatctaaatcagcgtggcatttagatcgatttgaaagcttacaggtgacaggacttcggatgtacattcttccc

SEQ ID NO: 24149 - DNA, 2300 bp, Zea Mays
cttcacacagccattttttctctctctctctcatgcatcgtctatctatattattttatctccccccgtctccacctccccctatattctctctctcccctcctctcctctccccagctacgccagtcctcctccctgtctgcttcggtgcttcgctcccgcactgcgcttggccgctttccctctccccgcaccttctccacctcccccattccgccaccgcacgagcagagctccctcaccaagaggaccaaaaaaaaaaaaaacgagggaggcaagccaggcgggacagcaacgcgacgcgcttgtcattcactcgaggattcctaccatccctgatattctcttatgtatatgctaattctggaagtttatctgtcttcaattggtatattcaacgcatattttcaggagctcatgcaaggcgtaaatcttattgcaagaagggcagctgtgcatgttaagtctcaaatatagactcacttgataacactgcatgagaggttgaaaacttgaggtacagttgatattctggttcagagtatgggttcaaggtttgcatcacatcagctgagcaatggcctgtatgtttctggtcgacctgagcaacctaaggagaaggccccaaccatttgttccactgcgatgccatatactgggggtgacatcaagaagtctggagagcttgggaagatgtttgatctccatgttgagaaatcaagaaaatctggtcctctaggaaacgctccttcaaggaatacttcatttggaggcactgcttccaattctgggcctgtctccaatgctggtggtcggtccaactactctggttccctttcatcttcagttcctggtgctggtggatcagccagagcgaaatcaaactccggaccactcaataagcatggagagccaacaaagaggtcatctggtccccagtctggaggagtaaccccaatggcacgccagaattctggcccccttcctcctgtgcttccgacaactgggcttatcacatctgggcctatctcttcagggccacttaattcgtctggtgctccaaggaaagtatctgggccacttgattctgctgcatcgatgaaaatgcgggctacttcctttgctcacaatcaagctgttactaatctgaacactgaagatggttactcaattcagggaagctttccgaagccaatactctgggctgtgattttgctctttgtgatgggttttatagcaggtggcttcattttgggggctgttcacaatgcaattttgctgatagttgttgtggtcatatttggttttgttgctgcacttcttatctggaatgcttgctggggtagcagaggtggaattgggtttgttagtcgctaccctgatgctgatctcagaacggccaaagatggacaatatgtaaaggttacaggggttgttacttgtggaaatttccccctcgaatcctcgttccaaagggttccaagatgcgtatacacttctactggcttgtatgagtacaggggttgggattccaaagctgccaataccgaacatcggcgttttacatggggtttacgttcaatggagcgacatgcggttgatttctacatttcagattttcagtccgggcttcgagcattggtgaaaacaggatatggtgcacgtgtgaccccatacgttgatgaatctgttataattgacatcgatccagacaacaaggatatgtcccctgaatttttgagatggctaagagagagaaacctttcaagcgatgatcggacaatgcgcctaaaagaaggatacatcaaggaaggtagcactgtaagtgtgatgggggttgtccaaaggaacgacaacgttctgatgattgttcctccatcagagcccatctcaactggttgtcagtgggccaagtgcgttctcccgaccaaccttgacgggcttgttttaagatgcgaagatacttcgaacattgatgtggtgccagtttaattagcggtgaagagtcgttgccaaagaaagtgtctgttaaatatgagtctgaattgtttcatgcaatgttagttgacaaaaatgtgcaaatgttgggtgtgattatggcaggtggagggtggttcgttaagctggcttttggatgtatagtttctttttcttttagttgtgttttgtcatttctttttaattttcagctccgagatctgaaacttgtgtaaccagatgcctcttaatctaaatcagcgtggcatttagatcgatttgaaagcttacaggtgacaggacttcggatgtacattcttccc

SEQ ID NO: 24150 - DNA, 2272 bp, Zea Mays
cttcacacagccattttttctctctctctctcatgcatcgtctatctatattattttatctccccccgtctccacctccccctatattctctctctcccctcctctcctctccccagctacgccagtcctcctccctgtctgcttcggtgcttcgctcccgcactgcgcttggccgctttccctctccccgcaccttctccacctcccccattccgccaccgcacgagcagagctccctcaccaagaggaccaaaaaaaaaaaaaacgagggaggcaagccaggcgggacagcaacgcgacgcgcttgtcattcactcgaggattcctaccatccctgatattctcttatgtatatgctaattctggaagtttatctgtcttcaattggtatattcaacgcatattttcaggagctcatgcaaggcgtaaatcttattgcaagaagggcagctgtgcatgttaagtctcaaatatagactcacttgataacactgcatgagaggttgaaaacttgaggtacagttgatattctggttcagagtatgggttcaaggtttgcatcacatcagctgagcaatggcctgtatgtttctggtcgacctgagcaacctaaggagaaggccccaaccatttgttccactgcgatgccatatactgggggtgacatcaagaagtctggagagcttgggaagatgtttgatctccatgttgagaaatcaagaaaatctggtcctctaggaaacgctccttcaaggaatacttcatttggaggcactgcttccaattctgggcctgtctccaatgctggtggtcggtccaactactctggttccctttcatcttcagttcctggtgctggtggatcagccagagcgaaatcaaactccggaccactcaataagcatggagagccaacaaagaggtcatctggtccccagtctggaggagtaaccccaatggcacgccagaattctggcccccttcctcctgtgcttccgacaactgggcttatcacatctgggcctatctcttcagggccacttaattcgtctggtgctccaaggaaagtatctgggccacttgattctgctgcatcgatgaaaatgcgggctacttcctttgctcacaatcaagctgttactaatctgaacactgaagatggttactcaattcagggaagctttccgaagccaatactctgggctgtgattttgctctttgtgatgggttttatagcaggtggcttcattttgggggctgttcacaatgcaattttgctgatagttgttgtggtcatatttggttttgttgctgcacttcttatctggaatgcttgctggggtagcagaggtggaattgggtttgttagtcgctaccctgatgctgatctcagaacggccaaagatggacaatatgtaaaggttacaggggttgttacttgtggaaatttccccctcgaatcctcgttccaaagggttccaagatgcgtatacacttctactggcttgtatgagtacaggggttgggattccaaagctgccaataccgaacatcggcgttttacatggggtttacgttcaatggagattttcagtccgggcttcgagcattggtgaaaacaggatatggtgcacgtgtgaccccatacgttgatgaatctgttataattgacatcgatccagacaacaaggatatgtcccctgaatttttgagatggctaagagagagaaacctttcaagcgatgatcggacaatgcgcctaaaagaaggatacatcaaggaaggtagcactgtaagtgtgatgggggttgtccaaaggaacgacaacgttctgatgattgttcctccatcagagcccatctcaactggttgtcagtgggccaagtgcgttctcccgaccaaccttgacgggcttgttttaagatgcgaagatacttcgaacattgatgtggtgccagtttaattagcggtgaagagtcgttgccaaagaaagtgtctgttaaatatgagtctgaattgtttcatgcaatgttagttgacaaaaatgtgcaaatgttgggtgtgattatggcaggtggagggtggttcgttaagctggcttttggatgtatagtttctttttcttttagttgtgttttgtcatttctttttaattttcagctccgagatctgaaacttgtgtaaccagatgcctcttaatctaaatcagcgtggcatttagatcgatttgaaagcttacaggtgacaggacttcggatgtacattcttccc

SEQ ID NO: 24151 - DNA, 2241 bp, Zea Mays
gtgaagaggccccgctgtccgtttcttccccccaccgcgcgctggtgcaggagagtgcacttcacacagccattttttctctctctctctcatgcatcgtctatctatattattttatctccccccgtctccacctccccctatattctctctctcccctcctctcctctccccagctacgccagtcctcctccctgtctgcttcggtgcttcgctcccgcactgcgcttggccgctttccctctccccgcaccttctccacctcccccattccgccaccgcacgagcagagctccctcaccaagaggaccaaaaaaaaaaaaaacgagggaggcaagccaggcgggacagcaacgcgacgcgcttgtcattcactcgaggagctcatgcaaggcgtaaatcttattgcaagaagggcagctgtgcatgttaagtctcaaatatagactcacttgataacactgcatgagaggttgaaaacttgaggtacagttgatattctggttcagagtatgggttcaaggtttgcatcacatcagctgagcaatggcctgtatgtttctggtcgacctgagcaacctaaggagaaggccccaaccatttgttccactgcgatgccatatactgggggtgacatcaagaagtctggagagcttgggaagatgtttgatctccatgttgagaaatcaagaaaatctggtcctctaggaaacgctccttcaaggaatacttcatttggaggcactgcttccaattctgggcctgtctccaatgctggtggtcggtccaactactctggttccctttcatcttcagttcctggtgctggtggatcagccagagcgaaatcaaactccggaccactcaataagcatggagagccaacaaagaggtcatctggtccccagtctggaggagtaaccccaatggcacgccagaattctggcccccttcctcctgtgcttccgacaactgggcttatcacatctgggcctatctcttcagggccacttaattcgtctggtgctccaaggaaagtatctgggccacttgattctgctgcatcgatgaaaatgcgggctacttcctttgctcacaatcaagctgttactaatctgaacactgaagatggttactcaattcagggaagctttccgaagccaatactctgggctgtgattttgctctttgtgatgggttttatagcaggtggcttcattttgggggctgttcacaatgcaattttgctgatagttgttgtggtcatatttggttttgttgctgcacttcttatctggaatgcttgctggggtagcagaggtggaattgggtttgttagtcgctaccctgatgctgatctcagaacggccaaagatggacaatatgtaaaggttacaggggttgttacttgtggaaatttccccctcgaatcctcgttccaaagggttccaagatgcgtatacacttctactggcttgtatgagtacaggggttgggattccaaagctgccaataccgaacatcggcgttttacatggggtttacgttcaatggagattttcagtccgggcttcgagcattggtgaaaacaggatatggtgcacgtgtgaccccatacgttgatgaatctgttataattgacatcgatccagacaacaaggatatgtcccctgaatttttgagatggctaagagagagaaacctttcaagcgatgatcggacaatgcgcctaaaagaaggatacatcaaggaaggtagcactgtaagtgtgatgggggttgtccaaaggaacgacaacgttctgatgattgttcctccatcagagcccatctcaactggttgtcagtgggccaagtgcgttctcccgaccaaccttgacgggcttgttttaagatgcgaagatacttcgaacattgatgtggtgccagtttaattagcggtgaagagtcgttgccaaagaaagtgtctgttaaatatgagtctgaattgtttcatgcaatgttagttgacaaaaatgtgcaaatgttgggtgtgattatggcaggtggagggtggttcgttaagctggcttttggatgtatagtttctttttcttttagttgtgttttgtcatttctttttaattttcagctccgagatctgaaacttgtgtaaccagatgcctcttaatctaaatcagcgtggcatttagatcgatttgaaagcttacaggtgacaggacttcggatgtacattcttccc

SEQ ID NO: 24152 - DNA, 1264 bp, Zea Mays
aacaaaccctatcaccaaaccctactacataacccgccattcccactcccctcgccgcctgcgtccacctccgccccccgccctccccgcgtcccccctctcctacgcagatcgtccagatgtcgtccgaggcggtgaaggtggcggtgccggagtcggtactccgcaagcggaagcgcgaggagcagtgggccgccgagaagaaggagaagtccctggccgagaggaagaagtccatcgagaaccggaagctcatcttcacccgcgccaagcagtacgccgaggagtacgatgcccaggagaaggaactggtacagcttaagcgtgaggcccgtttgaagggtggtttctatgtcagtcctgaggcaaagctgctatttgtgatccgcatccgtgggaagatattgcagcttctgcgtttgaggcagatattcaatggcgtgttcctgaaagtcaacaaggctaccattaacatgcttcgcagggttgagccttatgttgcatatgggtacccgaacttgaagagtgtcagggagttgatctacaagaggggctacggaaaactgaacaagcagaggatccctctgtctaacaaccaagtcatcgaggagggcttgggcaagcacaacatcatttgcattgaggatcttgttcatgagatcatgactgtcggcccacacttcaaggaggcgaacaacttcctttggccatttaagctgaaggcaccgctgggaggtctgaagaagaagaggaaccactatgtggagggtggtgatgccggtaaccgtgagaattacatcaacgagctcatcaaaaggatgaattaggttcacgatcaagctctattgtgttctaagaaactttctgtgctctcccaattttacattattaggaagcggatgaatatgcatgcagttttgttgtttggaactagatgtgtatggaagaaacatgatcttttttctcggaggtttaaaattatatatttagggttagtttgaaaacttcatttttccaagggatttctattttccctaggaaaaatgaactggtttcccaaaccagcccatgatgcatttcccgtcctgagtatcgggcctttttctctgtccaagacgctctttctgaagtacgatctgtatttaaatccatgatggatcttgatatattgtaaactggcttgaagcacttctggcttacaaacccaacaatcagccgctttcgaaaacactttcggccctggatttatggcgaagttcgtttt

SEQ ID NO: 24153 - DNA, 2065 bp, Zea Mays
ctttgctagctagccgcgtgcgcgtaggccgaggcatcgagcagcagactagcaatagcagagcgcctctgctagccgccaggcagccagactagcgtagcgtgccttctctggctctctgcgcggctgcgccgttgcgcactaggcagccaggctgcctgcctgcagacatttgtagagcttgtgcagagcagaccaccaaagctattatttcagatattgggaatagaaacttttccattcttgttgatgaggctcgagatgtatcaaggagcaaatggcggttgttttgaggtatgtcaacgaacgaggtgaagtgattgagagatttattgggttacaagaggtacccgacactacatcatcagctctaaaaattgctttggatggtatgttttctttctatgggttgtcaatggatagactacgaggacaaggttatgatggggcatcaaacatgaggggtgaatttcatgggttgcaaagaagaatattagatgagagtccacatgctttttacatacattgctttgcacaccaattgcaattagtggttgtttcagttgctaagtgttgcgcttctgtatttgatttcttccaaacgtgcaacttgattgtgaatagtgttaatgcttcttgtaagagaagggatcaattggctcaacaacaccatgacaaacttgtgaacatgttggaaagaggggaaattttttcaggtagagggaaaaatcaagaaaccaacctagcacgacctggggatactcgatggggttcacatcataaaactttatgtcgtattgttctcatgtgggatgctattctagaggtattagagattgtggctgatgatggctctaatggggataagaaatacatggcttctggtttgttgaaacaaatggagagctttgaatttgtgcttattatgcatctcatgatgaggttattaggcaagactaatgatttgtcacaatgtttgcaaagaaaagatcagaatattgtccttgctgttggattgattggagccacattgcggaatattagtgaagtacgtgatagtggatgggaagaattgtttgaggaggtaaagaccttttgtaaccaacataacattattgtaccaaagatggatgacacaattactgttcgaggtcgctcaagggggcgtggaggtcaattagtgacttactatcatcatttcaaaaatgagatatttattgttgtgtatgatcaagttattgtggaattaaacaaccgtttcactgaaagatctactcaattattgagatgcatttcgtgtctagatccaagaaattcatttgccagctatgacaaagctcagctgatagaattggctaagatttattctgcagacttctctcaatatgacctcttgatccttagagaccaactcgatatatttattgttgatgtgaggggtaattctgattttgcaaattgtgaagaccttggtaatctggctattaagatggtgcaaaccgagagacacctagtttttgcattggtttatcgtctcattgaattagccttaattttgcctgttgcaactgccacggttgaaagagccttctcagctatgaaaatcatcaagacagaattgagaaataagatgggaaatgattggttaaatcatagaatggtatgctatatagaaagagatatctttgcaagaattcaaagtgatgatattttatatcattttcaagaattgaagagtcgtatgaaaaagctacctccacaaagttcaagtggtatatttttgtgctcacttatacatttttgcattcattagttatattgtcatgttgtatctctcattttatacaaatatttaacttgcaatgtgtaggttcaaattcacgtgctaatgttgatgaagttattagaggcggggaaggaccaaatcatctctaattaggtatttttaaatttttttaccaagtttattgtatttttagatgctgaattgaagtaaatactatcttagtctatgtttgtggtatattttgttttagcggtatatttagccgcacaatatattaga

SEQ ID NO: 24154 - DNA, 497 bp, Zea Mays
cttagtattgttagcacatggaatttgaatcattgcttacagagccatggtcatggactgatggtaacactggaggtgaaaggagagacacagctgaataacctggctgagaagctggcagcagctggtgtccggcacaagctgtggatagagcagcctgagaacatcccaacatgcatagctacagcaccctgcccaaagtcgcaggtttcttctttcttcaagaagctcaagctttgcaaatgagcaaagaacaacagttgttcattgctccgtctgctactgtcattacggaggatcatcaaaactttcaaaactgcccatgtatgtttcatgacatgttctgctagcaacaagccatagataattagatatctcagtgatgtaatggagatatttgtgtcgttattcgccttgctgattttacatgattgtccattcacttactgtgtacctgtctcagcagttaattaatgcgaataaattgatgaagtatt

SEQ ID NO: 24155 - DNA, 1367 bp, Zea Mays
agagagacgcctgcctggccaaagtggcaaaggtgagcaatgaaggcgaccacatcgatatttggaggaatccaaagggctcctccacaaaaaaagacagacaaaaaaactaatagaaaaattaaaaagaatccattgactcgcaggttcccctgctctcaccatttccacctataaagtcggccgcagcctcctgcgcgacaaacacctcccaacccaatctccccagagagagagagccccaagccaagatccgcgcgaagcaagtcacccggcgaagcaccggctcccatggccgtggacctgatgggctgctacgccccgcgccgcgccaacgaccagctcgcctcctgtcgtccccggtcctgcccccctggcggccgtcagcgtggcgcagccgccgcagagcctgacgctggacttcacgaagccgaacctggccgtgtcggccgccacgtccgtcacctccacgtccttcttctcgtcggtcacggccggcgagggcagcgtctccaagggccggagcctcatgtcctccgggaagccgccgctgtccggccacaagcggaagccctgcgccggcgcccactccgaggccaccaccaacggcagccgttgccactgctccaagagaaggaagaaccgcgtgaagaggaccatcagagtgccggcgatcagctcgaaggtcgccgacatcccttcggacgagtactcgtggaggaagtacggccagaagcccatcaagggctccccttacccacggggctactacaagtgcagcactgtgcggggatgcccggcgaggaagcacgtggagcgggccaccgacgacccggccatgctggtggtgacgtacgagggcgagcaccgccacacgccgggcgcggtccaggggccgagccccctggcgaccgcgtcgccggtgcccgtcgccgtctccgccggcaacgggctcgttgtctagtctactaaaagctaggattagcttctcgtcttctttgttttttttttgtttgagctgatgtccgtgtaaaacaaggaagaaggttgtagaaagagggagaggaggacaccggaatttcgatgccgcaaaactcaaacctttgtgtcgtgtcctatctccgattggtgctcgctcaggctcccgttttgtgagtaaatactacaagctcagacgaaaatcgcgcccgctagcctgcacagaccccgagtcacctggggggctggtaccatccgacgcagctgtaaaattctggggcgtggttaggaacagttgaacaacgacggaggatgaaccattggggcgccgcggagctgttgtcctggatagctcatgatccgctgccgctgtagatattacgaagaaa

SEQ ID NO: 24156 - DNA, 273 bp, Zea Mays
atgtcgatgtcgatcctggcaaacagataggaggtcttggaccggaaacccgaccccatgacgcggtccagcgacagcccgatggtctggtcgtcgccgccgttgcttccgtttagaagctgtgttgggccccagagtatgtcgagctggtccgtcatgcgaccaccggcagccaccgaagagagggcagccatcgtcgtgagaaccgataggaaggctaggaggtgcgccgtagccgctgccatggttcccggctgccggtggtgtgaaatg

SEQ ID NO: 24157 - DNA, 298 bp, Zea Mays
ctcatattaaatctttttttccatggtttctttttcctccataaactttatatctctttttctcatctacgatcctagcaagtttaaaacagccacatgcgtctacggacgtagaagttggaatatatgctagacatctttgaccaatctagagatggtttcataattgttcttgttctcgttcctctagtagagaggcaaaaaaaaaatgaaacaataatctgatgaccatcacttgtactcgctctacgccaacccacattccgtggggaagccaccggggaacctctttgagtcg

SEQ ID NO: 24158 - DNA, 1082 bp, Zea Mays
atgcagccgtcaccagcaagcgggtatcgcggtctagcgcaacggcatggcgacgggcctcgtcggcgcggcgtcgagccccatcgacgcgctggttgtacaagcaagcacgacatccacccacgcaggaacgatggcaggcgtctaaagcgcgatggcaggcgtcacaggctccacggcagccataacagccgcgatggtgggcgtccaatcttctcagacgattaccgcataggaggaattcacctctccatcggcggaagcggcgactgaactgacgtccgcaatggtgggcgtgacggtggccacccaggtgtaatggccagactcatctccgcgtcggcacacagcagcgcggcagctgctatgaatggcgaggatgtgggactcagattcctgcagcgacgtacggcgtcggaactcagctcggacccgaccctcgtctcgacgtcggtggctcgtggagacatgcatcgtgccctagtttctacatctgttggttccttgaataaatataggaatgtttttgaaaaatattgatgtaacatcaccatcaaaactgatactttaatatagtagataaagaagagatagtctttaaattaatggtcgagcaagttagaaaaggcaatcgaccaaataagcacgtgaaagctttaggatataagttttttttttccaaatgaccggaattgagttatcaaaaatacaactaaaggatatgtgggatagactaaagatagattggacaatttggcaacgttggatgcgaaatgaacgagttgctttcatgccaatattctttcaaaaaattatttatgcttggtctattagctgtttccttaactagaaatataatgtttgtccttagaaaatatgtagatgctgcagctatttctattgtattaagcttgttcgtgagaatggtctacatttacatgtgtctcccatcattttaagacgtactccctccgtttctttttatttgtcgctggatagtgcaaaattacactatccagcgacaaataaaaagaaacggagggagtatcaaataattgtatgaatgtgcttttcttaagaaa

SEQ ID NO: 24159 - DNA, 1484 bp, Zea Mays
aattgggccggccgggctgcatctcgttccaccgcccagcaaccccttccgctgcattattccacgtgcgttctgccggtctctctcgccgctgtctcgctctccggcgactggtgggccgccgccgccgccgccccgccaggtgcggaggttttcgttggtccttcgccagcgacgagcacccaccagagccgggagctacatctgctcggagctgtgtggcacaactctgaaccagagacgctactccacttcgagggtggattggaagcagctgcggccaatgatccttaagaggattaagaaccggacaaaggaatacccaatcaagagcatgatcccagtcgcggaggaggtggtcagggctagggagattgtcaatgagggcgtctccagactgctcaaggttttgtcatgaagttcacattggaaccacgggtcatcagatgaaaacatgctatggtttcaagcgtatgatcaaggacagaccacatgaatgggaaccgggcaacttgaatgacatccttgttcctgttcaggctttccaccagaaaaatatgtttgagcatgagataaaacatgaccagcggttcgacttcactcgcgtcccagctgtacttgagctgtgccatcacgcaggtgcagacatacctgatgagattctatacagaagtggacaaatgtctactacactcaaaaccaacaatcagcaatctgctccaatcttgccagatgaactcagatatatcggtcagaaaacactggatgcatgggaaaacctgagattaggtgccacaaaacttctcttggtgtacccatccaaagtttgtaagcattgctctgaagtgcatatcgggcaatcagggcacaaggccagaatgtgtggagtattcaagtttgagggctggaaagggatgcacaagtggaacaaggctggagtggatgacctagttcctcagaacattgtgtggcatcggcggcctcatgatccacccgtccttgtggacggtgggagggattattatggccatgcgcctgctgtcgttgagctctgcatgcaagtgggtgcaatagtacccccgaaataccattgcatgatgaagacacacggcttagcaccacctgttggatgagaccacataccataagtcgactgcctgtatagatcagagaccaaaataatttgcttaaggatccaaaagactcttctggaagaagccatctattaactgtaatggctagctaaggagatacgctgttttgaagattattagtgttattagaatccagaaggtgagattgaaaagaaaagattttctgaagactagtagcggttgaaggccctcagacagtaggggaaattttgcattgtaaaagattataacagctttacttcattggcattcatttattcaacgttgtccttacattttcccccgcacttggattttaaccgtacgggcagttttgttgagctgccaaaa

SEQ ID NO: 24160 - DNA, 1808 bp, Zea Mays
aattgggccggccgggctgcatctcgttccaccgcccagcaaccccttccgctgcattattccacgtgcgttctgccggtctctctcgccgctgtctcgctctccggcgactggtgggccgccgccgccgccgccccgccaggtgcggaggttttcgttggtccttcgccagcgacgagcacccaccaggtacgcccaccccttttcaggaataatacaatctcttcttgcaccagcccctaccttcattcccttcatgccgtgcgaagctgagcaccgaaaccctaacctaaagctatttagctatttgatttgacaagcctcttaactttgaagtttttgcaaaaaaaaatgatgtacatgtgtacacccatgcccctttactggatccgcccccgatctcacgccaatgctcttttatgccttttattcaaattgtgaacttgtaggcttgttgtatatgtgctgcaatggcgtctctggggcgaagagccgggagctacatctgctcggagctgtgtggcacaactctgaaccagagacgctactccacttcgagggtggattggaagcagctgcggccaatgatccttaagaggattaagaaccggacaaaggaatacccaatcaagagcatgatcccagtcgcggaggaggtggtcagggctagggagattgtcaatgagggcgtctccagactgctcaaggttgttcctgttcagtcatgcaagttttgtcatgaagttcacattggaaccacgggtcatcagatgaaaacatgctatggtttcaagcgtatgatcaaggacagaccacatgaatgggaaccgggcaacttgaatgacatccttgttcctgttcaggctttccaccagaaaaatatgtttgagcatgagataaaacatgaccagcggttcgacttcactcgcgtcccagctgtacttgagctgtgccatcacgcaggtgcagacatacctgatgagattctatacagaagtggacaaatgtctactacactcaaaaccaacaatcagcaatctgctccaatcttgccagatgaactcagatatatcggtcagaaaacactggatgcatgggaaaacctgagattaggtgccacaaaacttctcttggtgtacccatccaaagtttgtaagcattgctctgaagtgcatatcgggcaatcagggcacaaggccagaatgtgtggagtattcaagtttgagggctggaaagggatgcacaagtggaacaaggctggagtggatgacctagttcctcagaacattgtgtggcatcggcggcctcatgatccacccgtccttgtggacggtgggagggattattatggccatgcgcctgctgtcgttgagctctgcatgcaagtgggtgcaatagtacccccgaaataccattgcatgatgaagacacacggcttagcaccacctgttggatgagaccacataccataagtcgactgcctgtatagatcagagaccaaaataatttgcttaaggatccaaaagactcttctggaagaagccatctattaactgtaatggctagctaaggagatacgctgttttgaagattattagtgttattagaatccagaaggtgagattgaaaagaaaagattttctgaagactagtagcggttgaaggccctcagacagtaggggaaattttgcattgtaaaagattataacagctttacttcattggcattcatttattcaacgttgtccttacattttcccccgcacttggattttaaccgtacgggcagttttgttgagctgccaaaa

SEQ ID NO: 24161 - DNA, 2162 bp, Zea Mays
cacacctccctttccctctacagtctacactgtcttcactcgtcccctccacactctccagatgccaaccaagcattactatggtagaatctcatctgacgggtacgaggagatgctaggctcacggctagccacagttgtgcattgctcgagtgcatgaccactgaattgctcgagtgcatatatgatcggatcctccagtgatctgattgatgctcaaagaatccatgcactatgcaggtaggtggatcgatagctgggaggcattaaagcggacgatgacgccttggcctcgctgcaatcttgcagattgctgctgcagcgcttctttaagagccaaccatccacatataccttgcttgacgccaagccaccggcattgtcggcaccgtgccctccgctccgctccccttcctcttggttttcggttccttcctccctcaaccagtcatctgctgctatttatgccacagccactcccagcagcggtgggaacaaagagtgccagcgtctcacccctgaggccgcgcagagccactgcttgcgtctctgtctctctgtctgctcgtttttctccttctgcgactcgtaggagggtgaggtcttgcctcgcggaatggcggcgtccggggcatggctggcccgtgcgacggcgacggcggtgctgggtttcgtcctggcggtggcgtcagctgaggcggcatcgggggacgtggagatggtgttcctcaaggccgcggtggccaaaggcgcagtgtgcttggacggcagcccaccggtgtaccatttctctcccggctccggttctggcgccaataactgggtcgtccacatggagggcaacttcaggggctcctccaaatttatgaagccactctcgttttcagggatattaggcggcaaccaaaaatccaatcctgatttctacaactggaatagagtaaagatcagatactgtgatggttcatcatttactggtgacgttgaggctgtggacactgcgaaagatctccgttacagagggttcagagtctggcgtgccgtcatcgatgatctacttactgtgaggggaatgagcaaggcgcaaaatgctcttctttctggatgctcagccggaggtctagcagcaatactacactgtgacagattccatgatctgtttccagcgaaaacaaaggtcaagtgtttttctgatgctggatattttttcgatgggaaggatatctccgggaacttttacgctaggtcaatctataagagcgttgtgaatctacatggatcagccaaaaatttaccagcttcatgtacctcaaagccaaagcaatcacctgagctgtgtatgttcccacagtatgttgtcccgacaatgcgcacaccattgttcatacttaatgcagcctacgattcgtggcaggtcaagaacgtcctagcacctagtccagctgatccgaagaagacttgggcccaatgcaagcttgacatcaagagctgctccgccagccaactcacaaccttgcaaaatttcaggacagattttctggcagcactccctaaaacgcagtctgtaggcatgttcatcgactcatgcaatgctcactgccaatcaggatctcaagacacgtggctagccgatggttctcccacggttaacaagacgcaaattggcaaggcggtgggggactggtactacgatagggaggtccctcggcagattgattgcccgtatccctgcaacccaacttgcaagaaccgtgatgatgattgagcaattgtataagtagttcatgttatcgaaatgaaaacaataaaggatcacaacgcgcgcccgtagttgtagatgatgaattataaacacatatgactgagctcaaagttgtttaatcatcatctgttgcgaaatgaggaagacaattggtgtcttgaagctgtgttttcgactgtgtctaaagcgtaaatgtaacgtatattgtgtcttcgcctatgcttaagacattggactagttgattggtcaatttaatttattaaatgttttgattggtgtaatgaatataataagtcgtgcatgccgcatgactaggcttccagtcttccacttacaccggctaagcactgtctatatatatgtagtcactttggatcaatgaatcagctgtttttatca

SEQ ID NO: 24162 - DNA, 2417 bp, Zea Mays
tgcgctaactgtggtttgtgtttggataaaacaggccttccaggggttctttttgtgcttcctgactcttacgttgatgctgagaacaaggattatggtgctgagttatttgtgaacggtgaaatcgttcagcgatctccagaaaggcagagaagggtggagccagtgcctcagagagctcaggatcgaccacggtacagtgaccggacccgctatgtgaagcggagggagaaccaatcttaccagagatgatgtttccgtctctgaagatgtaaaatgtcacggtttccacaagtgtccaaatgcggtactgaagatgcagcagcaactccccactactcatatgagaatggcatccgttctgtttgccgcgcattttaagctgtatatgcttattatgcatttgggcttgtacctcagtcgatatgaacgatgtatcctttgaactaacgcattataatttttgaaaccgttttagccagaaattaatcaactgttgatgattatcatatgatataccgcatgatcatctcggaaggggcccgtccgttcgatcgttcccctctcacaaactgctccagtactccaacccgttaaactgttgatggtgacatgatgccacattgccactggcagtcatatgcatgccgtcaccatcacattctggtagagataacggtgatgcaggcaaacgggacgcggagggtgcagcccgcgatctgtaacgtgtggcgcagcgggcgatctccgattcgctgccttatcctctgctactgccgcaccaaagcgtgagcaagcctgcctcccgcgagagcgctcaaccagccaagccggcgtcagaggcgagcagagaaatggcgggagcgaacttcctctccaccgcggcgctcgtcgcccgcggcgtcgctgcctgctcttctatttcaactccgacacggaggcacccgcaaatccgggtgtgctgccgggctgacgttgaggctatggaggcctatgcccatgaagagcgccttcgattccgtcggagagatttcatcggcacctgcgtcggcaccgctattggtttggaaatgatcgacggctctacgagtttctctggagtggctactgcagctgatctcattgagcgtagacaaagcaaaaatcaaagacaccctttacgtagccataaaggctaagccagagctcgttccatcgttgttgaccatggcactgaatgatgccatgacatacgacaagaccacaaaaactggaggcgcaaatggatctatcaggctagaaacaagcagacctgagaacagtgggctctcttccgcgttggatttgctgactgaagccaaaaaggagatcgattccttttccaagggaggtcccatttcgtttgcagatctgatccagtttgcagcacaatcagcactgaagagatcgtttcttgacgctgccattgccaaatgtggtggaaatgaagagaagggaagaacactgtactctgcatatggttcaaatgggcagtggggtctgttcgatagaacgttcgggagagcagacgcacaggaagcagatccagagggaagagtgcctgactggagcaaggcttctgtgcaggagatgaaggataggttcgtcgctgttgggttgggtcctcgccagcttgctgttatgtcagcgttccttggacctgaccaggctgctacggagggacgactgatagctgatccggattgccgtccatgggtggagaagtaccagcggagccgcgagaccgtctcccggactgactatgaggttgacctgataactacactcacaaagctgagctcccttggccagaagataaactacgaagcctacacataccctaagcagaagattgacctgggaaaactgaaactgtaagagatgattgccgggcacctgcatcggccgtatccaggaatcgggagctaattgtatggtaggctctgtctgctagagtgatttgattcggcgctgacgtccaagtattggctacttactggtcagctgtcagacattcttcccacggcaattaggatggtccctgtacatggttaaattggttctcccatttcgttttgtgtgaacttgaagaggcaaacgcttgtgagaagtgaggtgttgtgtcaatccccttacgtatacgagacgactgaagaattagtagaaaagaagtgcaagtgtcatgtcttgagtctgaagtctgagctcatgtttctgaattctgatcagaagcaggacagctggctcgtcattttgcttgcccatttctctgcctcgaccactcgcaccactgccgcaaataagaataacgtgatcgtcaaacatatacggaacgataagtagcaccccctttggtcaattacattacagtggctctataatctttctctgaagtctag

SEQ ID NO: 24163 - DNA, 2946 bp, Zea Mays
atctccgatcgtccgtgtccctcaccaaaagttcaaaaccccatccaattccaaatcccacttctcgccagttcacctccgcctccgctcctcccctccccctcccgtcctgccatggccaccgcagcacgcgccctcgtcgccgcacgcccggcacggccgctgctgccgtctcggcgcctcccgtcctcctcttccatccgtcccgcgcggcaacgtgctggcgtcgggtgcgtccgctgcatggctcggcggccggattccacctattccccgctgcgttcgggccagggcggtgaccgtgcaccgactgaaatggcgcctctgttccctggctgcgactacgagcactggctcatcgtcatggacaagcccgggggcgagggcgccaccaagcagcaaatgatagattgttacatccagacccttgcccaggtggtagggagtgaagaggaggcgaagaagaggatatataatgtgtcctgcgagcgctattttggattcggatgcgaaattgacgaggagacctccaacaaactcgaaggccttccaggggttctttttgtgcttcctgactcttacgttgatgctgagaacaaggattatggtgctgagttatttgtgaacggtgaaatcgttcagcgatctccagaaaggcagagaagggtggagccagtgcctcagagagctcaggatcgaccacggtacagtgaccggacccgctatgtgaagcggagggagaaccaatcttaccagagatgatgtttccgtctctgaagatgtaaaatgtcacggtttccacaagtgtccaaatgcggtactgaagatgcagcagcaactccccactactcatatgagaatggcatccgttctgtttgccgcgcattttaagctgtatatgcttattatgcatttgggcttgtacctcagtcgatatgaacgatgtatcctttgaactaacgcattataatttttgaaaccgttttagccagaaattaatcaactgttgatgattatcatatgatataccgcatgatcatctcggaaggggcccgtccgttcgatcgttcccctctcacaaactgctccagtactccaacccgttaaactgttgatggtgacatgatgccacattgccactggcagtcatatgcatgccgtcaccatcacattctggtagagataacggtgatgcaggcaaacgggacgcggagggtgcagcccgcgatctgtaacgtgtggcgcagcgggcgatctccgattcgctgccttatcctctgctactgccgcaccaaagcgtgagcaagcctgcctcccgcgagagcgctcaaccagccaagccggcgtcagaggcgagcagagaaatggcgggagcgaacttcctctccaccgcggcgctcgtcgcccgcggcgtcgctgcctgctcttctatttcaactccgacacggaggcacccgcaaatccgggtgtgctgccgggctgacgttgaggctatggaggcctatgcccatgaagagcgccttcgattccgtcggagagatttcatcggcacctgcgtcggcaccgctattggtttggaaatgatcgacggctctacgagtttctctggagtggctactgcagctgatctcattgagcgtagacaaaggtcggagttccaatcaaaaatcaaagacaccctttacgtagccataaaggctaagccagagctcgttccatcgttgttgaccatggcactgaatgatgccatgacatacgacaagaccacaaaaactggaggcgcaaatggatctatcaggctagcccagaaacaagcagacctgagaacagtgggctctcttccgcgttggatttgctgactgaagccaaaaaggagatcgattccttttccaagggaggtcccatttcgtttgcagatctgatccagtttgcagcacaatcagcactgaagagatcgtttcttgacgctgccattgccaaatgtggtggaaatgaagagaagggaagaacactgtactctgcatatggttcaaatgggcagtggggtctgttcgatagaacgttcgggagagcagacgcacaggaagcagatccagagggaagagtgcctgactggagcaaggcttctgtgcaggagatgaaggataggttcgtcgctgttgggttgggtcctcgccagcttgctgttatgtcagcgttccttggacctgaccaggctgctacggagggacgactgatagctgatccggattgccgtccatgggtggagaagtaccagcggagccgcgagaccgtctcccggactgactatgaggttgacctgataactacactcacaaagctgagctcccttggccagaagataaactacgaagcctacacataccctaagcagaagattgacctgggaaaactgaaactgtaagagatgattgccgggcacctgcatcggccgtatccaggaatcgggagctaattgtatggtaggctctgtctgctagagtgatttgattcggcgctgacgtccaagtattggctacttactggtcagctgtcagacattcttcccacggcaattaggatggtccctgtacatggttaaattggttctcccatttcgttttgtgtgaacttgaagaggcaaacgcttgtgagaagtgaggtgttgtgtcaatccccttacgtatacgagacgactgaagaattagtagaaaagaagtgcaagtgtcatgtcttgagtctgaagtctgagctcatgtttctgaattctgatcagaagcaggacagctggctcgtcattttgcttgcccatttctctgcctcgaccactcgcaccactgccgcaaataagaataacgtgatcgtcaaacatatacggaacgataagtagcaccccctttggtcaattacattacagtggctctataatctttctctgaagtctag

SEQ ID NO: 24164 - DNA, 2924 bp, Zea Mays
atctccgatcgtccgtgtccctcaccaaaagttcaaaaccccatccaattccaaatcccacttctcgccagttcacctccgcctccgctcctcccctccccctcccgtcctgccatggccaccgcagcacgcgccctcgtcgccgcacgcccggcacggccgctgctgccgtctcggcgcctcccgtcctcctcttccatccgtcccgcgcggcaacgtgctggcgtcgggtgcgtccgctgcatggctcggcggccggattccacctattccccgctgcgttcgggccagggcggtgaccgtgcaccgactgaaatggcgcctctgttccctggctgcgactacgagcactggctcatcgtcatggacaagcccgggggcgagggcgccaccaagcagcaaatgatagattgttacatccagacccttgcccaggtggtagggagtgaagaggaggcgaagaagaggatatataatgtgtcctgcgagcgctattttggattcggatgcgaaattgacgaggagacctccaacaaactcgaaggccttccaggggttctttttgtgcttcctgactcttacgttgatgctgagaacaaggattatggtgctgagttatttgtgaacggtgaaatcgttcagcgatctccagaaaggcagagaagggtggagccagtgcctcagagagctcaggatcgaccacggtacagtgaccggacccgctatgtgaagcggagggagaaccaatcttaccagagatgatgtttccgtctctgaagatgtaaaatgtcacggtttccacaagtgtccaaatgcggtactgaagatgcagcagcaactccccactactcatatgagaatggcatccgttctgtttgccgcgcattttaagctgtatatgcttattatgcatttgggcttgtacctcagtcgatatgaacgatgtatcctttgaactaacgcattataatttttgaaaccgttttagccagaaattaatcaactgttgatgattatcatatgatataccgcatgatcatctcggaaggggcccgtccgttcgatcgttcccctctcacaaactgctccagtactccaacccgttaaactgttgatggtgacatgatgccacattgccactggcagtcatatgcatgccgtcaccatcacattctggtagagataacggtgatgcaggcaaacgggacgcggagggtgcagcccgcgatctgtaacgtgtggcgcagcgggcgatctccgattcgctgccttatcctctgctactgccgcaccaaagcgtgagcaagcctgcctcccgcgagagcgctcaaccagccaagccggcgtcagaggcgagcagagaaatggcgggagcgaacttcctctccaccgcggcgctcgtcgcccgcggcgtcgctgcctgctcttctatttcaactccgacacggaggcacccgcaaatccgggtgtgctgccgggctgacgttgaggctatggaggcctatgcccatgaagagcgccttcgattccgtcggagagatttcatcggcacctgcgtcggcaccgctattggtttggaaatgatcgacggctctacgagtttctctggagtggctactgcagctgatctcattgagcgtagacaaaggtcggagttccaatcaaaaatcaaagacaccctttacgtagccataaaggctaagccagagctcgttccatcgttgttgaccatggcactgaatgatgccatgacatacgacaagaccacaaaaactggaggcgcaaatggatctatcaggctagaaacaagcagacctgagaacagtgggctctcttccgcgttggatttgctgactgaagccaaaaaggagatcgattccttttccaagggaggtcccatttcgtttgcagatctgatccagtttgcagcacaatcagcactgaagagatcgtttcttgacgctgccattgccaaatgtggtggaaatgaagagaagggaagaacactgtactctgcatatggttcaaatgggcagaacgttcgggagagcagacgcacaggaagcagatccagagggaagagtgcctgactggagcaaggcttctgtgcaggagatgaaggataggttcgtcgctgttgggttgggtcctcgccagcttgctgttatgtcagcgttccttggacctgaccaggctgctacggagggacgactgatagctgatccggattgccgtccatgggtggagaagtaccagcggagccgcgagaccgtctcccggactgactatgaggttgacctgataactacactcacaaagctgagctcccttggccagaagataaactacgaagcctacacataccctaagcagaagattgacctgggaaaactgaaactgtaagagatgattgccgggcacctgcatcggccgtatccaggaatcgggagctaattgtatggtaggctctgtctgctagagtgatttgattcggcgctgacgtccaagtattggctacttactggtcagctgtcagacattcttcccacggcaattaggatggtccctgtacatggttaaattggttctcccatttcgttttgtgtgaacttgaagaggcaaacgcttgtgagaagtgaggtgttgtgtcaatccccttacgtatacgagacgactgaagaattagtagaaaagaagtgcaagtgtcatgtcttgagtctgaagtctgagctcatgtttctgaattctgatcagaagcaggacagctggctcgtcattttgcttgcccatttctctgcctcgaccactcgcaccactgccgcaaataagaataacgtgatcgtcaaacatatacggaacgataagtagcaccccctttggtcaattacattacagtggctctataatctttctctgaagtctag

SEQ ID NO: 24165 - DNA, 2905 bp, Zea Mays
atctccgatcgtccgtgtccctcaccaaaagttcaaaaccccatccaattccaaatcccacttctcgccagttcacctccgcctccgctcctcccctccccctcccgtcctgccatggccaccgcagcacgcgccctcgtcgccgcacgcccggcacggccgctgctgccgtctcggcgcctcccgtcctcctcttccatccgtcccgcgcggcaacgtgctggcgtcgggtgcgtccgctgcatggctcggcggccggattccacctattccccgctgcgttcgggccagggcggtgaccgtgcaccgactgaaatggcgcctctgttccctggctgcgactacgagcactggctcatcgtcatggacaagcccgggggcgagggcgccaccaagcagcaaatgatagattgttacatccagacccttgcccaggtggtagggagtgaagaggaggcgaagaagaggatatataatgtgtcctgcgagcgctattttggattcggatgcgaaattgacgaggagacctccaacaaactcgaaggccttccaggggttctttttgtgcttcctgactcttacgttgatgctgagaacaaggattatggtgctgagttatttgtgaacggtgaaatcgttcagcgatctccagaaaggcagagaagggtggagccagtgcctcagagagctcaggatcgaccacggtacagtgaccggacccgctatgtgaagcggagggagaaccaatcttaccagagatgatgtttccgtctctgaagatgtaaaatgtcacggtttccacaagtgtccaaatgcggtactgaagatgcagcagcaactccccactactcatatgagaatggcatccgttctgtttgccgcgcattttaagctgtatatgcttattatgcatttgggcttgtacctcagtcgatatgaacgatgtatcctttgaactaacgcattataatttttgaaaccgttttagccagaaattaatcaactgttgatgattatcatatgatataccgcatgatcatctcggaaggggcccgtccgttcgatcgttcccctctcacaaactgctccagtactccaacccgttaaactgttgatggtgacatgatgccacattgccactggcagtcatatgcatgccgtcaccatcacattctggtagagataacggtgatgcaggcaaacgggacgcggagggtgcagcccgcgatctgtaacgtgtggcgcagcgggcgatctccgattcgctgccttatcctctgctactgccgcaccaaagcgtgagcaagcctgcctcccgcgagagcgctcaaccagccaagccggcgtcagaggcgagcagagaaatggcgggagcgaacttcctctccaccgcggcgctcgtcgcccgcggcgtcgctgcctgctcttctatttcaactccgacacggaggcacccgcaaatccgggtgtgctgccgggctgacgttgaggctatggaggcctatgcccatgaagagcgccttcgattccgtcggagagatttcatcggcacctgcgtcggcaccgctattggtttggaaatgatcgacggctctacgagtttctctggagtggctactgcagctgatctcattgagcgtagacaaaggtcggagttccaatcaaaaatcaaagacaccctttacgtagccataaaggctaagccagagctcgttccatcgttgttgaccatggcactgaatgatgccatgacatacgacaagaccacaaaaactggaggcgcaaatggatctatcaggctagaaacaagcagacctgagaacagtgggctctcttccgcgttggatttgctgactgaagccaaaaaggagatcgattccttttccaagggaggtcccatttcgtttgcagatctgatccagtttgcagcacaatcagcactgaagagatcgtttcttgacgctgccattgccaaatgtggtggaaatgaagagaagggaagaacactgtactctgcatatggttcaaatgggcagtggggtctgttcgatagaacgttcgggagagcagacgcacaggaagcagatccagagggaagagtgcctgactggagcaaggcttctgtgcaggagatgaaggataggttcgtcgctgttgggttgggtcctgaccaggctgctacggagggacgactgatagctgatccggattgccgtccatgggtggagaagtaccagcggagccgcgagaccgtctcccggactgactatgaggttgacctgataactacactcacaaagctgagctcccttggccagaagataaactacgaagcctacacataccctaagcagaagattgacctgggaaaactgaaactgtaagagatgattgccgggcacctgcatcggccgtatccaggaatcgggagctaattgtatggtaggctctgtctgctagagtgatttgattcggcgctgacgtccaagtattggctacttactggtcagctgtcagacattcttcccacggcaattaggatggtccctgtacatggttaaattggttctcccatttcgttttgtgtgaacttgaagaggcaaacgcttgtgagaagtgaggtgttgtgtcaatccccttacgtatacgagacgactgaagaattagtagaaaagaagtgcaagtgtcatgtcttgagtctgaagtctgagctcatgtttctgaattctgatcagaagcaggacagctggctcgtcattttgcttgcccatttctctgcctcgaccactcgcaccactgccgcaaataagaataacgtgatcgtcaaacatatacggaacgataagtagcaccccctttggtcaattacattacagtggctctataatctttctctgaagtctag

SEQ ID NO: 24166 - DNA, 3107 bp, Zea Mays
atctccgatcgtccgtgtccctcaccaaaagttcaaaaccccatccaattccaaatcccacttctcgccagttcacctccgcctccgctcctcccctccccctcccgtcctgccatggccaccgcagcacgcgccctcgtcgccgcacgcccggcacggccgctgctgccgtctcggcgcctcccgtcctcctcttccatccgtcccgcgcggcaacgtgctggcgtcgggtgcgtccgctgcatggctcggcggccggattccacctattccccgctgcgttcgggccagggcggtgaccgtgcaccgactgaaatggcgcctctgttccctggctgcgactacgagcactggctcatcgtcatggacaagcccgggggcgagggcgccaccaagcagcaaatgatagattgttacatccagacccttgcccaggtggtagggagtgaagaggaggcgaagaagaggatatataatgtgtcctgcgagcgctattttggattcggatgcgaaattgacgaggagacctccaacaaactcgaaggccttccaggggttctttttgtgcttcctgactcttacgttgatgctgagaacaaggattatggtctgagttatttgtgaacggtgaaatcgttcagcgatctccagaaaggcagagaagggtggagccagtgcctcagagagctcaggatcgaccacggtacagtgaccggacccgctatgtgaagcggagggagaaccaatcttaccagagatgatgtttccgtctctgaagatgtaaaatgtcacggtttccacaagtgtccaaatgcggtactgaagatgcagcagcaactccccactactcatatgagaatggcatccgttctgtttgccgcgcattttaagctgtatatgcttattatgcatttgggcttgtacctcagtcgatatgaacgatgtatcctttgaactaacgcattataatttttgaaaccgttttagccagaaattaatcaactgttgatgattatcatatgatataccgcatgatcatctcggaaggggcccgtccgttcgatcgttcccctctcacaaactgctccagtactccaacccgttaaactgttgatggtgacatgatgccacattgccactggcagtcatatgcatgccgtcaccatcacattctggtagagataacggtgatgcaggcaaacgggacgcggagggtgcagcccgcgatctgtaacgtgtggcgcagcgggcgatctccgattcgctgccttatcctctgctactgccgcaccaaagcgtgagcaagcctgcctcccgcgagagcgctcaaccagccaagccggcgtcagaggcgagcagagaaatggcgggagcgaacttcctctccaccgcggcgctcgtcgcccgcggcgtcgctgcctgctcttctatttcaactccgacacggaggcacccgcaaatccgggtgtgctgccgggctgacgttgaggctatggaggcctatgcccatgaagagcgccttcgattccgtcggagagatttcatcggcacctgcgtcggcaccgctattggtttggaaatgatcgacggctctacgagtttctctggagtggctactgcagctgatctcattgagcgtagacaaaggtcggagttccaatcaaaaatcaaagacaccctttacgtagccataaaggtgagacaccctagttccttgtgttttcctttcacctatctatcactctctgttgcctgaaacagtgatcctgataatcttttgaaggctaagccagagctcgttccatcgttgttgaccatggcactgaatgatgccatgacatacgacaaggtctggtctctgaatggctttgtatcgttagcatttgggtccctccgttggtttagagagctggtttaattcttctgcagaccacaaaaactggaggcgcaaatggatctatcaggctagaaacaagcagacctgagaacagtgggctctcttccgcgttggatttgctgactgaagccaaaaaggagatcgattccttttccaagggaggtcccatttcgtttgcagatctgatccagtttgcagcacaatcagcactgaagagatcgtttcttgacgctgccattgccaaatgtggtggaaatgaagagaagggaagaacactgtactctgcatatggttcaaatgggcagtggggtctgttcgatagaacgttcgggagagcagacgcacaggaagcagatccagagggaagagtgcctgactggagcaaggcttctgtgcaggagatgaaggataggttcgtcgctgttgggttgggtcctcgccagcttgctgttatgtcagcgttccttggacctgaccaggctgctacggagggacgactgatagctgatccggattgccgtccatgggtggagaagtaccagcggagccgcgagaccgtctcccggactgactatgaggttgacctgataactacactcacaaagctgagctcccttggccagaagataaactacgaagcctacacataccctaagcagaagattgacctgggaaaactgaaactgtaagagatgattgccgggcacctgcatcggccgtatccaggaatcgggagctaattgtatggtaggctctgtctgctagagtgatttgattcggcgctgacgtccaagtattggctacttactggtcagctgtcagacattcttcccacggcaattaggatggtccctgtacatggttaaattggttctcccatttcgttttgtgtgaacttgaagaggcaaacgcttgtgagaagtgaggtgttgtgtcaatccccttacgtatacgagacgactgaagaattagtagaaaagaagtgcaagtgtcatgtcttgagtctgaagtctgagctcatgtttctgaattctgatcagaagcaggacagctggctcgtcattttgcttgcccatttctctgcctcgaccactcgcaccactgccgcaaataagaataacgtgatcgtcaaacatatacggaacgataagtagcaccccctttggtcaattacattacagtggctctataatctttctctgaagtctag

SEQ ID NO: 24167 - DNA, 2905 bp, Zea Mays
atctccgatcgtccgtgtccctcaccaaaagttcaaaaccccatccaattccaaatcccacttctcgccagttcacctccgcctccgctcctcccctccccctcccgtcctgccatggccaccgcagcacgcgccctcgtcgccgcacgcccggcacggccgctgctgccgtctcggcgcctcccgtcctcctcttccatccgtcccgcgcggcaacgtgctggcgtcgggtgcgtccgctgcatggctcggcggccggattccacctattccccgctgcgttcgggccagggcggtgaccgtgcaccgactgaaatggcgcctctgttccctggctgcgactacgagcactggctcatcgtcatggacaagcccgggggcgagggcgccaccaagcagcaaatgatagattgttacatccagacccttgcccaggtggtagggagtgaagaggaggcgaagaagaggatatataatgtgtcctgcgagcgctattttggattcggatgcgaaattgacgaggagacctccaacaaactcgaaggccttccaggggttctttttgtgcttcctgactcttacgttgatgctgagaacaaggattatggtgctgagttatttgtgaacggtgaaatcgttcagcgatctccagaaaggcagagaagggtggagccagtgcctcagagagctcaggatcgaccacggtacagtgaccggacccgctatgtgaagcggagggagaaccaatcttaccagagatgatgtttccgtctctgaagatgtaaaatgtcacggtttccacaagtgtccaaatgcggtactgaagatgcagcagcaactccccactactcatatgagaatggcatccgttctgtttgccgcgcattttaagctgtatatgcttattatgcatttgggcttgtacctcagtcgatatgaacgatgtatcctttgaactaacgcattataatttttgaaaccgttttagccagaaattaatcaactgttgatgattatcatatgatataccgcatgatcatctcggaaggggcccgtccgttcgatcgttcccctctcacaaactgctccagtactccaacccgttaaactgttgatggtgacatgatgccacattgccactggcagtcatatgcatgccgtcaccatcacattctggtagagataacggtgatgcaggcaaacgggacgcggagggtgcagcccgcgatctgtaacgtgtggcgcagcgggcgatctccgattcgctgccttatcctctgctactgccgcaccaaagcgtgagcaagcctgcctcccgcgagagcgctcaaccagccaagccggcgtcagaggcgagcagagaaatggcgggagcgaacttcctctccaccgcggcgctcgtcgcccgcggcgtcgctgcctgctcttctatttcaactccgacacggaggcacccgcaaatccgggtgtgctgccgggctgacgttgaggctatggaggcctatgcccatgaagagcgccttcgattccgtcggagagatttcatcggcacctgcgtcggcaccgctattggtttggaaatgatcgacggctctacgagtttctctggagtggctactgcagctgatctcattgagcgtagacaaaggtcggagttccaatcaaaaatcaaagacaccctttacgtagccataaaggctaagccagagctcgttccatcgttgttgaccatggcactgaatgatgccatgacatacgacaagaccacaaaaactggaggcgcaaatggatctatcaggctagaaacaagcagacctgagaacagtgggctctcttccgcgttggatttgctgactgaagccaaaaaggagatcgattccttttccaagggaggtcccatttcgtttgcagatctgatccagtttgcagcacaatcagcactgaagagatcgtttcttgacgctgccattgccaaatgtggtggaaatgaagagaagggaagaacactgtactctgcatatggttcaaatgggcagtggggtctgttcgatagaacgttcgggagagcagacgcacaggaagcagatccagagggaagagtgcctgactggagcaaggcttctgtgcaggagatgaaggataggttcgtcgctgttgggttgggtcctcgccaggctgctacggagggacgactgatagctgatccggattgccgtccatgggtggagaagtaccagcggagccgcgagaccgtctcccggactgactatgaggttgacctgataactacactcacaaagctgagctcccttggccagaagataaactacgaagcctacacataccctaagcagaagattgacctgggaaaactgaaactgtaagagatgattgccgggcacctgcatcggccgtatccaggaatcgggagctaattgtatggtaggctctgtctgctagagtgatttgattcggcgctgacgtccaagtattggctacttactggtcagctgtcagacattcttcccacggcaattaggatggtccctgtacatggttaaattggttctcccatttcgttttgtgtgaacttgaagaggcaaacgcttgtgagaagtgaggtgttgtgtcaatccccttacgtatacgagacgactgaagaattagtagaaaagaagtgcaagtgtcatgtcttgagtctgaagtctgagctcatgtttctgaattctgatcagaagcaggacagctggctcgtcattttgcttgcccatttctctgcctcgaccactcgcaccactgccgcaaataagaataacgtgatcgtcaaacatatacggaacgataagtagcaccccctttggtcaattacattacagtggctctataatctttctctgaagtctag

SEQ ID NO: 24168 - DNA, 2996 bp, Zea Mays
gacggcccatgggagtgtcaatactcaataggctgaaggacaggacagcaaaaatatctccgatcgtccgtgtccctcaccaaaagttcaaaaccccatccaattccaaatcccacttctcgccagttcacctccgcctccgctcctcccctccccctcccgtcctgccatggccaccgcagcacgcgccctcgtcgccgcacgcccggcacggccgctgctgccgtctcggcgcctcccgtcctcctcttccatccgtcccgcgcggcaacgtgctggcgtcgggtgcgtccgctgcatggctcggcggccggattccacctattccccgctgcgttcgggccagggcggtgaccgtgcaccgactgaaatggcgcctctgttccctggctgcgactacgagcactggctcatcgtcatggacaagcccgggggcgagggcgccaccaagcagcaaatgatagattgttacatccagacccttgcccaggtggtagggagtgaagaggaggcgaagaagaggatatataatgtgtcctgcgagcgctattttggattcggatgcgaaattgacgaggagacctccaacaaactcgaaggccttccaggggttctttttgtgcttcctgactcttacgttgatgctgagaacaaggattatggtgctgagttatttgtgaacggtgaaatcgttcagcgatctccagaaaggcagagaagggtggagccagtgcctcagagagctcaggatcgaccacggtacagtgaccggacccgctatgtgaagcggagggagaaccaatcttaccagagatgatgtttccgtctctgaagatgtaaaatgtcacggtttccacaagtgtccaaatgcggtactgaagatgcagcagcaactccccactactcatatgagaatggcatccgttctgtttgccgcgcattttaagctgtatatgcttattatgcatttgggcttgtacctcagtcgatatgaacgatgtatcctttgaactaacgcattataatttttgaaaccgttttagccagaaattaatcaactgttgatgattatcatatgatataccgcatgatcatctcggaaggggcccgtccgttcgatcgttcccctctcacaaactgctccagtactccaacccgttaaactgttgatggtgacatgatgccacattgccactggcagtcatatgcatgccgtcaccatcacattctggtagagataacggtgatgcaggcaaacgggacgcggagggtgcagcccgcgatctgtaacgtgtggcgcagcgggcgatctccgattcgctgccttatcctctgctactgccgcaccaaagcgtgagcaagcctgcctcccgcgagagcgctcaaccagccaagccggcgtcagaggcgagcagagaaatggcgggagcgaacttcctctccaccgcggcgctcgtcgcccgcggcgtcgctgcctgctcttctatttcaactccgacacggaggcacccgcaaatccgggtgtgctgccgggctgacgttgaggctatggaggcctatgcccatgaagagcgccttcgattccgtcggagagatttcatcggcacctgcgtcggcaccgctattggtttggaaatgatcgacggctctacgagtttctctggagtggctactgcagctgatctcattgagcgtagacaaaggtcggagttccaatcaaaaatcaaagacaccctttacgtagccataaaggctaagccagagctcgttccatcgttgttgaccatggcactgaatgatgccatgacatacgacaagaccacaaaaactggaggcgcaaatggatctatcaggctagaaacaagcagacctgagaacagtgggctctcttccgcgttggatttgctgactgaagccaaaaaggagatcgattccttttccaagggaggtcccatttcgtttgcagatctgatccagtttgcagcacaatcagcactgaagagatcgtttcttgacgctgccattgccaaatgtggtggaaatgaagagaagggaagaacactgtactctgcatatggttcaaatgggcagtggggtctgttcgatagaacgttcgggagagcagacgcacaggaagcagatccagagggaagagtgcctgactggagcaaggcttctgtgcaggagatgaaggataggttcgtcgctgttgggttgggtcctcgccagcttgctgttatgtcagcgttccttggacctgaccaggctgctacggagggacgactgatagctgatccggattgccgtccatgggtggagaagtaccagcggagccgcgagaccgtctcccggactgactatgaggttgacctgataactacactcacaaagctgagctcccttggccagaagataaactacgaagcctacacataccctaagcagaagattgacctgggaaaactgaaactgtaagagatgattgccgggcacctgcatcggccgtatccaggaatcgggagctaattgtatggtaggctctgtctgctagagtgatttgattcggcgctgacgtccaagtattggctacttactggtcagctgtcagacattcttcccacggcaattaggatggtccctgtacatggttaaattggttctcccatttcgttttgtgtgaacttgaagaggcaaacgcttgtgagaagtgaggtgttgtgtcaatccccttacgtatacgagacgactgaagaattagtagaaaagaagtgcaagtgtcatgtcttgagtctgaagtctgagctcatgtttctgaattctgatcagaagcaggacagctggctcgtcattttgcttgcccatttctctgcctcgaccactcgcaccactgccgcaaataagaataacgtgatcgtcaaacatatacggaacgataagtagcaccccctttggtcaattacattacagtggctctataatctttctctgaagtctag

SEQ ID NO: 24169 - DNA, 3074 bp, Zea Mays
ctgccaagtgccaacaagtcgtcctagattcctcgcacacatgacgccctccttccccgccacgctctgcgctcctcctctcgctcctcctcttgtcctcacatacacaaacccctgtgcttgctaacgacgctcgcgttacaacttattacacctacgaccaggaggcggtaacgttacattcattctctcttcagcaagagctcgtctcactcgagcctaccactagccgtgtctttggccaccggatagctaggaagcggcgatcgccaggaaggaacgacgatgcaggggagctacggctacgacggggcggcgtcacgggaccccaagccgcggctgcgctggacgccggacctccaccagcgcttcgtcgacgccgtcaccaagctgggcggaccggacatccgaatccttcgctgcctggctttgcgcttctgccattgccaagtctatagcatgcagtcagaggaaaaggcagttccgttgacatgaccaaaaggaagttgaaaaaaaataggagcggtgcaaaaaaaaaaaactctggaaaaaggccgcgtcgccttgggaaaacgacaagtgcaattcctctcaaatcagagctctcaagtctgaacatccattctctagcttttcgagctcatataataatcatctgaatcttgcctcctccaacacaccaccgacatgcctacgctgtggagtactgaccatttcttgtgcttcctgcgaacaggagcaacacccaagtcggtgctcagattgatgggcatgaaagacctcactctttaccagttaaaaagccacctccaggtccgtctgacctctctttcttcaccgcctcagcgttacctaccagcactctccttttctgttgcaccactgtgccgaaacactgaggctcgtctgatgtgcgcagaagtatagactggggatacagggcaagaaaagcacaggcctggaacctgccagcggcggcgtacttcgctcacagggcttcggttcaaccacagcgcatcctcctccaggtgttcctgatcaagggaagaacacaaggtaactggcaattacctttacccgacaaatttctgcaagtggtaatacccgccttttgtgcacagcagaaggccagtagttattacaactaatatatactgcattcagtcaagtagacaggtgaagatgctagaaaatgttaccttgaaaaaaaaatgatcatacattcataccgttacaagcaagtgtatggggatttcctctctggaccttaagctgcaactcaaatatttcttgatctcaactcctatgctcaagtcataatgactgagacatgagtccttcttaattggtttattatcagaccatgtactattggactgcgagtatgggactgtagaggtgtaaccaaaagcaggaaaaattaaaaatccaaaaccaggattctgtctatcagtagatattaccatacaaactgcgtcgaagtgctaaagaatacaagttgcctaaagttctcctaagcatacttagcgctccacctgttacaagcaagtattcatgggctctcctgttacaaacatgtactccttccgtttttttatttatcatgttttagttcaaaaatgaactagcggacgacaaatattcgagaagggagcgagtattaacttacactaaatgcaagcaatttatatttcattttatttccaaaacattgtatgcaaacttccatatatagaagcccaggaatgtgaatcctattgaatgcctgttaattgactgcagtgggcccattttatttgattgaacttttctgcattgattgaactaaccatttgtatcacatttcttatgtgaatcagagaaatagcacttagcgatgcactaaggtatcaaattcaagtccaaaggaaactacaagaacaaactgaggtgcaaaagaagctgcagatgcgaattgaggcccaagggaagtacttaaagacaatactagagaaagctcagacaaatatttcctttcacacaaatgcatccaatggcatagaatcaaccagatcacagctcatggacttcaacctagatggtttcatgaacaatgcaactcaagtatgcaaagaacatagggagcaattggtgaaagctatgtccgatgaaaacgataaagatagtctaggccttcagctctaccatctaggaagtcaggaggctaaggaagtcaaatgcacaccaaaaactgaagactcgctcctactagacttaaatattaaaggaggatatgacctctcttctagaggaatgcaagcatgtgaactagaattgaaaataaatcagcagatagtataaatttgttcacaaagctgacagttttgggaagttcactctttgctattagattactatttttcccctgtggctcctgagcatgcttgtccaatgcccacaagctcacaagttttatttactatctgctcatgttatatttgctgaaagaagcttttgaataaatgtgggcattgttttaattcttgatatttacacatgtagaatgtggatagggataggagaatgagagagctccaacagtctaaactcaaggtgtatgcatatctagacatttagttacttcatcttgatgttcagttttccctgtttccctgaccaaacaatatacatacaccaaagctagaaagttgtatgagtgacaatagcaggacaactgaagcactgaagtgttgagtttgaattatctgcatataattcagtggtgttaacatgtcagccatatgtactaaaacttctgccattacttctgattgttaattgttattgaagcgtttttccatagttcacattatcgaactattaacttagttgtaatgtattaataccgagttacccacatttttttgaataataacactaatcaagtcaagatgtctcatttcttatgacataagattgtccaaatatttttccaggctttgcaacactcaaaacccctcaaaatcgttccacaaaaacaaaaacccaagttcctatactcctaagaaccaggaatattgagactctgctctttt

SEQ ID NO: 24170 - DNA, 3468 bp, Zea Mays
caaagatttccctcctcttgtccagtctgagtgctgctgctgctgctaggttttgccgttcacgtagcatagcatctgacgaaacgccaggatcagacggtattttctggtgaaaaattcgacgcgtcccaaccccagccgtgtgcttcttgttgccaattgtgatgtgggtggagccgccgtcttggcgcctgggcctcaatgagcggcggccgagtggcgcccccgggttggacctggaggcgtgatgcccgtccgctttgttcttgcattgcatctcgcacgcaccccggcccagctgccaagtgccaacaagtcgtcctagattcctcgcacacatgacgccctccttccccgccacgctctgcgctcctcctctcgctcctcctcttgtcctcacatacacaaacccctgtgcttgctaacgacgctcgcgttacaacttattacacctacgaccaggaggcggtaacgttacattcattctctcttcagcaagagctcgtctcactcgagcctaccactagccgtgtctttggccaccggatagctaggaagcggcgatcgccaggaaggaacgacgatgcaggggagctacggctacgacggggcggcgtcacgggaccccaagccgcggctgcgctggacgccggacctccaccagcgcttcgtcgacgccgtcaccaagctgggcggaccggacagtgagtcctcgctctcgttttccttccttcctcccgtacgttcccgtctatatgtagtgctcgtctagtcgtcttgtcttgatgaccccgtccgacaccaaggcgattgcttgatgagccgagacctctccagttcgccagtatggtgcttgtgctacagagcatgtcggtgtgcattctttttttttttttttttttgcagtccgaatccttcgctgcctggctttgcgcttctgccattgccaagtctatagcatgcagtcagaggaaaaggcagttccgttgacatgaccaaaaggaagttgaaaaaaaataggagcggtgcaaaaaaaaaaaactctggaaaaaggccgcgtcgccttgggaaaacgacaagtgcaattcctctcaaatcagagctctcaagtctgaacatccattctctagcttttcgagctcatataataatcatctgaatcttgcctcctccaacacaccaccgacatgcctacgctgtggagtactgaccatttcttgtgcttcctgcgaacaggagcaacacccaagtcggtgctcagattgatgggcatgaaagacctcactctttaccagttaaaaagccacctccagaagtatagactggggatacagggcaagaaaagcacaggcctggaacctgccagcggcggcgtacttcgctcacagggcttcggttcaaccacagcgcatcctcctccaggtgttcctgatcaagggaagaacacaaggtaactggcaattacctttacccgacaaatttctgcaagtggtaatacccgccttttgtgcacagcagaaggccagtagttattacaactaatatatactgcattcagtcaagtagacaggtgaagatgctagaaaatgttaccttgaaaaaaaaatgatcatacattcataccgttacaagcaagtgtatggggatttcctctctggaccttaagctgcaactcaaatatttcttgatctcaactcctatgctcaagtcataatgactgagacatgagtccttcttaattggtttattatcagaccatgtactattggactgcgagtatgggactgtagaggtgtaaccaaaagcaggaaaaattaaaaatccaaaaccaggattctgtctatcagtagatattaccatacaaactgcgtcgaagtgctaaagaatacaagttgcctaaagttctcctaagcatacttagcgctccacctgttacaagcaagtattcatgggctctcctgttacaaacatgtactccttccgtttttttatttatcatgttttagttcaaaaatgaactagcggacgacaaatattcgagaagggagcgagtattaacttacactaaatgcaagcaatttatatttcattttatttccaaaacattgtatgcaaacttccatatatagaagcccaggaatgtgaatcctattgaatgcctgttaattgactgcagtgggcccattttatttgattgaacttttctgcattgattgaactaaccatttgtatcacatttcttatgtgaatcagagaaatagcacttagcgatgcactaaggtatcaaattcaagtccaaaggaaactacaagaacaaactgaggtgcaaaagaagctgcagatgcgaattgaggcccaagggaagtacttaaagacaatactagagaaagctcagacaaatatttcctttcacacaaatgcatccaatggcatagaatcaaccagatcacagctcatggacttcaacctagatggtttcatgaacaatgcaactcaagtatgcaaagaacatagggagcaattggtgaaagctatgtccgatgaaaacgataaagatagtctaggccttcagctctaccatctaggaagtcaggaggctaaggaagtcaaatgcacaccaaaaactgaagactcgctcctactagacttaaatattaaaggaggatatgacctctcttctagaggaatgcaagcatgtgaactagaattgaaaataaatcagcagatagtataaatttgttcacaaagctgacagttttgggaagttcactctttgctattagattactatttttcccctgtggctcctgagcatgcttgtccaatgcccacaagctcacaagttttatttactatctgctcatgttatatttgctgaaagaagcttttgaataaatgtgggcattgttttaattcttgatatttacacatgtagaatgtggatagggataggagaatgagagagctccaacagtctaaactcaaggtgtatgcatatctagacatttagttacttcatcttgatgttcagttttccctgtttccctgaccaaacaatatacatacaccaaagctagaaagttgtatgagtgacaatagcaggacaactgaagcactgaagtgttgagtttgaattatctgcatataattcagtggtgttaacatgtcagccatatgtactaaaacttctgccattacttctgattgttaattgttattgaagcgtttttccatagttcacattatcgaactattaacttagttgtaatgtattaataccgagttacccacatttttttgaataataacactaatcaagtcaagatgtctcatttcttatgacataagattgtccaaatatttttccaggctttgcaacactcaaaacccctcaaaatcgttccacaaaaacaaaaacccaagttcctatactcctaagaaccaggaatattgagactctgctctttt

SEQ ID NO: 24171 - DNA, 1391 bp, Zea Mays
agtttaggaactatattaaatttgcaaaacaactgctaagtcaaatgaggtggatctgtttggcccaaacttgatggacgatttaattgatgcatctgcagcaactccagctacagacaatgctgcagaaccacaggttgatctgtttgctgatgcagattttcaatcggcaaccgcaagtacagagacagctgcaaatacagatgtcaaggcatcttttcctgcagcatttccaccacaggctgggtttattccaccaccaagtgccgggacatcttctgaagtaaatacttccgtatccaagaaggcagctccggaaccttttgatccttttggcgctattcctttgaacaattttgatggacctgacccatttggtggcttcagctcaaatgctggatcatctaccgcagcagcacccacccacggttctactggaaatatcagcacatcgaaccagaaccttcatgctgcatccgactttgctgcctttgtatcaaacaacgagggagcagcgaaagacccatttgatctttcttcgagtgccaatgttggaaaaacacctttggcagctcccaagatcgacgcatctgatttcggtgcatttgtatctagcaccgaggaagcagccaaggaccctctcgatctttcttcgggtagcaaccttggaaagacaggccaagcacccgcggcagcctccaagcctagcgcaaagaaagacaattttcaggtcaagtccggcatatgggcagactcgctgagccggggattgattgatctgaacataactgcaccgaagaaggtgaacctagctgatattggcatcgtcggtggccttggcgatgggtccgatgagaaggccctgccctcttggaccatgggcgccggatccggcctaggaatgtctggtattccaccgtcaacacaacaagctggtggcatcgagagcttggccaactacaacaagcatcatttcggcttcaaataggcctcgatctttcatactggaaaatacccgtcatctgcggtttcctcctctgtcggcctgcttcttacacgtgctgccctattgatttaatcacttttttgtttttggttttggtgatcacattacatggtgtcgaccaatcttggccccgtcttgtcacacgtgtatgttatttgtcgggtttgtgggtaagcatgcaactacatacacatcacaccccctgtgttccagctcgatgataggtggtatgttggccatgcagtttgtgtaaattccgtggcctgccttttctacttgatacagtactctacgcagcgatttgcagtgcttgagtttatattcaataataagagaacctatgccctttatgtcttgaattgtggctgatgctgtttgatgtatc

SEQ ID NO: 24172 - DNA, 1499 bp, Zea Mays
tattcactaagtagagcaaaaacagagttcaagggagatcacatgagtccctgggcttgtccttccacccaggaccttgttagtttaggaactatattaaatttgcaaaacaactgctaagtcaaatgaggtggatctgtttggcccaaacttgatggacgatttaattgatgcatctgcagcaactccagctacagacaatgctgcagaaccacaggttgatctgtttgctgatgcagattttcaatcggcaaccgcaagtacagagacagctgcaaatacagatgtcaaggtcaatgttgacctttttgcggaaaaggcatcttttcctgcagcatttccaccacaggctgggtttattccaccaccaagtgccgggacatcttctgaagtaaatacttccgtatccaagaaggcagctccggaaccttttgatccttttggcgctattcctttgaacaattttgatggacctgacccatttggtggcttcagctcaaatgctggatcatctaccgcagcagcacccacccacggttctactggaaatatcagcacatcgaaccagaaccttcatgctgcatccgactttgctgcctttgtatcaaacaacgagggagcagcgaaagacccatttgatctttcttcgagtgccaatgttggaaaaacacctttggcagctcccaagatcgacgcatctgatttcggtgcatttgtatctagcaccgaggaagcagccaaggaccctctcgatctttcttcgggtagcaaccttggaaagacaggccaagcacccgcggcagcctccaagcctagcgcaaagaaagacaattttcaggtcaagtccggcatatgggcagactcgctgagccggggattgattgatctgaacataactgcaccgaagaaggtgaacctagctgatattggcatcgtcggtggccttggcgatgggtccgatgagaaggccctgccctcttggaccatgggcgccggatccggcctaggaatgtctggtattccaccgtcaacacaacaagctggtggcatcgagagcttggccaactacaacaagcatcatttcggcttcaaataggcctcgatctttcatactggaaaatacccgtcatctgcggtttcctcctctgtcggcctgcttcttacacgtgctgccctattgatttaatcacttttttgtttttggttttggtgatcacattacatggtgtcgaccaatcttggccccgtcttgtcacacgtgtatgttatttgtcgggtttgtgggtaagcatgcaactacatacacatcacaccccctgtgttccagctcgatgataggtggtatgttggccatgcagtttgtgtaaattccgtggcctgccttttctacttgatacagtactctacgcagcgatttgcagtgcttgagtttatattcaataataagagaacctatgccctttatgtcttgaattgtggctgatgctgtttgatgtatc

SEQ ID NO: 24173 - DNA, 1869 bp, Zea Mays
gatctgttctttcaagttttgagtatgttgagcctaatggtaaagacgctggaataaatgtgaggaaaaaagtagaaaccattgtgggcatcataaatgacaaggagaaaataaaggccgtgagagataaagcagccagtaatcgtgataagtacattggactatcatccacaggcataacatataaatcaagctcagcctcatttggtagcaactgcagttcaggcgaacgttatgggagtatcagtggtacaaaggaagctgactcatacggtgatagttacagggacaaagaatctgttaaaacttccacaagcaatagcggcagtcggaaatttggcagcaagctgaggaaggatgcgaagcctgataggaggaatgaggattatagttcacccagctctttgagacccccatctaatacaaataacactgaggacgactttgatgacttcgatcctcgtggatcaaatggcaaaacaactgctaagtcaaatgaggtggatctgtttggcccaaacttgatggacgatttaattgatgcatctgcagcaactccagctacagacaatgctgcagaaccacaggttgatctgtttgctgatgcagattttcaatcggcaaccgcaagtacagagacagctgcaaatacagatgtcaaggtcaatgttgacctttttgcggaaaaggcatcttttcctgcagcatttccaccacaggctgggtttattccaccaccaagtgccgggacatcttctgaagtaaatacttccgtatccaagaaggcagctccggaaccttttgatccttttggcgctattcctttgaacaattttgatggacctgacccatttggtggcttcagctcaaatgctggatcatctaccgcagcagcacccacccacggttctactggaaatatcagcacatcgaaccagaaccttcatgctgcatccgactttgctgcctttgtatcaaacaacgagggagcagcgaaagacccatttgatctttcttcgagtgccaatgttggaaaaacacctttggcagctcccaagatcgacgcatctgatttcggtgcatttgtatctagcaccgaggaagcagccaaggaccctctcgatctttcttcgggtagcaaccttggaaagacaggccaagcacccgcggcagcctccaagcctagcgcaaagaaagacaattttcaggtcaagtccggcatatgggcagactcgctgagccggggattgattgatctgaacataactgcaccgaagaaggtgaacctagctgatattggcatcgtcggtggccttggcgatgggtccgatgagaaggccctgccctcttggaccatgggcgccggatccggcctaggaatgtctggtattccaccgtcaacacaacaagctggtggcatcgagagcttggccaactacaacaagcatcatttcggcttcaaataggcctcgatctttcatactggaaaatacccgtcatctgcggtttcctcctctgtcggcctgcttcttacacgtgctgccctattgatttaatcacttttttgtttttggttttggtgatcacattacatggtgtcgaccaatcttggccccgtcttgtcacacgtgtatgttatttgtcgggtttgtgggtaagcatgcaactacatacacatcacaccccctgtgttccagctcgatgataggtggtatgttggccatgcagtttgtgtaaattccgtggcctgccttttctacttgatacagtactctacgcagcgatttgcagtgcttgagtttatattcaataataagagaacctatgccctttatgtcttgaattgtggctgatgctgtttgatgtatc

SEQ ID NO: 24174 - DNA, 2561 bp, Zea Mays
gtatcctctcctctccggaactcctctctgctcacgagtaaagcctgccgctagcccgcgctctggacgtcgcctcctcccccaccccaccggctgtcgccgcccccgccgacgttacctccttacccgccgcaccccccccccccctgcccccccgtccttgccttggcggatctgcctgcctgtgccgcctggcgctgcctcttatcccgccggccgccgctgcctcacgttagctcctcccccatcgtatccggacctccgcgccgcccccacgcctccctgacttggtggatctgtccaccattcaccggaaacagttggtcgctgcctagcttgctgcagccactcctcgccggcgatggatttcatgaaggttttcgatcagactgtgcgtgaaataaagagggaggtcaatctgaaggtactcaaggtccccgagatcgagcagaaggtacttgatgcaacaagtgatgaaccgtggggcccccatggaagtgctctttcagaacttgcacacgctaccaagaagttcgctgagtgccagatggtaatgaatgtcctatggactaggttgtctgagagaggcgcgaattggcgtcatgtgtataaggcattaactattatcgagtactttatagccaatggttctgagagggcagttgatgacattcttgatcattattctaagatctcggttctttcaagttttgagtatgttgagcctaatggtaaagacgctggaataaatgtgaggaaaaaagtagaaaccattgtgggcatcataaatgacaaggagaaaataaaggccgtgagagataaagcagccagtaatcgtgataagtacattggactatcatccacaggcataacatataaatcaagctcagcctcatttggtagcaactgcagttcaggcgaacgttatgggagtatcagtggtacaaaggaagctgactcatacggtgatagttacagggacaaagaatctgttaaaacttccacaagcaatagcggcagtcggaaatttggcagcaagctgaggaaggatgcgaagcctgataggaggaatgaggattatagttcacccagctctttgagacccccatctaatacaaataacactgaggacgactttgatgacttcgatcctcgtggatcaaatggcaaaacaactgctaagtcaaatgaggtggatctgtttggcccaaacttgatggacgatttaattgatgcatctgcagcaactccagctacagacaatgctgcagaaccacaggttgatctgtttgctgatgcagattttcaatcggcaaccgcaagtacagagacagctgcaaatacagatgtcaaggtcaatgttgacctttttgcggaaaaggcatcttttcctgcagcatttccaccacaggctgggtttattccaccaccaagtgccgggacatcttctgaagtaaatacttccgtatccaagaaggcagctccggaaccttttgatccttttggcgctattcctttgaacaattttgatggacctgacccatttggtggcttcagctcaaatgctggatcatctaccgcagcagcacccacccacggttctactggaaatatcagcacatcgaaccagaaccttcatgctgcatccgactttgctgcctttgtatcaaacaacgagggagcagcgaaagacccatttgatctttcttcgagtgccaatgttggaaaaacacctttggcagctcccaagatcgacgcatctgatttcggtgcatttgtatctagcaccgaggaagcagccaaggaccctctcgatctttcttcgggtagcaaccttggaaagacaggccaagcacccgcggcagcctccaagcctagcgcaaagaaagacaattttcaggtcaagtccggcatatgggcagactcgctgagccggggattgattgatctgaacataactgcaccgaagaaggtgaacctagctgatattggcatcgtcggtggccttggcgatgggtccgatgagaaggccctgccctcttggaccatgggcgccggatccggcctaggaatgtctggtattccaccgtcaacacaacaagctggtggcatcgagagcttggccaactacaacaagcatcatttcggcttcaaataggcctcgatctttcatactggaaaatacccgtcatctgcggtttcctcctctgtcggcctgcttcttacacgtgctgccctattgatttaatcacttttttgtttttggttttggtgatcacattacatggtgtcgaccaatcttggccccgtcttgtcacacgtgtatgttatttgtcgggtttgtgggtaagcatgcaactacatacacatcacaccccctgtgttccagctcgatgataggtggtatgttggccatgcagtttgtgtaaattccgtggcctgccttttctacttgatacagtactctacgcagcgatttgcagtgcttgagtttatattcaataataagagaacctatgccctttatgtcttgaattgtggctgatgctgtttgatgtatc

SEQ ID NO: 24175 - DNA, 2506 bp, Zea Mays
gtatcctctcctctccggaactcctctctgctcacgagtaaagcctgccgctagcccgcgctctggacgtcgcctcctcccccaccccaccggctgtcgccgcccccgccgacgttacctccttacccgccgcaccccccccccccctgcccccccgtccttgccttggcggatctgcctgcctgtgccgcctggcgctgcctcttatcccgccggccgccgctgcctcacgttagctcctcccccatcgtatccggacctccgcgccgcccccacgcctccctgacttggtggatctgtccaccattcaccggaaacagttggtcgctgcctagcttgctgcagccactcctcgccggcgatggatttcatgaaggttttcgatcagactgtgcgtgaaataaagagggaggtcaatctgaaggtactcaaggtccccgagatcgagcagaagaacttgcacacgctaccaagaagttcgctgagtgccagatggtaatgaatgtcctatggactaggttgtctgagagaggcgcgaattggcgtcatgtgtataaggcattaactattatcgagtactttatagccaatggttctgagagggcagttgatgacattcttgatcattattctaagatctcggttctttcaagttttgagtatgttgagcctaatggtaaagacgctggaataaatgtgaggaaaaaagtagaaaccattgtgggcatcataaatgacaaggagaaaataaaggccgtgagagataaagcagccagtaatcgtgataagtacattggactatcatccacaggcataacatataaatcaagctcagcctcatttggtagcaactgcagttcaggcgaacgttatgggagtatcagtggtacaaaggaagctgactcatacggtgatagttacagggacaaagaatctgttaaaacttccacaagcaatagcggcagtcggaaatttggcagcaagctgaggaaggatgcgaagcctgataggaggaatgaggattatagttcacccagctctttgagacccccatctaatacaaataacactgaggacgactttgatgacttcgatcctcgtggatcaaatggcaaaacaactgctaagtcaaatgaggtggatctgtttggcccaaacttgatggacgatttaattgatgcatctgcagcaactccagctacagacaatgctgcagaaccacaggttgatctgtttgctgatgcagattttcaatcggcaaccgcaagtacagagacagctgcaaatacagatgtcaaggtcaatgttgacctttttgcggaaaaggcatcttttcctgcagcatttccaccacaggctgggtttattccaccaccaagtgccgggacatcttctgaagtaaatacttccgtatccaagaaggcagctccggaaccttttgatccttttggcgctattcctttgaacaattttgatggacctgacccatttggtggcttcagctcaaatgctggatcatctaccgcagcagcacccacccacggttctactggaaatatcagcacatcgaaccagaaccttcatgctgcatccgactttgctgcctttgtatcaaacaacgagggagcagcgaaagacccatttgatctttcttcgagtgccaatgttggaaaaacacctttggcagctcccaagatcgacgcatctgatttcggtgcatttgtatctagcaccgaggaagcagccaaggaccctctcgatctttcttcgggtagcaaccttggaaagacaggccaagcacccgcggcagcctccaagcctagcgcaaagaaagacaattttcaggtcaagtccggcatatgggcagactcgctgagccggggattgattgatctgaacataactgcaccgaagaaggtgaacctagctgatattggcatcgtcggtggccttggcgatgggtccgatgagaaggccctgccctcttggaccatgggcgccggatccggcctaggaatgtctggtattccaccgtcaacacaacaagctggtggcatcgagagcttggccaactacaacaagcatcatttcggcttcaaataggcctcgatctttcatactggaaaatacccgtcatctgcggtttcctcctctgtcggcctgcttcttacacgtgctgccctattgatttaatcacttttttgtttttggttttggtgatcacattacatggtgtcgaccaatcttggccccgtcttgtcacacgtgtatgttatttgtcgggtttgtgggtaagcatgcaactacatacacatcacaccccctgtgttccagctcgatgataggtggtatgttggccatgcagtttgtgtaaattccgtggcctgccttttctacttgatacagtactctacgcagcgatttgcagtgcttgagtttatattcaataataagagaacctatgccctttatgtcttgaattgtggctgatgctgtttgatgtatc

SEQ ID NO: 24176 - DNA, 2664 bp, Zea Mays
gtatcctctcctctccggaactcctctctgctcacgagtaaagcctgccgctagcccgcgctctggacgtcgcctcctcccccaccccaccggctgtcgccgcccccgccgacgttacctccttacccgccgcaccccccccccccctgcccccccgtccttgccttggcggatctgcctgcctgtgccgcctggcgctgcctcttatcccgccggccgccgctgcctcacgttagctcctcccccatcgtatccggacctccgcgccgcccccacgcctccctgacttggtggatctgtccaccattcaccggaaacagttggtcgctgcctaggtacccacctaccccctaggcgaggcggtaccccgtcgcccagcgcataagcgcgcccaggcgagcacggaatagctccttttcgaatacactcgggcgaagcttagatctgatctcaacgaacctgcagcttgctgcagccactcctcgccggcgatggatttcatgaaggttttcgatcagactgtgcgtgaaataaagagggaggtcaatctgaaggtactcaaggtccccgagatcgagcagaaggtacttgatgcaacaagtgatgaaccgtggggcccccatggaagtgctctttcagaacttgcacacgctaccaagaagttcgctgagtgccagatggtaatgaatgtcctatggactaggttgtctgagagaggcgcgaattggcgtcatgtgtataaggcattaactattatcgagtactttatagccaatggttctgagagggcagttgatgacattcttgatcattattctaagatctcggttctttcaagttttgagtatgttgagcctaatggtaaagacgctggaataaatgtgaggaaaaaagtagaaaccattgtgggcatcataaatgacaaggagaaaataaaggccgtgagagataaagcagccagtaatcgtgataagtacattggactatcatccacaggcataacatataaatcaagctcagcctcatttggtagcaactgcagttcaggcgaacgttatgggagtatcagtggtacaaaggaagctgactcatacggtgatagttacagggacaaagaatctgttaaaacttccacaagcaatagcggcagtcggaaatttggcagcaagctgaggaaggatgcgaagcctgataggaggaatgaggattatagttcacccagctctttgagacccccatctaatacaaataacactgaggacgactttgatgacttcgatcctcgtggatcaaatggcaaaacaactgctaagtcaaatgaggtggatctgtttggcccaaacttgatggacgatttaattgatgcatctgcagcaactccagctacagacaatgctgcagaaccacaggttgatctgtttgctgatgcagattttcaatcggcaaccgcaagtacagagacagctgcaaatacagatgtcaaggcatcttttcctgcagcatttccaccacaggctgggtttattccaccaccaagtgccgggacatcttctgaagtaaatacttccgtatccaagaaggcagctccggaaccttttgatccttttggcgctattcctttgaacaattttgatggacctgacccatttggtggcttcagctcaaatgctggatcatctaccgcagcagcacccacccacggttctactggaaatatcagcacatcgaaccagaaccttcatgctgcatccgactttgctgcctttgtatcaaacaacgagggagcagcgaaagacccatttgatctttcttcgagtgccaatgttggaaaaacacctttggcagctcccaagatcgacgcatctgatttcggtgcatttgtatctagcaccgaggaagcagccaaggaccctctcgatctttcttcgggtagcaaccttggaaagacaggccaagcacccgcggcagcctccaagcctagcgcaaagaaagacaattttcaggtcaagtccggcatatgggcagactcgctgagccggggattgattgatctgaacataactgcaccgaagaaggtgaacctagctgatattggcatcgtcggtggccttggcgatgggtccgatgagaaggccctgccctcttggaccatgggcgccggatccggcctaggaatgtctggtattccaccgtcaacacaacaagctggtggcatcgagagcttggccaactacaacaagcatcatttcggcttcaaataggcctcgatctttcatactggaaaatacccgtcatctgcggtttcctcctctgtcggcctgcttcttacacgtgctgccctattgatttaatcacttttttgtttttggttttggtgatcacattacatggtgtcgaccaatcttggccccgtcttgtcacacgtgtatgttatttgtcgggtttgtgggtaagcatgcaactacatacacatcacaccccctgtgttccagctcgatgataggtggtatgttggccatgcagtttgtgtaaattccgtggcctgccttttctacttgatacagtactctacgcagcgatttgcagtgcttgagtttatattcaataataagagaacctatgccctttatgtcttgaattgtggctgatgctgtttgatgtatc

SEQ ID NO: 24177 - DNA, 8424 bp, Zea Mays
cagtcttcgagcgcgatgagggaggagatggatttgggtgacatcgtgctctcctggtcggtgcaggagatcacgaacgacgacctctacaagacgaaggtggagaggatccctttcagctttggttctcttgatgactacttgcgatcatatatgacacctctgatcgaagaaacaagatcatgcctaaactcgtgccttgagctcattgcagaagcaccgtcttcgaaaatactttcctttaaagttgcagggaaatcaggattgcattctatggatgttgacttttgggacaatggtgctggtttttctaccgagacctacaccgctaggaacggtgacatatttgttttgtctaacatgaagcctgaagctgcagatgacttcaaccgctatggtttaacatattgcttggcaatggttactgaagtttctatgaatgatgaatatcagaagggcttcaaagtgaaagtttcaaatagtactggtttagaaggagactttagtaaacttgtgcatgcaacatttcttgataatataatggctaacatgcgtatatggaaagcactttgctttgactcaagcatgaataataattttacaataatcaagtcacttttagcccccagaaatatgggtgaagatgtctgttctgtctgtgctaaaaaggatgactgtttaatgtcttctgcagagctaccaccagttaatctaaatcagtcacaattggatgccattgaatctatcatctctgctgtaagatgtagacatttgaacctcacaaaacttatatggggcccaccaggtactggaaagaccaagactgttagtgctctattgtgggctttggcttgtttgaaatgccgaactcttacatgcactcccacaaatgttgctgttgttggtgtctgtactcgattccttcaaaatttgaaggaattcagcaagcagattgacatatgtggtctacctctttctcttggagatgttttgttattagggaacagggacaatatggacatttctgaggagatccaggaagttttcttggattatcgtgtggatgagcttacagagtgcttttcattattgtcaggatggaggcacataattgtttcaatgatatcattttttgaggaatgtggttctcgatacgatatgcttcttgaatgtgatggcggcagtgattctgtatgctttttggatttcctgaaaaagcagtttgatgttgcagcaaaagctgtaaagaaatgcatgatgactttgtgggttcaccttccaaagaagtgcttttcacatgaaaatgtcagcaatatatctatggtgttacgtttactagaaaaaattaatgccttcttatgtgatggagatttaactgatgagagtgcgaaaaggggatttgattttcgatcaactgagaactctatttatgagccaatatcttacattgagaaggaattaggtgatgcaaggtctctatgccttaaattgctgaaagatcttcagagttcacttaatttacctgttgcctctagttcttatcggttgcataatgcagagattgctccgcttgatatgttgattgttgatgaagctgctcaagtgaaagaatgtgaattggtgattccactacgtttgtgttggttgaaacatgttgttttggtgggggatgactgccagttgaggccactggttagaagccaagtatgcaaggaagctggatttggaatcagtctttttgagagattagtcatactgaattttgaaaagcatttgctgaatatacagtatcgcatgagcccttgtatcagcttatttccaaatgctaaattttatgacaaaaagattttagatggtcccaatgtccattcttcctacaacaaggattgcactggccttctttttggtagctatgctttcataaatatcactgacgggagggaacaaaaggaaggtgcaggaaacagttggcagaacttggttgaagttgctgttgttatgcacttgatccgaaccatctttaaatcttggagaaagagagaccaagggattagcattggtgtagtttcaccttacagttctcaagttgccgctatcaaagatagacttgggaaaaagtatgatacatctgacaactttcatgtcagggtcaagtcaattgatggtttccaaggagaagaggatgacattatcatactatcaacagttagatccaacgagaggggcaatgttggatttcttgctgacatccaacgaacaaatgttgctcttacaagagcaaggcattgtctctggattcttgggaatgctaatacactgtataaaagtgggacagtctggacagaccttgtttctgatgcgcagagacgtaaatgtatttccaatgccactactgaccctgaattgtgtaagttgattttgcatgtaaagaatgaacttgatgaactcgatgatctactttgttccagctcagcagttttcagcaataccagatggaaggttgttctgagcgacaactttagaaggtctttcatgaaactaaaatctccactcctaaagaaggaggtactccaaaagcttgttaaacttggtggtggttggcggataccaataaagaatcttgatgtgactgatgctttccagcttgcaaaagcatacaggatcagagatctgtatcttgtttggagtattgatctagaaaaaaacgaaagatacttccagatgataagagtatgggaccttttgtcacagcagcatgtcgctagaactgttcaacatctggaaaatctcttctccatgtatacagatgaataccttgaccactgcagaagtgtgcagacagaagggaagctggagtttcctatagtttgggatgctgaacatgatattgttcggtataagaaggactgcaaagttgatgatcaagtagatcatgatcacttggacttctcatgtgccttggagaacacaaaagttagtgaaagcttcttgctgatgaaattttactctttatcatctggtgtagcacatcatttgctgacagctactgatgggactgaaattgagatcccctttgaactaactgatgaagaggaggcgataattcgatttccactcactagtttcattcttgggaggtcaggcactgggaaaaccactgttttgacaatgaaactgtatcaaattgagcaacactcctttattgcatctcaagggatagagttggaagttgatttatctgtggttgatccaaaagataggttggcaatggatacaagaaaaggagaaagttttgtaaaacaagtccttatcaccgtaagccctaagctttgttcagctataaaaaatcacatttgcagacttaaaaggttttgctctggtgatgtttctgaccagcccaaccctcttcatatgtatgatgtaattgacgaccccgaagagtttacagatgtacctgataattttagtgatctacagcatgagcactatcctcttacaataacataccgtaaattcttgatgatgcttgatggaacaatgaagagttcattttttgatatgttctatggagatttcaatcctagcattgagagaggtcattccaaaactcgagctatgcaagcttttattgaatcaaaagaagttacatttgagaagtttgctgctttctattggccccatttcaatggagaactaacgaagaaacttgatgcatccactgtcttcactgaaataatttctcacataaagggtggatacagagctaacatgccgtgcagtggcaagcttgaaaggcttgattatgtgatgctctctgataaaagattttcatctctaaacagtaaaatgagagagaaaatttatgatgttttccttgattatgagagtatgaagcgcactgctagggaatttgatttgtcggattttgtcaacagtcttcacagaagtctagtttctgagggctacaatggggctttagtggatttcatttacatagacgaggtgcaggatcttaccatgtcacaaatagcacttctcaagtatgtctgcagaaactttaaggagggctttgtttttgctggtgacacggcacaaactatagcaaggggtgttgatttcaggtttgaagatgttcgctcactgttttatacctcatttatatcagaaagtgaagcatgcaaccaagtgattaaacatggaaatcatgctcatctcacggatatgttccaactaagtcagaattttcgcacacattgtggtgttcttcgtatggctcagagtataatgagccttctgtactactttttcccatcatgtgttgacaagcttaatccagaaactgggcttgtatacggtgaagcgcctgttctcttggagtctggtaacgatgagaatgcaattatgactatttttggagaaagtagaggtgaacatgctgaccagcatggttttggtgctgagcaagtcatattggttcgtgatgttgcaacgaagaaacaaattgttaacctcgttggtaaacaagctcttgtcttgactattgtcgaatgcaagggccttgaattccaggacgtgctactctacaacttttttagttcatcgccattacggaataaatggagggtagtatatgactacatgaaaacaagagatgttacgtcatcatctgaagttatatctcatcctggtttcgatagaaacaagcattatctactatgttcagaactgaagcagctgtatgtcgctatcacacgaactaggcaaagactctggatatgtgaaaatgctgatgactactgtcaaccaatgtttgactattggaagaaattgtgcattgtagaggttaggctacttgattcctcactgattcaagcaatgcagacagggagcagtactgatgattggaggttaagaggtaccaagttgtttaatgaggggcaatttgagatggcaacaatgtgctttgaaaaggctggtgatgcatatagagagaactgggcaagagcagctggactacttgcaactgctgaccgtgtcatctccacaaatttagaaaggggccaagctaacttgcagaaagcatcagagatttatgagtctattggcatgcatgagaaagctgccacttgctacatcaaactaggtgactacaaaagagcaggaatgatatatatggaaaaatttggaactaaaaggcttgaagatgctggagactgttttgctattactgaatgctggtcactggcagcagaagtttacttcagagctaggtgttatacaaagtgtttctcctgctgctcaaaaggtaaagcattgagtctgggccttcaattcctgcgacagttagaaaaggaacagtgtgagaattttagttcggactttgttgctgttagaaagacatatctcgaaagctgtgctctgcattattttaaatgtggagacataaagcacatgatgccatatgtcaaggctttcaacaatgtggatcacattcgtgcattcttgagttctaggaatcttttggatgaattgttgagtatagagatggaaatgggtaattttcttgaagctgcaggtatagcacagcgtaaaggtgatgtcttattggaggtaaacatactagagaaagcagagtcatttgtaaatgctacacaccttctcctcctctatgtcacagcgaattccttgtggtctccacacagtagaggatggcctccagaaagttttgaaaagaaggaacaattgcttacaaaagttaaagaaatggcgaagaaagtatctgaagactttttctgccttgcttgctttgaagcagacttgttgtcagattcccatagatctcttgccagcttgacctgtagcttgcttgagggtagaaaatgtggaaacatgttagttgaacttatttctgctcgttacattattgatgttcatcttcagtctcaaacctctagatataaccttgagttagagccagtatctgatcagctgtgctataatatgatggcttgtgatcagatgtcgttggaaacactgtcctgtatttggaaccagtggaaattgattttagtcaaagtgcttgctcatcttaatccttctgaggatattaaatctaatgattctgcagctgtgtgtgaagacctttgtgctaaattattcgggttgagaaaagacagtgacaaccgatatgtggtacttaatgtggactctggttggcttactaacacaggcagaagttctttggaacaagatggcaacagatgttggctgcatactgtgcattgtcagtcatgtgctcggacttttatggtaaatgagctttcttctgttggccttagtgtccttcgtaagttggaatctattattgaaacttctagggagatagcatcatctccatatgcccagtggagaagtattgttatcttatatgaaattgcaatgtttctaaaagagttctgtttggcaaattctttaagaaaaacggtcaatttctgtgaacagaaattttttgaattactttttcgggcctggggggatgaaacagcagagtgcttttccgacatacttgactcatctcctgcatatggtttgattgtggattctgttggctcatatactatggcagggaatcagaatttgactcatggtcatcttggaagaatagccatgtttcttctttacacagcaaaatatggtgatatgctgaatttaacacttgaacaatacctgaatcgtgacgctgagtgggcacaattttttcaatctttgaagagttttcttgacactggtgttggaagatgctcattggtccagacctttaaagtggctcttgaatttactaccaatgtaaaatggtggattgagaaggattatatgtctccaatatgctatatgaatttaatggaatgtcttggtttttttgcaatgtcctgttttatggttaatggctgtgcgctttgcacaaaatctctgttggttaagatgctaaagtgccgtacaagcaaggctttcttaggtaattgcctggtttctggtctgggtgaccaggatatggatctggactgtatgacattctcaccaggggtattcatatgccagtcaattaggtctattttgacaaacaagcatgctattcaagagtggattcgggaaatagctccagcaattagatacgttccagtccttctgagactagtaatcatgctttatctgctgactttaactcttcagttgggggactgctatgaggtcacagattttcttgctaagcacagaatttttgaggatttacctcctgatttctccaagaagattgtacctactctgaaatttagaaatggtacagtagcacacttcacaagagtatttggtgatgcacttgctgcaattggagacaccatggtcattcttggtttgcccaaaggcccgctaattagctcaggcttaaaagcttatagatttagctatactgatttgagtgatattagcaaagtaatggcattactttgtccagaagagcagaaattttccatgcaaaaagatacaaaagcttggaatgatacttgtggaaatttgtctattgctagaatacaagataatgagatggtcagtagaattgaaacgcatttgagtgatgagagtattaccttttgggagaagtttgagtcgtttcaagtctttatgcatgaccagaaggactcaagggttattattctattccttgaaagtcttctttcttggcttgagcgtcgagaccttccagaaaatatggatgttcaattattcgtagagatcaggcacatatgcagtcaatttcaagagaagtatcttagggataagaaagtttatctaactgtcgaagacctttactcgacgtgggatgatggggagaacaagctgcagaagatcatcagtttcctgcggtatgagaaaacttcgggaaaagaatctgtcaaaaggaaggacaaagcacctgctgcccagttccccacgcacatggctgatgaatggagtggatgctctgataatgatgaacctgacacagcagggatggacgcggtggaaccagccaaggaagaagatgtaacgtcttgttcgactgcgactgcaactgcaacaaagagaacgcagaacaagaagggcaagaagaaatcaaggaagcggggcggcaagaagtgagcttgcttttagcccgtagccctgctcagctctagaagcatttgatatgagactttttttaatgtactgaagaactactttggcttgaactattactgcttgttctagtctgttttgtactactttggcttgaacagcggtttttagtttcaagtaaccgtgccaggtattcgttgcctcagctactagattttgtaggataaatggttaaccaacatatcttttagtgagcagtttctaaacctt

SEQ ID NO: 24178 - DNA, 8703 bp, Zea Mays
cgaaaagggactgacgagtgacggactcgaagcccgaggagacgaggccacggccgcggaacagaggggagagacgaaccgcctcctcacttcctcagtactcatttctttcacgagaagcaaaagatcatttaaaccccaccactctgatcacctatgcggctttccactgagcatcagtcgcactgccttcacttcacttgcagcaactcctcgagttcgacgcccctccatcccttccctgctactgtgaatatatgcggcctgctcgtccttgcgcgagcgggtgaacagtcttcgagcgcgatgagggaggagatggatttgggtgacatcgtgctctcctggtcggtgcaggagatcacgaacgacgacctctacaagacgaaggtggagaggatccctttcagctttggttctcttgatgactacttgcgatcatatatgacacctctgatcgaagaaacaagatcatgcctaaactcgtgccttgagctcattgcagaagcaccgtcttcgaaaatactttcctttaaagttgcagggaaatcaggattgcattctatggatgttgacttttgggacaatggtgctggtttttctaccgagacctacaccgctaggaacggtgacatatttgttttgtctaacatgaagcctgaagctgcagatgacttcaaccgctatggtttaacatattgcttggcaatggttactgaagtttctatgaatgatgaatatcagaagggcttcaaagtgaaagtttcaaatagtactggtttagaaggagactttagtaaacttgtgcatgcaacatttcttgataatataatggctaacatgcgtatatggaaagcactttgctttgactcaagcatgaataataattttacaataatcaagtcacttttagcccccagaaatatgggtgaagatgtctgttctgtctgtgctaaaaaggatgactgtttaatgtcttctgcagagctaccaccagttaatctaaatcagtcacaattggatgccattgaatctatcatctctgctgtaagatgtagacatttgaacctcacaaaacttatatggggcccaccaggtactggaaagaccaagactgttagtgctctattgtgggctttggcttgtttgaaatgccgaactcttacatgcactcccacaaatgttgctgttgttggtgtctgtactcgattccttcaaaatttgaaggaattcagcaagcagattgacatatgtggtctacctctttctcttggagatgttttgttattagggaacagggacaatatggacatttctgaggagatccaggaagttttcttggattatcgtgtggatgagcttacagagtgcttttcattattgtcaggatggaggcacataattgtttcaatgatatcattttttgaggaatgtggttctcgatacgatatgcttcttgaatgtgatggcggcagtgattctgtatgctttttggatttcctgaaaaagcagtttgatgttgcagcaaaagctgtaaagaaatgcatgatgactttgtgggttcaccttccaaagaagtgcttttcacatgaaaatgtcagcaatatatctatggtgttacgtttactagaaaaaattaatgccttcttatgtgatggagatttaactgatgagagtgcgaaaaggggatttgattttcgatcaactgagaactctatttatgagccaatatcttacattgagaaggaattaggtgatgcaaggtctctatgccttaaattgctgaaagatcttcagagttcacttaatttacctgttgcctctagttcttatcggttgcataatgcagagattgctccgcttgatatgttgattgttgatgaagctgctcaagtgaaagaatgtgaattggtgattccactacgtttgtgttggttgaaacatgttgttttggtgggggatgactgccagttgaggccactggtatgcaaggaagctggatttggaatcagtctttttgagagattagtcatactgaattttgaaaagcatttgctgaatatacagtatcgcatgagcccttgtatcagcttatttccaaatgctaaattttatgacaaaaagattttagatggtcccaatgtccattcttcctacaacaaggattgcactggccttctttttggtagctatgctttcataaatatcactgacgggagggaacaaaaggaaggtgcaggaaacagttggcagaacttggttgaagttgctgttgttatgcacttgatccgaaccatctttaaatcttggagaaagagagaccaagggattagcattggtgtagtttcaccttacagttctcaagttgccgctatcaaagatagacttgggaaaaagtatgatacatctgacaactttcatgtcagggtcaagtcaattgatggtttccaaggagaagaggatgacattatcatactatcaacagttagatccaacgagaggggcaatgttggatttcttgctgacatccaacgaacaaatgttgctcttacaagagcaaggcattgtctctggattcttgggaatgctaatacactgtataaaagtgggacagtctggacagaccttgtttctgatgcgcagagacgtaaatgtatttccaatgccactactgaccctgaattgtgtaagttgattttgcatgtaaagaatgaacttgatgaactcgatgatctactttgttccagctcagcagttttcagcaataccagatggaaggttgttctgagcgacaactttagaaggtctttcatgaaactaaaatctccactcctaaagaaggaggtactccaaaagcttgttaaacttggtggtggttggcggataccaataaagaatcttgatgtgactgatgctttccagcttgcaaaagcatacaggatcagagatctgtatcttgtttggagtattgatctagaaaaaaacgaaagatacttccagatgataagagtatgggaccttttgtcacagcagcatgtcgctagaactgttcaacatctggaaaatctcttctccatgtatacagatgaataccttgaccactgcagaagtgtgcagacagaagggaagctggagtttcctatagtttgggatgctgaacatgatattgttcggtataagaaggactgcaaagttgatgatcaagtagatcatgatcacttggacttctcatgtgccttggagaacacaaaagttagtgaaagcttcttgctgatgaaattttactctttatcatctggtgtagcacatcatttgctgacagctactgatgggactgaaattgagatcccctttgaactaactgatgaagaggaggcgataattcgatttccactcactagtttcattcttgggaggtcaggcactgggaaaaccactgttttgacaatgaaactgtatcaaattgagcaacactcctttattgcatctcaagggatagagttggaagttgatttatctgtggttgatccaaaagataggttggcaatggatacaagaaaaggagaaagttttgtaaaacaagtccttatcaccgtaagccctaagctttgttcagctataaaaaatcacatttgcagacttaaaaggttttgctctggtgatgtttctgaccagcccaaccctcttcatatgtatgatgtaattgacgaccccgaagagtttacagatgtacctgataattttagtgatctacagcatgagcactatcctcttacaataacataccgtaaattcttgatgatgcttgatggaacaatgaagagttcattttttgatatgttctatggagatttcaatcctagcattgagagaggtcattccaaaactcgagctatgcaagcttttattgaatcaaaagaagttacatttgagaagtttgctgctttctattggccccatttcaatggagaactaacgaagaaacttgatgcatccactgtcttcactgaaataatttctcacataaagggtggatacagagctaacatgccgtgcagtggcaagcttgaaaggcttgattatgtgatgctctctgataaaagattttcatctctaaacagtaaaatgagagagaaaatttatgatgttttccttgattatgagagtatgaagcgcactgctagggaatttgatttgtcggattttgtcaacagtcttcacagaagtctagtttctgagggctacaatggggctttagtggatttcatttacatagacgaggtgcaggatcttaccatgtcacaaatagcacttctcaagtatgtctgcagaaactttaaggagggctttgtttttgctggtgacacggcacaaactatagcaaggggtgttgatttcaggtttgaagatgttcgctcactgttttatacctcatttatatcagaaagtgaagcatgcaaccaagtgattaaacatggaaatcatgctcatctcacggatatgttccaactaagtcagaattttcgcacacattgtggtgttcttcgtatggctcagagtataatgagccttctgtactactttttcccatcatgtgttgacaagcttaatccagaaactgggcttgtatacggtgaagcgcctgttctcttggagtctggtaacgatgagaatgcaattatgactatttttggagaaagtagaggtgaacatgctgaccagcatggttttggtgctgagcaagtcatattggttcgtgatgttgcaacgaagaaacaaattgttaacctcgttggtaaacaagctcttgtcttgactattgtcgaatgcaagggccttgaattccaggacgtgctactctacaacttttttagttcatcgccattacggaataaatggagggtagtatatgactacatgaaaacaagagatgttacgtcatcatctgaagttatatctcatcctggtttcgatagaaacaagcattatctactatgttcagaactgaagcagctgtatgtcgctatcacacgaactaggcaaagactctggatatgtgaaaatgctgatgactactgtcaaccaatgtttgactattggaagaaattgtgcattgtagaggttaggctacttgattcctcactgattcaagcaatgcagacagggagcagtactgatgattggaggttaagaggtaccaagttgtttaatgaggggcaatttgagatggcaacaatgtgctttgaaaaggctggtgatgcatatagagagaactgggcaagagcagctggactacttgcaactgctgaccgtgtcatctccacaaatttagaaaggggccaagctaacttgcagaaagcatcagagatttatgagtctattggcatgcatgagaaagctgccacttgctacatcaaactaggtgactacaaaagagcaggaatgatatatatggaaaaatttggaactaaaaggcttgaagatgctggagactgttttgctattactgaatgctggtcactggcagcagaagtttacttcagagctaggtgttatacaaagtgtttctcctgctgctcaaaaggtaaagcattgagtctgggccttcaattcctgcgacagttagaaaaggaacagtgtgagaattttagttcggactttgttgctgttagaaagacatatctcgaaagctgtgctctgcattattttaaatgtggagacataaagcacatgatgccatatgtcaaggctttcaacaatgtggatcacattcgtgcattcttgagttctaggaatcttttggatgaattgttgagtatagagatggaaatgggtaattttcttgaagctgcaggtatagcacagcgtaaaggtgatgtcttattggaggtaaacatactagagaaagcagagtcatttgtaaatgctacacaccttctcctcctctatgtcacagcgaattccttgtggtctccacacagtagaggatggcctccagaaagttttgaaaagaaggaacaattgcttacaaaagttaaagaaatggcgaagaaagtatctgaagactttttctgccttgcttgctttgaagcagacttgttgtcagattcccatagatctcttgccagcttgacctgtagcttgcttgagggtagaaaatgtggaaacatgttagttgaacttatttctgctcgttacattattgatgttcatcttcagtctcaaacctctagatataaccttgagttagagccagtatctgatcagctgtgctataatatgatggcttgtgatcagatgtcgttggaaacactgtcctgtatttggaaccagtggaaattgattttagtcaaagtgcttgctcatcttaatccttctgaggatattaaatctaatgattctgcagctgtgtgtgaagacctttgtgctaaattattcgggttgagaaaagacagtgacaaccgatatgtggtacttaatgtggactctggttggcttactaacacaggcagaagttctttggaacaagatggcaacagatgttggctgcatactgtgcattgtcagtcatgtgctcggacttttatggtaaatgagctttcttctgttggccttagtgtccttcgtaagttggaatctattattgaaacttctagggagatagcatcatctccatatgcccagtggagaagtattgttatcttatatgaaattgcaatgtttctaaaagagttctgtttggcaaattctttaagaaaaacggtcaatttctgtgaacagaaattttttgaattactttttcgggcctggggggatgaaacagcagagtgcttttccgacatacttgactcatctcctgcatatggtttgattgtggattctgttggctcatatactatggcagggaatcagaatttgactcatggtcatcttggaagaatagccatgtttcttctttacacagcaaaatatggtgatatgctgaatttaacacttgaacaatacctgaatcgtgacgctgagtgggcacaattttttcaatctttgaagagttttcttgacactggtgttggaagatgctcattggtccagacctttaaagtggctcttgaatttactaccaatgtaaaatggtggattgagaaggattatatgtctccaatatgctatatgaatttaatggaatgtcttggtttttttgcaatgtcctgttttatggttaatggctgtgcgctttgcacaaaatctctgttggttaagatgctaaagtgccgtacaagcaaggctttcttaggtaattgcctggtttctggtctgggtgaccaggatatggatctggactgtatgacattctcaccaggggtattcatatgccagtcaattaggtctattttgacaaacaagcatgctattcaagagtggattcgggaaatagctccagcaattagatacgttccagtccttctgagactagtaatcatgctttatctgctgactttaactcttcagttgggggactgctatgaggtcacagattttcttgctaagcacagaatttttgaggatttacctcctgatttctccaagaagattgtacctactctgaaatttagaaatggtacagtagcacacttcacaagagtatttggtgatgcacttgctgcaattggagacaccatggtcattcttggtttgcccaaaggcccgctaattagctcaggcttaaaagcttatagatttagctatactgatttgagtgatattagcaaagtaatggcattactttgtccagaagagcagaaattttccatgcaaaaagatacaaaagcttggaatgatacttgtggaaatttgtctattgctagaatacaagataatgagatggtcagtagaattgaaacgcatttgagtgatgagagtattaccttttgggagaagtttgagtcgtttcaagtctttatgcatgaccagaaggactcaagggttattattctattccttgaaagtcttctttcttggcttgagcgtcgagaccttccagaaaatatggatgttcaattattcgtagagatcaggcacatatgcagtcaatttcaagagaagtatcttagggataagaaagtttatctaactgtcgaagacctttactcgacgtgggatgatggggagaacaagctgcagaagatcatcagtttcctgcggtatgagaaaacttcgggaaaagaatctgtcaaaaggaaggacaaagcacctgctgcccagttccccacgcacatggctgatgaatggagtggatgctctgataatgatgaacctgacacagcagggatggacgcggtggaaccagccaaggaagaagatgtaacgtcttgttcgactgcgactgcaactgcaacaaagagaacgcagaacaagaagggcaagaagaaatcaaggaagcggggcggcaagaagtgagcttgcttttagcccgtagccctgctcagctctagaagcatttgatatgagactttttttaatgtactgaagaactactttggcttgaactattactgcttgttctagtctgttttgtactactttggcttgaacagcggtttttagtttcaagtaaccgtgccaggtattcgttgcctcagctactagattttgtaggataaatggttaaccaacatatcttttagtgagcagtttctaaacctt

SEQ ID NO: 24179 - DNA, 1764 bp, Zea Mays
atgcggtggctacccaggctgctctctcactccatcgaggtcgggagggcctccgcggcggggaggtccaaccctagtctcgtcaaggcaggatcccatgggttcgccagcggcggctgggatgggtcaccagcggtgccccgggagtggctgcggaagctgtgggtagacgtgctgaagaagcagaaggaggacgcgaggaggtggggcatcggcgcgtcacccgggaacgccggcagcggtgcggagccttcgctatgcgcgttcgcgaattctgtggaggctgcaggagcgaccagggaggcaccttcaaggagctatcagtacgaatacaggggtctcgccggctactcagaacaagacggccatttgttgcagaaataacggatgctatgggtaacgagatatttaaggttcgtaggccattttggtggatcaacagctcaatttatgcagaagtggatggtaaggagataggcgtagtccacaggcgttggcacctttggcagagaatctatgacctgtacttagggaataggcaatttgcagttgttgagaatccaggattctggaactggacctttagcctagtggatgaagatgacaaactgttggctcagattgatcgtaattggaggggcatcggctttgagctcttcacggatgctggccagtatgctatccggtttggtgatgatgtacaaagcgacaagtttgctcacttaccgtttattatatctgggtatgtgggtgcccacttttcccagttagttaatgtctcacaaaagctccagaccaaagaattgcatgttgttcgccagctgactttgcctgaaagggtagtggctcttgctctcgccatttccttggacagtgattacttctctagaagaggtggctgaggacttccgtttctgattgccacggagtaggcacacgaaccaccatctgccgtatacaaggaatttctttattctcgttcctgaagaggctagcagttacactcattactgttgtcagggtgcaacatgttcagtgttctacaccagattaactccattgcattttttttaaagttaagcaacctatacagagacaccctaataatatgttgaatgataagatcatggcatcgtgctatgtgtttctacaattggctgctctgctttcatttgtacaatcagagagaacggtaacccaagattacagtgtcctggtctgctgaagaacaaccgagatggaaagagctaaaatcctaatttggcatccatgcctcctgaaaatcttaagacgggcatagtaagtaagtcctgagaatgtgatttacagttttagcaatgtcttgcttgatctcctgagtggaaagcacgttcaaccaaatcatgtgtcctggtgtaccaatggtgagcatcacgtagacacgattggccatcgccacgacacggacaggagaacgtgcttgtgctgctcgcgctctgtaaggaactaaatgatttcactatatgtggttctttgaagtttcggttaatagaccttatgctaattcactacttcaaaagcaaaaatatggagatgatgattaaatacataggtagtcatttgtaacttatttttgctattgatatagttgtggcacattcatgtatgagagtttgtgaaaatattccatctgaactgccagatcctacatcttcatttcttaacagacagacaagttctttagaacctggtgatttcacaagtcctctcttcagtggcttcttt

SEQ ID NO: 24180 - DNA, 3834 bp, Zea Mays
atgcggtggctacccaggctgctctctcactccatcgaggtcgggagggcctccgcggcggggaggtccaaccctagtctcgtcaaggcaggatcccatgggttcgccagcggcggctgggatgggtcaccagcggtgccccgggagtggctgcggaagctgtgggtagacgtgctgaagaagcagaaggaggacgcgaggaggtggggcatcggcgcgtcacccgggaacgccggcagcggtgcggagccttcgctatgcgcgttcgcgaattctgtggaggctgcaggagcgaccagggaggcaccttcaaggagctatcagtacgaatacaggggtctcgccggctactcagaacaagacggccatttgttgcagaaataacggatgctatgggtaacgagatatttaaggttcgtaggccattttggtggatcaacagctcaatttatgcagaagtggatggtaaggagataggcgtagtccacaggcgttggcacctttggcagagaatctatgacctgtacttagggaataggcaatttgcagttgttgagaatccaggattctggaactggacctttagcctagtggatgaagatgacaaactgttggctcagattgatcgtaattggaggggcatcggctttgaggtaatatccttttcatcatataatgatcaaagcatacccttttgttatacccgatggacatccatgtccatccatgaccttatgaaccaattgcatgtttgacagcaaacaatgtttccattgacatattaatgatttacacttagatcattaagaactgtctatctaaattgttgtgatggttttgctttctttagattttttttctgtgtagccttttatacagtactgggctttgccattgcctgatgacacagctatgatggttctatctcacaagtcacaacagatccatgttgcagtacggttcatctgatttaattgtgttacaacctgcgtctttttggacttttcttcttcttttccatcaactgtactgcatttgctcctagactatagaaggaataggattgtaaaaactaatgagtttagaatgataaacaccatattgttcttacaactactgtagctcttcacggatgctggccagtatgctatccggtttggtgatgatgtacaaagcgacaagtttgctcacttaccgtttattatatctgggtatgtgggtgcccacttttcccagttagttaatgtctcacaaaagctccagaccaaagaattgcatgttgttcgccagctgactttgcctgaaagggtagtggctcttgctctcgccatttccttggacagtgattacttctctagaagaggtggctgaggacttccgtttctgattgccacggagtaggcacacgaaccaccatctgccgtatacaaggaatttctttattctcgttcctgaagaggctagcagttacactcattactgttgtcaggtgatcggcatcatcgccagaggcagaaactgtttctgccgttctgcgtgcttttgactcattactgctgtcaggagatttccgaagccttcctttcccctttgtttctgctatggagatgcacacatgcgtggcttgtttggatggctatggtcatatattcctctcactccagatgtgttgaaatagtttggtgttagatacaggctaaactatttcatgacacatggattaaaagatacatggacatccaaacgataccgcatttaagttctagtacactggagcctgatgtttacagtgcaactcgtctgctaggctacttggatgtgaatgtatattgtttaggaattagatccattcggttagcctggctagacagttagacctaaaagggccatttctggtactcgttccgacgggaacaaaacgaggcctgatgtagctgtcagctgtgagtactgaattgatagttccaaacgattctgggtcagacaattcagaacagtggaagccaccgagctttgtatcattgtattcaacccagtgcgcaacaagtgggcggggccttgaaggccgaaggtgcgtcggcctgcacacttgtggcaggggccaattatccgcttctatcgccctcttccttccattttcttctcgatggtttcaatagcaaataaaggagtaaggctggtttcaacgcgaggaggtaataagtagtgacgtaggtaattcagtttaatcgatcaatgggtctattgattggttggtcctgtaccaaccatattagatctaaattggttggtaccgattgctacattataccgatcatttttagtcatgtgtcacgttttgattgatccaccttattttgaagaccaaaaaaatataaatataaaaaaattggaatctaatctataaatagaggggatgtttggattcatttacatccctcactctccaattagctcctaccacttactgtttcactccttttactccaaaccgctaccaccatgtcttccttaggctccaacgttgaagtcaattgcactacaacatttgactccatgaattgtcttagaatgttgtattcataaatgaaattgtttcagatagaattgaattgattctagattatttcatttcagctatctttgctattgaaaggcatggtggtggcacctcctgataaatttcgtgtgtgtttgatctgctatgatttagtttatggaggattttagattcttgctacattttgctttgttatgacttaactattggaccacaggagaaactttagttaacgagagaattaatggaggaacatttactagaagttagaatttccagctctcgaacaacatagttccagtaagtttggttttgtactaaagatgcacactaccactctctgattgtgattactatgcttttctaacaagtgactagcctttaatcaattagtacttaggactggcacgctgattttagctacttgagtagttgccccatgaagccatgatcttttaccacgttttgaacattaaacatttgttttctaccgaagctaatgagaacatattttatctccatcactgtagggtgcaacatgttcagtgttctacaccagattaactccattgcattttttttaaagttaagcaacctatacagagacaccctaataatatgttgaatgataagatcatggcatcgtgctatgtgtttctacaattggctgctctgctttcatttgtacaatcagagagaacggtaacccaagattacagtgtcctggtctgctgaagaacaaccgagatggaaagagctaaaatcctaatttggcatccatgcctcctgaaaatcttaagacgggcatagtaagtaagtcctgagaatgtgatttacagttttagcaatgtcttgcttgatctcctgagtggaaagcacgttcaaccaaatcatgtgtcctggtgtaccaatggtgagcatcacgtagacacgattggccatcgccacgacacggacaggagaacgtgcttgtgctgctcgcgctctgtaaggaactaaatgatttcactatatgtggttctttgaagtttcggttaatagaccttatgctaattcactacttcaaaagcaaaaatatggagatgatgattaaatacataggtagtcatttgtaacttatttttgctattgatatagttgtggcacattcatgtatgagagtttgtgaaaatattccatctgaactgccagatcctacatcttcatttcttaacagacagacaagttctttagaacctggtgatttcacaagtcctctcttcagtggcttcttt

SEQ ID NO: 24181 - DNA, 1448 bp, Zea Mays
ctctgcgctgcggcgatgcggtggctacccaggctgctctctcactccatcgaggtcgggagggcctccgcggcggggaggtccaaccctagtctcgtcaaggcaggatcccatgggttcgccagcggcggctgggatgggtcaccagcggtgccccgggagtggctgcggaagctgtgggtagacgtgctgaagaagcagaaggaggacgcgaggaggtggggcatcggcgcgtcacccgggaacgccggcagcggtgcggagccttcgctatgcgcgttcgcgaattctgtggaggctgcaggagcgaccagggaggcaccttcaaggagctatcagtacgaatacaggggtctcgccggctactcagaacaagacggccatttgttgcagaaataacggatgctatgggtaacgagatatttaaggttcgtaggccattttggtggatcaacagctcaatttatgcagaagtggatggtaaggagataggcgtagtccacaggcgttggcacctttggcagagaatctatgacctgtacttagggaataggcaatttgcagttgttgagaatccaggattctggaactggacctttagcctagtggatgaagatgacaaactgttggctcagattgatcgtaattggaggggcatcggctttgagccttttatacagtactgggctttgccattgcctgatgacacagctatgatggttctatctcacaagtcacaacagatccatgttgcactcttcacggatgctggccagtatgctatccggtttggtgatgatgtacaaagcgacaagtttgctcacttaccgtttattatatctgggtatgtgggtgcccacttttcccagttagttaatgtctcacaaaagctccagaccaaagaattgcatgttgttcgccagctgactttgcctgaaagggtagtggctcttgctctcgccatttccttggacagtgattacttctctagaagaggtggctgttttagcaatgtcttgcttgatctcctgagtggaaagcacgttcaaccaaatcatttctttgtaggtgtcctggtgtaccaatggtgagcatcacgtagacacgattggccatcgccacgacacggacaggagaacgtgcttgtgctgctcgcgctctgtaaggaactaaatgatttcactatatgtggttctttgaagtttcggttaatagaccttatgctaattcactacttcaaaagcaaaaatatggagatgatgattaaatacataggtagtcatttgtaacttatttttgctattgatatagttgtggcacattcatgtatgagagtttgtgaaaatattccatctgaactgccagatcctacatcttcatttcttaacagacagacaagttctttagaacctggtgatttcacaagtcctctcttcagtggcttcttt

SEQ ID NO: 24182 - DNA, 2388 bp, Zea Mays
ctttcacggctcccggcctctctgcgctgcggcgatgcggtggctacccaggctgctctctcactccatcgaggtcgggagggcctccgcggcggggaggtccaaccctagtctcgtcaaggcaggatcccatgggttcgccagcggcggctgggatgggtcaccagcggtgccccgggagtggctgcggaagctgtgggtagacgtgctgaagaagcagaaggaggacgcgaggaggtggggcatcggcgcgtcacccgggaacgccggcagcggtgcggagccttcgctatgcgcgttcgcgaattctgtggaggctgcaggagcgaccagggaggcaccttcaaggagctatcagtacgaatacaggggtctcgccggctactcagaacaagacggccatttgttgcagaaataacggatgctatgggtaacgagatatttaaggttcgtaggccattttggtggatcaacagctcaatttatgcagaagtggatggtaaggagataggcgtagtccacaggcgttggcacctttggcagagaatctatgacctgtacttagggaataggcaatttgcagttgttgagaatccaggattctggaactggacctttagcctagtggatgaagatgacaaactgttggctcagattgatcgtaattggaggggcatcggctttgagccttttatacagtactgggctttgccattgcctgatgacacagctatgatggttctatctcacaagtcacaacagatccatgttgcactcttcacggatgctggccagtatgctatccggtttggtgatgatgtacaaagcgacaagtttgctcacttaccgtttattatatctggctgactttgcctgaaagggtagtggctcttgctctcgccatttccttggacagtgattacttctctagaagaggtggctgaggacttccgtttctgattgccacggagtaggcacacgaaccaccatctgccgtatacaaggaatttctttattctcgttcctgaagaggctagcagttacactcattactgttgtcaggtgatcggcatcatcgccagaggcagaaactgtttctgccgttctgcgtgcttttgactcattactgctgtcaggagatttccgaagccttcctttcccctttgtttctgctatggagatgcacacatgcgtggcttgtttggatggctatggtcatatattcctctcactccagatgtgttgaaatagtttggtgttagatacaggctaaactatttcatgacacatggattaaaagatacatggacatccaaacgataccgcatttaagttctagtacactggagcctgatgtttacagtgcaactcgtctgctaggctacttggatgtgaatgtatattgtttaggaattagatccattcggttagcctggctagacagttagacctaaaagggccatttctggtactcgttccgacgggaacaaaacgaggcctgatgtagctgtcagctgtgagtactgaattgatagttccaaacgattctgggtcagacaattcagaacagtggaagccaccgagctttgtatcattgtattcaacccagtgcgcaacaagtgggcggggccttgaaggccgaagggtgcaacatgttcagtgttctacaccagattaactccattgcattttttttaaagttaagcaacctatacagagacaccctaataatatgttgaatgataagatcatggcatcgtgctatgtgtttctacaattggctgctctgctttcatttgtacaatcagagagaacggtaacccaagattacagtgtcctggtctgctgaagaacaaccgagatggaaagagctaaaatcctaatttggcatccatgcctcctgaaaatcttaagacgggcatagtaagtaagtcctgagaatgtgatttacagttttagcaatgtcttgcttgatctcctgagtggaaagcacgttcaaccaaatcatgtgtcctggtgtaccaatggtgagcatcacgtagacacgattggccatcgccacgacacggacaggagaacgtgcttgtgctgctcgcgctctgtaaggaactaaatgatttcactatatgtggttctttgaagtttcggttaatagaccttatgctaattcactacttcaaaagcaaaaatatggagatgatgattaaatacataggtagtcatttgtaacttatttttgctattgatatagttgtggcacattcatgtatgagagtttgtgaaaatattccatctgaactgccagatcctacatcttcatttcttaacagacagacaagttctttagaacctggtgatttcacaagtcctctcttcagtggcttcttt

SEQ ID NO: 24183 - DNA, 3411 bp, Zea Mays
atcactttcacggctcccggcctctctgcgctgcggcgatgcggtggctacccaggctgctctctcactccatcgaggtcgggagggcctccgcggcggggaggtccaaccctagtctcgtcaaggcaggatcccatgggttcgccagcggcggctgggatgggtcaccagcggtgccccgggagtggctgcggaagctgtgggtagacgtgctgaagaagcagaaggaggacgcgaggaggtggggcatcggcgcgtcacccgggaacgccggcagcggtgcggagccttcgctatgcgcgttcgcgaattctgtggaggctgcaggagcgaccagggaggcaccttcaaggagctatcagtacgaatacaggggtctcgccggctactcagaacaagacggccatttgttgcagaaataacggatgctatgggtaacgagatatttaaggttcgtaggccattttggtggatcaacagctcaatttatgcagaagtggatggtaaggagataggcgtagtccacaggcgttggcacctttggcagagaatctatgacctgtacttagggaataggcaatttgcagttgttgagaatccaggattctggaactggacctttagcctagtggatgaagatgacaaactgttggctcagattgatcgtaattggaggggcatcggctttgagccttttatacagtactgggctttgccattgcctgatgacacagctatgatggttctatctcacaagtcacaacagatccatgttgcactcttcacggatgctggccagtatgctatccggtttggtgatgatgtacaaagcgacaagtttgctcacttaccgtttattatatctggctgactttgcctgaaagggtagtggctcttgctctcgccatttccttggacagtgattacttctctagaagaggtggctgaggacttccgtttctgattgccacggagtaggcacacgaaccaccatctgccgtatacaaggaatttctttattctcgttcctgaagaggctagcagttacactcattactgttgtcaggtgatcggcatcatcgccagaggcagaaactgtttctgccgttctgcgtgcttttgactcattactgctgtcaggagatttccgaagccttcctttcccctttgtttctgctatggagatgcacacatgcgtggcttgtttggatggctatggtcatatattcctctcactccagatgtgttgaaatagtttggtgttagatacaggctaaactatttcatgacacatggattaaaagatacatggacatccaaacgataccgcatttaagttctagtacactggagcctgatgtttacagtgcaactcgtctgctaggctacttggatgtgaatgtatattgtttaggaattagatccattcggttagcctggctagacagttagacctaaaagggccatttctggtactcgttccgacgggaacaaaacgaggcctgatgtagctgtcagctgtgagtactgaattgatagttccaaacgattctgggtcagacaattcagaacagtggaagccaccgagctttgtatcattgtattcaacccagtgcgcaacaagtgggcggggccttgaaggccgaaggtgcgtcggcctgcacacttgtggcaggggccaattatccgcttctatcgccctcttccttccattttcttctcgatggtttcaatagcaaataaaggagtaaggctggtttcaacgcgaggaggtaataagtagtgacgtaggtaattcagtttaatcgatcaatgggtctattgattggttggtcctgtaccaaccatattagatctaaattggttggtaccgattgctacattataccgatcatttttagtcatgtgtcacgttttgattgatccaccttattttgaagaccaaaaaaatataaatataaaaaaattggaatctaatctataaatagaggggatgtttggattcatttacatccctcactctccaattagctcctaccacttactgtttcactccttttactccaaaccgctaccaccatgtcttccttaggctccaacgttgaagtcaattgcactacaacatttgactccatgaattgtcttagaatgttgtattcataaatgaaattgtttcagatagaattgaattgattctagattatttcatttcagctatctttgctattgaaaggcatggtggtggcacctcctgataaatttcgtgtgtgtttgatctgctatgatttagtttatggaggattttagattcttgctacattttgctttgttatgacttaactattggaccacaggagaaactttagttaacgagagaattaatggaggaacatttactagaagttagaatttccagctctcgaacaacatagttccagtaagtttggttttgtactaaagatgcacactaccactctctgattgtgattactatgcttttctaacaagtgactagcctttaatcaattagtacttaggactggcacgctgattttagctacttgagtagttgccccatgaagccatgatcttttaccacgttttgaacattaaacatttgttttctaccgaagctaatgagaacatattttatctccatcactgtagggtgcaacatgttcagtgttctacaccagattaactccattgcattttttttaaagttaagcaacctatacagagacaccctaataatatgttgaatgataagatcatggcatcgtgctatgtgtttctacaattggctgctctgctttcatttgtacaatcagagagaacggtaacccaagattacagtgtcctggtctgctgaagaacaaccgagatggaaagagctaaaatcctaatttggcatccatgcctcctgaaaatcttaagacgggcatagtaagtaagtcctgagaatgtgatttacagttttagcaatgtcttgcttgatctcctgagtggaaagcacgttcaaccaaatcatgtgtcctggtgtaccaatggtgagcatcacgtagacacgattggccatcgccacgacacggacaggagaacgtgcttgtgctgctcgcgctctgtaaggaactaaatgatttcactatatgtggttctttgaagtttcggttaatagaccttatgctaattcactacttcaaaagcaaaaatatggagatgatgattaaatacataggtagtcatttgtaacttatttttgctattgatatagttgtggcacattcatgtatgagagtttgtgaaaatattccatctgaactgccagatcctacatcttcatttcttaacagacagacaagttctttagaacctggtgatttcacaagtcctctcttcagtggcttcttt

SEQ ID NO: 24184 - DNA, 3094 bp, Zea Mays
atcactttcacggctcccggcctctctgcgctgcggcgatgcggtggctacccaggctgctctctcactccatcgaggtcgggagggcctccgcggcggggaggtccaaccctagtctcgtcaaggcaggatcccatgggttcgccagcggcggctgggatgggtcaccagcggtgccccgggagtggctgcggaagctgtgggtagacgtgctgaagaagcagaaggaggacgcgaggaggtggggcatcggcgcgtcacccgggaacgccggcagcggtgcggagccttcgctatgcgcgttcgcgaattctgtggaggctgcaggagcgaccagggaggcaccttcaaggagctatcagtacgaatacaggggtctcgccggctactcagaacaagacggccatttgttgcagaaataacggatgctatgggtaacgagatatttaaggttcgtaggccattttggtggatcaacagctcaatttatgcagaagtggatggtaaggagataggcgtagtccacaggcgttggcacctttggcagagaatctatgacctgtacttagggaataggcaatttgcagttgttgagaatccaggattctggaactggacctttagcctagtggatgaagatgacaaactgttggctcagattgatcgtaattggaggggcatcggctttgagctcttcacggatgctggccagtatgctatccggtttggtgatgatgtacaaagcgacaagtttgctcacttaccgtttattatatctggctgactttgcctgaaagggtagtggctcttgctctcgccatttccttggacagtgattacttctctagaagaggtggctgaggacttccgtttctgattgccacggagtaggcacacgaaccaccatctgccgtatacaaggaatttctttattctcgttcctgaagaggctagcagttacactcattactgttgtcaggtgatcggcatcatcgccagaggcagaaactgtttctgccgttctgcgtgcttttgactcattactgctgtcaggagatttccgaagccttcctttcccctttgtttctgctatggagatgcacacatgcgtggcttgtttggatggctatggtcatatattcctctcactccagatgtgttgaaatagtttggtgttagatacaggctaaactatttcatgacacatggattaaaagatacatggacatccaaacgataccgcatttaagttctagtacactggagcctgatgtttacagtgcaactcgtctgctaggctacttggatgtgaatgtatattgtttaggaattagatccattcggttagcctggctagacagttagacctaaaagggccatttctggtactcgttccgacgggaacaaaacgaggcctgatgtagctgtcagctgtgagtactgaattgatagttccaaacgattctgggtcagacaattcagaacagtggaagccaccgagctttgtatcattgtattcaacccagtgcgcaacaagtgggcggggccttgaaggccgaaggtgcgtcggcctgcacacttgtggcaggggccaattatccgcttctatcgccctcttccttccattttcttctcgatggtttcaatagcaaataaaggagtaaggctggtttcaacgcgaggaggtaataagtagtgacgtaggtaattcagtttaatcgatcaatgggtctattgattggttggtcctgtaccaaccatattagatctaaattggttggtaccgattgctacattataccgatcatttttagtcatgtgtcacgttttgattgatccaccttattttgaagaccaaaaaaatataaatataaaaaaattggaatctaatctataaatagaggggatgtttggattcatttacatccctcactctccaattagctcctaccacttactgtttcactccttttactccaaaccgctaccaccatgtcttccttaggctccaacgttgaagtcaattgcactacaacatttgactccatgaattgtcttagaatgttgtattcataaatgaaattgtttcagatagaattgaattgattctagattatttcatttcagctatctttgctattgaaaggcatggtggtggcacctcctgataaatttcgtgtgtgtttgatctgctatgatttagtttatggaggattttagattcttgctacattttgctttgttatgacttaactattggaccacaggagaaactttagttaacgagagaattaatggaggaacatttactagaagttagaatttccagctctcgaacaacatagttccaggtgcaacatgttcagtgttctacaccagattaactccattgcattttttttaaagttaagcaacctatacagagacaccctaataatatgttgaatgataagatcatggcatcgtgctatgtgtttctacaattggctgctctgctttcatttgtacaatcagagagaacggtaacccaagattacagtgtcctggtctgctgaagaacaaccgagatggaaagagctaaaatcctaatttggcatccatgcctcctgaaaatcttaagacgggcatagtaagtaagtcctgagaatgtgatttacagttttagcaatgtcttgcttgatctcctgagtggaaagcacgttcaaccaaatcatgtgtcctggtgtaccaatggtgagcatcacgtagacacgattggccatcgccacgacacggacaggagaacgtgcttgtgctgctcgcgctctgtaaggaactaaatgatttcactatatgtggttctttgaagtttcggttaatagaccttatgctaattcactacttcaaaagcaaaaatatggagatgatgattaaatacataggtagtcatttgtaacttatttttgctattgatatagttgtggcacattcatgtatgagagtttgtgaaaatattccatctgaactgccagatcctacatcttcatttcttaacagacagacaagttctttagaacctggtgatttcacaagtcctctcttcagtggcttcttt

SEQ ID NO: 24185 - DNA, 3383 bp, Zea Mays
atcactttcacggctcccggcctctctgcgctgcggcgatgcggtggctacccaggctgctctctcactccatcgaggtcgggagggcctccgcggcggggaggtccaaccctagtctcgtcaaggcaggatcccatgggttcgccagcggcggctgggatgggtcaccagcggtgccccgggagtggctgcggaagctgtgggtagacgtgctgaagaagcagaaggaggacgcgaggaggtggggcatcggcgcgtcacccgggaacgccggcagcggtgcggagccttcgctatgcgcgttcgcgaattctgtggaggctgcaggagcgaccagggaggcaccttcaaggagctatcagtacgaatacaggggtctcgccggattagtagtgcaaatgagcaaatccaatccccttttgttcatgtttcagctactcagaacaagacggccatttgttgcagaaataacggatgctatgggtaacgagatatttaaggttcgtaggccattttggtggatcaacagctcaatttatgcagaagtggatggtaaggagataggcgtagtccacaggcgttggcacctttggcagagaatctatgacctgtacttagggaataggcaatttgcagttgttgagaatccaggattctggaactggacctttagcctagtggatgaagatgacaaactgttggctcagattgatcgtaattggaggggcatcggctttgagctcttcacggatgctggccagtatgctatccggtttggtgatgatgtacaaagcgacaagtttgctcacttaccgtttattatatctggctgactttgcctgaaagggtagtggctcttgctctcgccatttccttggacagtgattacttctctagaagaggtggctgaggacttccgtttctgattgccacggagtaggcacacgaaccaccatctgccgtatacaaggaatttctttattctcgttcctgaagaggctagcagttacactcattactgttgtcaggtgatcggcatcatcgccagaggcagaaactgtttctgccgttctgcgtgcttttgactcattactgctgtcaggagatttccgaagccttcctttcccctttgtttctgctatggagatgcacacatgcgtggcttgtttggatggctatggtcatatattcctctcactccagatgtgttgaaatagtttggtgttagatacaggctaaactatttcatgacacatggattaaaagatacatggacatccaaacgataccgcatttaagttctagtacactggagcctgatgtttacagtgcaactcgtctgctaggctacttggatgtgaatgtatattgtttaggaattagatccattcggttagcctggctagacagttagacctaaaagggccatttctggtactcgttccgacgggaacaaaacgaggcctgatgtagctgtcagctgtgagtactgaattgatagttccaaacgattctgggtcagacaattcagaacagtggaagccaccgagctttgtatcattgtattcaacccagtgcgcaacaagtgggcggggccttgaaggccgaaggtgcgtcggcctgcacacttgtggcaggggccaattatccgcttctatcgccctcttccttccattttcttctcgatggtttcaatagcaaataaaggagtaaggctggtttcaacgcgaggaggtaataagtagtgacgtaggtaattcagtttaatcgatcaatgggtctattgattggttggtcctgtaccaaccatattagatctaaattggttggtaccgattgctacattataccgatcatttttagtcatgtgtcacgttttgattgatccaccttattttgaagaccaaaaaaatataaatataaaaaaattggaatctaatctataaatagaggggatgtttggattcatttacatccctcactctccaattagctcctaccacttactgtttcactccttttactccaaaccgctaccaccatgtcttccttaggctccaacgttgaagtcaattgcactacaacatttgactccatgaattgtcttagaatgttgtattcataaatgaaattgtttcagatagaattgaattgattctagattatttcatttcagctatctttgctattgaaaggcatggtggtggcacctcctgataaatttcgtgtgtgtttgatctgctatgatttagtttatggaggattttagattcttgctacattttgctttgttatgacttaactattggaccacaggagaaactttagttaacgagagaattaatggaggaacatttactagaagttagaatttccagctctcgaacaacatagttccagtaagtttggttttgtactaaagatgcacactaccactctctgattgtgattactatgcttttctaacaagtgactagcctttaatcaattagtacttaggactggcacgctgattttagctacttgagtagttgccccatgaagccatgatcttttaccacgttttgaacattaaacatttgttttctaccgaagctaatgagaacatattttatctccatcactgtagggtgcaacatgttcagtgttctacaccagattaactccattgcattttttttaaagttaagcaacctatacagagacaccctaataatatgttgaatgataagatcatggcatcgtgctatgtgtttctacaattggctgctctgctttcatttgtacaatcagagagaacggtaacccaagattacagtgtcctggtctgctgaagaacaaccgagatggaaagagctaaaatcctaatttggcatccatgcctcctgaaaatcttaagacgggcatagtaagtaagtcctgagaatgtgatttacagttttagcaatgtcttgcttgatctcctgagtggaaagcacgttcaaccaaatcatttctttgtaggtgtcctggtgtaccaatggtgagcatcacgtagacacgattggccatcgccacgacacggacaggagaacgtgcttgtgctgctcgcgctctgtaaggaactaaatgatttcactatatgtggttctttgaagtttcggttaatagaccttatgctaattcactacttcaaaagcaaaaatatggagatgatgattaaatacataggtagtcatttgtaacttatttttgctattgatatagttgtggcacattcatgtatgagagtttgtgaaaatattccatctgaactgccagatcctacatcttcatttcttaacagacagacaagttctttagaacctggtgatttcacaagtcctctcttcagtggcttcttt

SEQ ID NO: 24186 - DNA, 1849 bp, Zea Mays
agcttcatcactttcacggctcccggcctctctgcgctgcggcgatgcggtggctacccaggctgctctctcactccatcgaggtcgggagggcctccgcggcggggaggtccaaccctagtctcgtcaaggcaggatcccatgggttcgccagcggcggctgggatgggtcaccagcggtgccccgggagtggctgcggaagctgtgggtagacgtgctgaagaagcagaaggaggacgcgaggaggtggggcatcggcgcgtcacccgggaacgccggcagcggtgcggagccttcgctatgcgcgttcgcgaattctgtggaggctgcaggagcgaccagggaggcaccttcaaggagctatcagtacgaatacaggggtctcgccggctactcagaacaagacggccatttgttgcagaaataacggatgctatgggtaacgagatatttaaggttcgtaggccattttggtggatcaacagctcaatttatgcagaagtggatggtaaggagataggcgtagtccacaggcgttggcacctttggcagagaatctatgacctgtacttagggaataggcaatttgcagttgttgagaatccaggattctggaactggacctttagcctagtggatgaagatgacaaactgttggctcagattgatcgtaattggaggggcatcggctttgaggtaatatccttttcatcatataatgatcaaagcatacccttttgttatacccgatggacatccatgtccatccatgaccttatgaaccaattgcatgtttgacagcaaacaatgtttccattgacatattaatgatttacacttagatcattaagaactgtctatctaaattgttgtgatggttttgctttctttagattttttttctgtgtagccttttatacagtactgggctttgccattgcctgatgacacagctatgatggttctatctcacaagtcacaacagatccatgttgcagtacggttcatctgatttaattgtgttacaacctgcgtctttttggacttttcttcttcttttccatcaactgtactgcatttgctcctagactatagaaggaataggattgtaaaaactaatgagtttagaatgataaacaccatattgttcttacaactactgtagctcttcacggatgctggccagtatgctatccggtttggtgatgatgtacaaagcgacaagtttgctcacttaccgtttattatatctgggtatgtgggtgcccacttttcccagttagttaatgtctcacaaaagctccagaccaaagaattgcatgttgttcgccagctgactttgcctgaaagggtagtggctcttgctctcgccatttccttggacagtgattacttctctagaagaggtggctgttttagcaatgtcttgcttgatctcctgagtggaaagcacgttcaaccaaatcatgtgtcctggtgtaccaatggtgagcatcacgtagacacgattggccatcgccacgacacggacaggagaacgtgcttgtgctgctcgcgctctgtaaggaactaaatgatttcactatatgtggttctttgaagtttcggttaatagaccttatgctaattcactacttcaaaagcaaaaatatggagatgatgattaaatacataggtagtcatttgtaacttatttttgctattgatatagttgtggcacattcatgtatgagagtttgtgaaaatattccatctgaactgccagatcctacatcttcatttcttaacagacagacaagttctttagaacctggtgatttcacaagtcctctcttcagtggcttcttt

SEQ ID NO: 24187 - DNA, 1391 bp, Zea Mays
cttagcttcatcactttcacggctcccggcctctctgcgctgcggcgatgcggtggctacccaggctgctctctcactccatcgaggtcgggagggcctccgcggcggggaggtccaaccctagtctcgtcaaggcaggatcccatgggttcgccagcggcggctgggatgggtcaccagcggtgccccgggagtggctgcggaagctgtgggtagacgtgctgaagaagcagaaggaggacgcgaggaggtggggcatcggcgcgtcacccgggaacgccggcagcggtgcggagccttcgctatgcgcgttcgcgaattctgtggaggctgcaggagcgaccagggaggcaccttcaaggagctatcagtacgaatacaggggtctcgccggctactcagaacaagacggccatttgttgcagaaataacggatgctatgggtaacgagatatttaaggttcgtaggccattttggtggatcaacagctcaatttatgcagaagtggatggtaaggagataggcgtagtccacaggcgttggcacctttggcagagaatctatgacctgtacttagggaataggcaatttgcagttgttgagaatccaggattctggaactggacctttagcctagtggatgaagatgacaaactgttggctcagattgatcgtaattggaggggcatcggctttgagccttttatacagtactgggctttgccattgcctgatgacacagctatgatggttctatctcacaagtcacaacagatccatgttgcactcttcacggatgctggccagtatgctatccggtttggtgatgatgtacaaagcgacaagtttgctcacttaccgtttattatatctggctgactttgcctgaaagggtagtggctcttgctctcgccatttccttggacagtgattacttctctagaagaggtggctgttttagcaatgtcttgcttgatctcctgagtggaaagcacgttcaaccaaatcatgtgtcctggtgtaccaatggtgagcatcacgtagacacgattggccatcgccacgacacggacaggagaacgtgcttgtgctgctcgcgctctgtaaggaactaaatgatttcactatatgtggttctttgaagtttcggttaatagaccttatgctaattcactacttcaaaagcaaaaatatggagatgatgattaaatacataggtagtcatttgtaacttatttttgctattgatatagttgtggcacattcatgtatgagagtttgtgaaaatattccatctgaactgccagatcctacatcttcatttcttaacagacagacaagttctttagaacctggtgatttcacaagtcctctcttcagtggcttcttt

SEQ ID NO: 24188 - DNA, 2280 bp, Zea Mays
cttagcttcatcactttcacggctcccggcctctctgcgctgcggcgatgcggtggctacccaggctgctctctcactccatcgaggtcgggagggcctccgcggcggggaggtccaaccctagtctcgtcaaggcaggatcccatgggttcgccagcggcggctgggatgggtcaccagcggtgccccgggagtggctgcggaagctgtgggtagacgtgctgaagaagcagaaggaggacgcgaggaggtggggcatcggcgcgtcacccgggaacgccggcagcggtgcggagccttcgctatgcgcgttcgcgaattctgtggaggctgcaggagcgaccagggaggcaccttcaaggagctatcagtacgaatacaggggtctcgccggctactcagaacaagacggccatttgttgcagaaataacggatgctatgggtaacgagatatttaaggttcgtaggccattttggtggatcaacagctcaatttatgcagaagtggatggtaaggagataggcgtagtccacaggcgttggcacctttggcagagaatctatgacctgtacttagggaataggcaatttgcagttgttgagaatccaggattctggaactggacctttagcctagtggatgaagatgacaaactgttggctcagattgatcgtaattggaggggcatcggctttgaggtaatatccttttcatcatataatgatcaaagcatacccttttgttatacccgatggacatccatgtccatccatgaccttatgaaccaattgcatgtttgacagcaaacaatgtttccattgacatattaatgatttacacttagatcattaagaactgtctatctaaattgttgtgatggttttgctttctttagattttttttctgtgtagccttttatacagtactgggctttgccattgcctgatgacacagctatgatggttctatctcacaagtcacaacagatccatgttgcagtacggttcatctgatttaattgtgttacaacctgcgtctttttggacttttcttcttcttttccatcaactgtactgcatttgctcctagactatagaaggaataggattgtaaaaactaatgagtttagaatgataaacaccatattgttcttacaactactgtagctcttcacggatgctggccagtatgctatccggtttggtgatgatgtacaaagcgacaagtttgctcacttaccgtttattatatctgggtatgtgggtgcccacttttcccagttagttaatgtctcacaaaagctccagaccaaagaattgcatgttgttcgccagctgactttgcctgaaagggtagtggctcttgctctcgccatttccttggacagtgattacttctctagaagaggtggctgaggacttccgtttctgattgccacggagtaggcacacgaaccaccatctgccgtatacaaggaatttctttattctcgttcctgaagaggctagcagttacactcattactgttgtcagggtgcaacatgttcagtgttctacaccagattaactccattgcattttttttaaagttaagcaacctatacagagacaccctaataatatgttgaatgataagatcatggcatcgtgctatgtgtttctacaattggctgctctgctttcatttgtacaatcagagagaacggtaacccaagattacagtgtcctggtctgctgaagaacaaccgagatggaaagagctaaaatcctaatttggcatccatgcctcctgaaaatcttaagacgggcatagtaagtaagtcctgagaatgtgatttacagttttagcaatgtcttgcttgatctcctgagtggaaagcacgttcaaccaaatcatgtgtcctggtgtaccaatggtgagcatcacgtagacacgattggccatcgccacgacacggacaggagaacgtgcttgtgctgctcgcgctctgtaaggaactaaatgatttcactatatgtggttctttgaagtttcggttaatagaccttatgctaattcactacttcaaaagcaaaaatatggagatgatgattaaatacataggtagtcatttgtaacttatttttgctattgatatagttgtggcacattcatgtatgagagtttgtgaaaatattccatctgaactgccagatcctacatcttcatttcttaacagacagacaagttctttagaacctggtgatttcacaagtcctctcttcagtggcttcttt

SEQ ID NO: 24189 - DNA, 3758 bp, Zea Mays
cttagcttcatcactttcacggctcccggcctctctgcgctgcggcgatgcggtggctacccaggctgctctctcactccatcgaggtcgggagggcctccgcggcggggaggtccaaccctagtctcgtcaaggcaggatcccatgggttcgccagcggcggctgggatgggtcaccagcggtgccccgggagtggctgcggaagctgtgggtagacgtgctgaagaagcagaaggaggacgcgaggaggtggggcatcggcgcgtcacccgggaacgccggcagcggtgcggagccttcgctatgcgcgttcgcgaattctgtggaggctgcaggagcgaccagggaggcaccttcaaggagctatcagtacgaatacaggggtctcgccggctactcagaacaagacggccatttgttgcagaaataacggatgctatgggtaacgagatatttaaggttcgtaggccattttggtggatcaacagctcaatttatgcagaagtggatggtaaggagataggcgtagtccacaggcgttggcacctttggcagagaatctatgacctgtacttagggaataggcaatttgcagttgttgagaatccaggattctggaactggacctttagcctagtggatgaagatgacaaactgttggctcagattgatcgtaattggaggggcatcggctttgagccttttatacagtactgggctttgccattgcctgatgacacagctatgatggttctatctcacaagtcacaacagatccatgttgcactcttcacggatgctggccagtatgctatccggtttggtgatgatgtacaaagcgacaagtttgctcacttaccgtttattatatctgggtatgtgggtgcccacttttcccagttagttaatgtctcacaaaagctccagaccaaagaattgcatgttgttcgccagctgactttgcctgaaagggtagtggctcttgctctcgccatttccttggacagtgattacttctctagaagaggtggctggtaagtaattgtcctttgttccaaatttgactggtcaggacttaagtggattctgttttactggttgacctccggtgcttgaaattgatcgaagtgtctttactcctttcagaggacttccgtttctgattgccacggagtaggcacacgaaccaccatctgccgtatacaaggaatttctttattctcgttcctgaagaggctagcagttacactcattactgttgtcaggtgatcggcatcatcgccagaggcagaaactgtttctgccgttctgcgtgcttttgactcattactgctgtcaggagatttccgaagccttcctttcccctttgtttctgctatggagatgcacacatgcgtggcttgtttggatggctatggtcatatattcctctcactccagatgtgttgaaatagtttggtgttagatacaggctaaactatttcatgacacatggattaaaagatacatggacatccaaacgataccgcatttaagttctagtacactggagcctgatgtttacagtgcaactcgtctgctaggctacttggatgtgaatgtatattgtttaggaattagatccattcggttagcctggctagacagttagacctaaaagggccatttctggtactcgttccgacgggaacaaaacgaggcctgatgtagctgtcagctgtgagtactgaattgatagttccaaacgattctgggtcagacaattcagaacagtggaagccaccgagctttgtatcattgtattcaacccagtgcgcaacaagtgggcggggccttgaaggccgaaggtgcgtcggcctgcacacttgtggcaggggccaattatccgcttctatcgccctcttccttccattttcttctcgatggtttcaatagcaaataaaggagtaaggctggtttcaacgcgaggaggtaataagtagtgacgtaggtaattcagtttaatcgatcaatgggtctattgattggttggtcctgtaccaaccatattagatctaaattggttggtaccgattgctacattataccgatcatttttagtcatgtgtcacgttttgattgatccaccttattttgaagaccaaaaaaatataaatataaaaaaattggaatctaatctataaatagaggggatgtttggattcatttacatccctcactctccaattagctcctaccacttactgtttcactccttttactccaaaccgctaccaccatgtcttccttaggctccaacgttgaagtcaattgcactacaacatttgactccatgaattgtcttagaatgttgtattcataaatgaaattgtttcagatagaattgaattgattctagattatttcatttcagctatctttgctattgaaaggcatggtggtggcacctcctgataaatttcgtgtgtgtttgatctgctatgatttagtttatggaggattttagattcttgctacattttgctttgttatgacttaactattggaccacaggagaaactttagttaacgagagaattaatggaggaacatttactagaagttagaatttccagctctcgaacaacatagttccagtaagtttggttttgtactaaagatgcacactaccactctctgattgtgattactatgcttttctaacaagtgactagcctttaatcaattagtacttaggactggcacgctgattttagctacttgagtagttgccccatgaagccatgatcttttaccacgttttgaacattaaacatttgttttctaccgaagctaatgagaacatattttatctccatcactgtagggtgcaacatgttcagtgttctacaccagattaactccattgcattttttttaaagttaagcaacctatacagagacaccctaataatatgttgaatgataagatcatggcatcgtgctatgtgtttctacaattggctgctctgctttcatttgtacaatcagagaggtactattttttattttacttgtgtttctttatattgtgcaaaaccccttggcattacatatcctatgcagtaattttgtttgtggtgggaatacaatatgcgttaatcctttttggttttgaccatgggccaattttgtagaacggtaacccaagattacagtgtcctggtctgctgaagaacaaccgagatggaaagagctaaaatcctaatttggcatccatgcctcctgaaaatcttaagacgggtaaagcatagtaagtaagtcctgagaatgtgatttacagttttagcaatgtcttgcttgatctcctgagtggaaagcacgttcaaccaaatcatgtgtcctggtgtaccaatggtgagcatcacgtagacacgattggccatcgccacgacacggacaggagaacgtgcttgtgctgctcgcgctctgtaaggaactaaatgatttcactatatgtggttctttgaagtttcggttaatagaccttatgctaattcactacttcaaaagcaaaaatatggagatgatgattaaatacataggtagtcatttgtaacttatttttgctattgatatagttgtggcacattcatgtatgagagtttgtgaaaatattccatctgaactgccagatcctacatcttcatttcttaacagacagacaagttctttagaacctggtgatttcacaagtcctctcttcagtggcttcttt

SEQ ID NO: 24190 - DNA, 1325 bp, Zea Mays
cttagcttcatcactttcacggctcccggcctctctgcgctgcggcgatgcggtggctacccaggctgctctctcactccatcgaggtcgggagggcctccgcggcggggaggtccaaccctagtctcgtcaaggcaggatcccatgggttcgccagcggcggctgggatgggtcaccagcggtgccccgggagtggctgcggaagctgtgggtagacgtgctgaagaagcagaaggaggacgcgaggaggtggggcatcggcgcgtcacccgggaacgccggcagcggtgcggagccttcgctatgcgcgttcgcgaattctgtggaggctgcaggagcgaccagggaggcaccttcaaggagctatcagtacgaatacaggggtctcgccggattagtagtgcaaatgagcaaatccaatccccttttgttcatgtttcagctactcagaacaagacggccatttgttgcagaaataacggatgctatgggtaacgagatatttaaggttcgtaggccattttggtggatcaacagctcaatttatgcagaagtggatggtaaggagataggcgtagtccacaggcgttggcacctttggcagagaatctatgacctgtacttagggaataggcaatttgcagttgttgagaatccaggattctggaactggacctttagcctagtggatgaagatgacaaactgttggctcagattgatcgtaattggaggggcatcggctttgagaacggtaacccaagattacagtgtcctggtctgctgaagaacaaccgagatggaaagagctaaaatcctaatttggcatccatgcctcctgaaaatcttaagacgggcatagtaagtaagtcctgagaatgtgatttacagttttagcaatgtcttgcttgatctcctgagtggaaagcacgttcaaccaaatcatgtgtcctggtgtaccaatggtgagcatcacgtagacacgattggccatcgccacgacacggacaggagaacgtgcttgtgctgctcgcgctctgtaaggaactaaatgatttcactatatgtggttctttgaagtttcggttaatagaccttatgctaattcactacttcaaaagcaaaaatatggagatgatgattaaatacataggtagtcatttgtaacttatttttgctattgatatagttgtggcacattcatgtatgagagtttgtgaaaatattccatctgaactgccagatcctacatcttcatttcttaacagacagacaagttctttagaacctggtgatttcacaagtcctctcttcagtggcttcttt

SEQ ID NO: 24191 - DNA, 2365 bp, Zea Mays
ataacttagcttcatcactttcacggctcccggcctctctgcgctgcggcgatgcggtggctacccaggctgctctctcactccatcgaggtcgggagggcctccgcggcggggaggtccaaccctagtctcgtcaaggcaggatcccatgggttcgccagcggcggctgggatgggtcaccagcggtgccccgggagtggctgcggaagctgtgggtagacgtgctgaagaagcagaaggaggacgcgaggaggtggggcatcggcgcgtcacccgggaacgccggcagcggtgcggagccttcgctatgcgcgttcgcgaattctgtggaggctgcaggagcgaccagggaggcaccttcaaggagctatcagtacgaatacaggggtctcgccggattagtagtgcaaatgagcaaatccaatccccttttgttcatgtttcagctactcagaacaagacggccatttgttgcagaaataacggatgctatgggtaacgagatatttaaggttcgtaggccattttggtggatcaacagctcaatttatgcagaagtggatggtaaggagataggcgtagtccacaggcgttggcacctttggcagagaatctatgacctgtacttagggaataggcaatttgcagttgttgagaatccaggattctggaactggacctttagcctagtggatgaagatgacaaactgttggctcagattgatcgtaattggaggggcatcggctttgagccttttatacagtactgggctttgccattgcctgatgacacagctatgatggttctatctcacaagtcacaacagatccatgttgcactcttcacggatgctggccagtatgctatccggtttggtgatgatgtacaaagcgacaagtttgctcacttaccgtttattatatctgggtatgtgggtgcccacttttcccagttagttaatgtctcacaaaagctccagaccaaagaattgcatgttgttcgccagctgactttgcctgaaagggtagtggctcttgctctcgccatttccttggacagtgattacttctctagaagaggtggctgaggacttccgtttctgattgccacggagtaggcacacgaaccaccatctgccgtatacaaggaatttctttattctcgttcctgaagaggctagcagttacactcattactgttgtcaggtgatcggcatcatcgccagaggcagaaactgtttctgccgttctgcgtgcttttgactcattactgctgtcaggagatttccgaagccttcctttcccctttgtttctgctatggagatgcacacatgcgtggcttgtttggatggctatggtcatatattcctctcactccagatgtgttgaaatagtttggtgttagatacaggctaaactatttcatgacacatggattaaaagatacatggacatccaaacgataccgcatttaagttctagtacactggagcctgatgtttacagtgcaactcgtctgctaggctacttggatgtgaatgtatattgtttaggaattagatccattcggttagcctggctagacagttagacctaaaagggccatttctggtactcgttccgacgggaacaaaacgaggcctgatgtagctgtcagctgtgagtactgaattgatagttccaaacgattctgggtcagacaattcagaacagtggaagccaccgagctttgtatcattgtattcaacccagtgcgcaacaagtgggcggggccttgaaggccgaagaacggtaacccaagattacagtgtcctggtctgctgaagaacaaccgagatggaaagagctaaaatcctaatttggcatccatgcctcctgaaaatcttaagacgggcatagtaagtaagtcctgagaatgtgatttacagttttagcaatgtcttgcttgatctcctgagtggaaagcacgttcaaccaaatcatgtgtcctggtgtaccaatggtgagcatcacgtagacacgattggccatcgccacgacacggacaggagaacgtgcttgtgctgctcgcgctctgtaaggaactaaatgatttcactatatgtggttctttgaagtttcggttaatagaccttatgctaattcactacttcaaaagcaaaaatatggagatgatgattaaatacataggtagtcatttgtaacttatttttgctattgatatagttgtggcacattcatgtatgagagtttgtgaaaatattccatctgaactgccagatcctacatcttcatttcttaacagacagacaagttctttagaacctggtgatttcacaagtcctctcttcagtggcttcttt

SEQ ID NO: 24192 - DNA, 2871 bp, Zea Mays
aaatcacgcaacaatacacgtccagcagagaccagagtccagactagcaaatgattccttagcagttccctgcatgccttctcgctcgccggcatgccggccgcgtggaagaaaccgccgatcagccgctgacgcggttgcacgaccactcgccctggcgctcattctcgtctctaccctgcctcgcgccgcgcactcgcaggatctggcgctgccaccagtccagccacgtggtgtgaggaggacgatgacgtgcgacaacatcccggagcccttcggcacaagatctagaggcgcgtcgcgtctacccggcttcgaggtgacgtgcgggccaaacagggaggccatgctgtccatcggcggcgatgcatacatgatcgatttcgtgtcggtgtcgggcagctacgtggtcgtcttcgcggagcccatcacgcaggtgtgctacgacggcaagggcaagccgacgccggacactggaaccggcgccaagagctcggaagggacgacgacgacgttcacttggagcttggaagggacgcccttcactttctccaagagtaacaagctggtcaacttcggctgcaaccgcacgctcatggctaacttcttcatcgtgcccggtgattccagcccgctatacaccagctgcaccaccacgtgcaacaccctccaaatcagcggctcttgccttggggaagcctgctgcgaggcccccatggaccaggtgaacggcgccaaggcgttcagcctgtcgttcgaaaggaccacggccaacggcaccggcgaggaggacggaacctgcagcgccgcgttcttcctggacaaagacgagacggtcttcacgttcagtggcgatgaggtacggccgctaaaaacagccttgctgccaccaggtgagcgcaggatggttttggattgggcgattgggagcaccagctgcgagcaaactcagagctacaccttcgagaaactgtgcaagtacggcacctgcgtcgacgcgcccaccggagcgggctatctctgcaaatgccctagcgggtacgacgggaatccgtacgtcagtgacggatgccaagatatcaacgaatgccggaattacaatagtaataattgcacctatcagaacctctgcaacaatactttgggaggctatacttgttcttgccccgagaataatattggtgacggttacaggacaggaacaggctgcaacaccactcttgcgacacctgtttctccttcacaacaacctcaaggtatcaacgtgtgtgatcacccggaaaagaacccttgtacatacattaagtattgcattgatttggaaggagttgtttcgtgcgcctgccctgaagggatgagtggcgatggcaggaaaaacggtagaggctgctgttttagctgtcaaaagcacttccctcttgacacagttttgggtgtaagtcttgtgcttatggttacaacgaccactgctgcgtcgtgctactgctgggcagtaaagaaaagagagctaggaagaaagagagcggaattattcaggaagaatggtggcttactcctgcagcagagattttcaacaatcacatctcaaggcgaggaccaatattcatcaaagatattcagtgcggaagagctcaaggctgctactgacaactatagcgagagtcgaatacttggccgaggtggacaaggcacagtgtacaagggcattcttccagatcaaactgtagtcgccataaaaaagtccaaggtgttcgatgagagccaagtggagcaatttgtcaatgagattgccatcttgtcacagattgatcacccaaatgttgtcaagcttttgggatgttgtttagagacacaggtaccattgctggtttatgagttcatatctaatggaacactcttccagcacatccacaacagaaatgcaactcgccctctaacatgggaagactgcttaaggatagctgcagagactgcagacgcacttgcctatctgcactccgcgtcttctatacctatcatacacagagacatcaaatcaagcaacattctgttggatgggaacttcgtggctaaaatagcagacttcggtgcatcaagatcagtcccatttgatcaaacccatataactactcttattcaggggactattgggtacctcgatcccgaatatttccaaagcagccaactcaccgagaagagtgacgtttacagtttcggagtcgttcttgcagaactgttgaccaggcaaaaacctatttctgcagcaaggccggaagattcatgtaacttggctatgcatctggtggttctatttaataaagggcgcctacttcaggagatagagccacacattttggccgaagcaggtgaagaccaatgttatgccgttgcagagctttcagtgagatgcttaaacgtgaagggagaagaacggcctgccatggtggtggtggcttctgttttacaagagctaagaaggtcattcaccatagaccaggctgtcggaataaaagatgaatcgatacaggaaaacagtgaacaagaagagaaacatctacatgagtccagatcaattcccagtttgcagtcatcagaagtaagcacacaatgtagcatggaggccaaaatgtcatctttttgttgacaaaataagcaaattttatattaaaatcagaacacatatactgtgacaatctcataaactaatataagtatagctcgtataccagttaaattaaaaacataaatataaatactagtataaacatagcccatagactagtcatattaaacaacgtgaacagtaaatgccagtgtaatcatagcgcttataataattaaattaatcagcatgaacaaaaacatttaatc

SEQ ID NO: 24193 - DNA, 3745 bp, Zea Mays
aaatcacgcaacaatacacgtccagcagagaccagagtccagactagcaaatgattccttagcagttccctgcatgccttctcgctcgccggcatgccggccgcgtggaagaaaccgccgatcagccgctgacgcggttgcacgaccactcgccctggcgctcattctcgtctctaccctgcctcgcgccgcgcactcgcaggatctggcgctgccaccagtccagccacgtggtgtgaggaggacgatgacgtgcgacaacatcccggagcccttcggcacaagatctagaggcgcgtcgcgtctacccggcttcgaggtgacgtgcgggccaaacagggaggccatgctgtccatcggcggcgatgcatacatgatcgatttcgtgtcggtgtcgggcagctacgtggtcgtcttcgcggagcccatcacgcaggtgtgctacgacggcaagggcaagccgacgccggacactggaaccggcgccaagagctcggaagggacgacgacgacgttcacttggagcttggaagggacgcccttcactttctccaagagtaacaagctggtcaacttcggctgcaaccgcacgctcatggctaacttcttcatcgtgcccggtgattccagcccgctatacaccagctgcaccaccacgtgcaacaccctccaaatcagcggctcttgccttggggaagcctgctgcgaggcccccatggaccaggtgaacggcgccaaggcgttcagcctgtcgttcgaaaggaccacggccaacggcaccggcgaggaggacggaacctgcagcgccgcgttcttcctggacaaagacgagacggtcttcacgttcagtggcgatgaggtacggccgctaaaaacagccttgctgccaccaggtgagcgcaggatggttttggattgggcgattgggagcaccagctgcgagcaaactcagagctacaccttcgagaaactgtgcaagtacggcacctgcgtcgacgcgcccaccggagcgggctatctctgcaaatgccctagcgggtacgacgggaatccgtacgtcagtgacggatgccaagatatcaacgaatgccggaattacaatagtaataattgcacctatcagaacctctgcaacaatactttgggaggctatacttgttcttgccccgagaataatattggtgacggttacaggacaggaacaggctgcaacaccactcttgcgacacctggtaataatgttctacgtttcaaacttcaattgtcaatttatagcaaactataatctctcaacccatgccattgcacaagttagaatattcggagtatgatcattagtagtgtgtattttttccatccatatctatatgttttctttttctataccacacctccacgtatttcaatatacatttagttaaagttttagcttacaatagctcttaccataactcaagcttcatgagtcatgacgtcattgatttttcaaattttagtctcattagtttgtacaacttttataaaaaaaccaataagtctttttcttatggtaccttttatgaaaactctacttcatattttattaaaataagaatttagaccttatagttaccacaataccaaaaaaagtcatttaagctcaataaaatattattatttatgtctaaaatttactgtatgctcaaaaggcatatacaaaaaataagggaggttattgacacttttttgtctgcacttacctcatctaatgttcaaggtattaatttctatatgaaaggtaaatcctgaactaatggagatatatgcctatatattccttgattacatttagaggtactaacgaaagatctaacaatgaatgttctttcatgctgcagtttctccttcacaacaacctcaaggtacatgttctgtataacttgttcgttgctacgagtgtacgaatcaattagttcatcatgactatcatcctttgagatttgtttagcagtacttcaattcactctggtccacatgtattgggatgcattggagtagagaattaacagttttaattttcattctgatttatcctaatgcacattgatttatcctttgagacgtcgttgatgatccttggctatctatcaggtatcaacgtgtgtgatcacccggaaaagaacccttgtacatacattaagtattgcattgatttggaaggagttgtttcgtgcgcctgccctgaagggatgagtggcgatggcaggaaaaacggtagaggctgctgttttagctgtcaaaagcacttccctcttgacacagttttgggtgtaagtcttgtgcttatggttacaacgaccactgctgcgtcgtgctactgctgggcagtaaagaaaagagagctaggaagaaagagagcggaattattcaggaagaatggtggcttactcctgcagcagagattttcaacaatcacatctcaaggcgaggaccaatattcatcaaagatattcagtgcggaagagctcaaggctgctactgacaactatagcgagagtcgaatacttggccgaggtggacaaggcacagtgtacaagggcattcttccagatcaaactgtagtcgccataaaaaagtccaaggtgttcgatgagagccaagtggagcaatttgtcaatgagattgccatcttgtcacagattgatcacccaaatgttgtcaagcttttgggatgttgtttagagacacaggtaccattgctggtttatgagttcatatctaatggaacactcttccagcacatccacaacagaaatgcaactcgccctctaacatgggaagactgcttaaggatagctgcagagactgcagacgcacttgcctatctgcactccgcgtcttctatacctatcatacacagagacatcaaatcaagcaacattctgttggatgggaacttcgtggctaaaatagcagacttcggtgcatcaagatcagtcccatttgatcaaacccatataactactcttattcaggggactattgggtacctcgatcccgaatatttccaaagcagccaactcaccgagaagagtgacgtttacagtttcggagtcgttcttgcagaactgttgaccaggcaaaaacctatttctgcagcaaggccggaagattcatgtaacttggctatgcatctggtggttctatttaataaagggcgcctacttcaggagatagagccacacattttggccgaagcaggtgaagaccaatgttatgccgttgcagagctttcagtgagatgcttaaacgtgaagggagaagaacggcctgccatggtggtggtggcttctgttttacaagagctaagaaggtcattcaccatagaccaggctgtcggaataaaagatgaatcgatacaggaaaacagtgaacaagaagagaaacatctacatgagtccagatcaattcccagtttgcagtcatcagaagtaagcacacaatgtagcatggaggccaaaatgtcatctttttgttgacaaaataagcaaattttatattaaaatcagaacacatatactgtgacaatctcataaactaatataagtatagctcgtataccagttaaattaaaaacataaatataaatactagtataaacatagcccatagactagtcatattaaacaacgtgaacagtaaatgccagtgtaatcatagcgcttataataattaaattaatcagcatgaacaaaaacatttaatc

SEQ ID NO: 24194 - DNA, 3516 bp, Zea Mays
aaatcacgcaacaatacacgtccagcagagaccagagtccagactagcaaatgattccttagcagttccctgcatgccttctcgctcgccggcatgccggccgcgtggaagaaaccgccgatcagccgctgacgcggttgcacgaccactcgccctggcgctcattctcgtctctaccctgcctcgcgccgcgcactcgcaggatctggcgctgccaccagtccagccacgtggtgtgaggaggacgatgacgtgcgacaacatcccggagcccttcggcacaagatctagaggcgcgtcgcgtctacccggcttcgaggtgacgtgcgggccaaacagggaggccatgctgtccatcggcggcgatgcatacatgatcgatttcgtgtcggtgtcgggcagctacgtggtcgtcttcgcggagcccatcacgcaggtgtgctacgacggcaagggcaagccgacgccggacactggaaccggcgccaagagctcggaagggacgacgacgacgttcacttggagcttggaagggacgcccttcactttctccaagagtaacaagctggtcaacttcggctgcaaccgcacgctcatggctaacttcttcatcgtgcccggtgattccagcccgctatacaccagctgcaccaccacgtgcaacaccctccaaatcagcggctcttgccttggggaagcctgctgcgaggcccccatggaccaggtgaacggcgccaaggcgttcagcctgtcgttcgaaaggaccacggccaacggcaccggcgaggaggacggaacctgcagcgccgcgttcttcctggacaaagacgagacggtcttcacgttcagtggcgatgaggtacggccgctaaaaacagccttgctgccaccaggtgagcgcaggatggttttggattgggcgattgggagcaccagctgcgagcaaactcagagctacaccttcgagaaactgtgcaagtacggcacctgcgtcgacgcgcccaccggagcgggctatctctgcaaatgccctagcgggtacgacgggaatccgtacgtcagtgacggatgccaagatatcaacgaatgccggaattacaatagtaataattgcacctatcagaacctctgcaacaatactttgggaggctatacttgttcttgccccgagaataatattggtgacggttacaggacaggaacaggctgcaacaccactcttgcgacacctggtaataatgttctacgtttcaaacttcaattgtcaatttatagcaaactataatctctcaacccatgccattgcacaagttagaatattcggagtatgatcattagtagtgtgtattttttccatccatatctatatgttttctttttctataccacacctccacgtatttcaatatacatttagttaaagttttagcttacaatagctcttaccataactcaagcttcatgagtcatgacgtcattgatttttcaaattttagtctcattagtttgtacaacttttataaaaaaaccaataagtctttttcttatggtaccttttatgaaaactctacttcatattttattaaaataagaatttagaccttatagttaccacaataccaaaaaaagtcatttaagctcaataaaatattattatttatgtctaaaatttactgtatgctcaaaaggcatatacaaaaaataagggaggttattgacacttttttgtctgcacttacctcatctaatgttcaaggtattaatttctatatgaaaggtaaatcctgaactaatggagatatatgcctatatattccttgattacatttagaggtactaacgaaagatctaacaatgaatgttctttcatgctgcagtttctccttcacaacaacctcaaggtatcaacgtgtgtgatcacccggaaaagaacccttgtacatacattaagtattgcattgatttggaaggagttgtttcgtgcgcctgccctgaagggatgagtggcgatggcaggaaaaacggtagaggctgctgttttagctgtcaaaagcacttccctcttgacacagttttgggtgtaagtcttgtgcttatggttacaacgaccactgctgcgtcgtgctactgctgggcagtaaagaaaagagagctaggaagaaagagagcggaattattcaggaagaatggtggcttactcctgcagcagagattttcaacaatcacatctcaaggcgaggaccaatattcatcaaagatattcagtgcggaagagctcaaggctgctactgacaactatagcgagagtcgaatacttggccgaggtggacaaggcacagtgtacaagggcattcttccagatcaaactgtagtcgccataaaaaagtccaaggtgttcgatgagagccaagtggagcaatttgtcaatgagattgccatcttgtcacagattgatcacccaaatgttgtcaagcttttgggatgttgtttagagacacaggtaccattgctggtttatgagttcatatctaatggaacactcttccagcacatccacaacagaaatgcaactcgccctctaacatgggaagactgcttaaggatagctgcagagactgcagacgcacttgcctatctgcactccgcgtcttctatacctatcatacacagagacatcaaatcaagcaacattctgttggatgggaacttcgtggctaaaatagcagacttcggtgcatcaagatcagtcccatttgatcaaacccatataactactcttattcaggggactattgggtacctcgatcccgaatatttccaaagcagccaactcaccgagaagagtgacgtttacagtttcggagtcgttcttgcagaactgttgaccaggcaaaaacctatttctgcagcaaggccggaagattcatgtaacttggctatgcatctggtggttctatttaataaagggcgcctacttcaggagatagagccacacattttggccgaagcaggtgaagaccaatgttatgccgttgcagagctttcagtgagatgcttaaacgtgaagggagaagaacggcctgccatggtggtggtggcttctgttttacaagagctaagaaggtcattcaccatagaccaggctgtcggaataaaagatgaatcgatacaggaaaacagtgaacaagaagagaaacatctacatgagtccagatcaattcccagtttgcagtcatcagaagtaagcacacaatgtagcatggaggccaaaatgtcatctttttgttgacaaaataagcaaattttatattaaaatcagaacacatatactgtgacaatctcataaactaatataagtatagctcgtataccagttaaattaaaaacataaatataaatactagtataaacatagcccatagactagtcatattaaacaacgtgaacagtaaatgccagtgtaatcatagcgcttataataattaaattaatcagcatgaacaaaaacatttaatc

SEQ ID NO: 24195 - DNA, 3100 bp, Zea Mays
aaatcacgcaacaatacacgtccagcagagaccagagtccagactagcaaatgattccttagcagttccctgcatgccttctcgctcgccggcatgccggccgcgtggaagaaaccgccgatcagccgctgacgcggttgcacgaccactcgccctggcgctcattctcgtctctaccctgcctcgcgccgcgcactcgcaggatctggcgctgccaccagtccagccacgtggtgtgaggaggacgatgacgtgcgacaacatcccggagcccttcggcacaagatctagaggcgcgtcgcgtctacccggcttcgaggtgacgtgcgggccaaacagggaggccatgctgtccatcggcggcgatgcatacatgatcgatttcgtgtcggtgtcgggcagctacgtggtcgtcttcgcggagcccatcacgcaggtgtgctacgacggcaagggcaagccgacgccggacactggaaccggcgccaagagctcggaagggacgacgacgacgttcacttggagcttggaagggacgcccttcactttctccaagagtaacaagctggtcaacttcggctgcaaccgcacgctcatggctaacttcttcatcgtgcccggtgattccagcccgctatacaccagctgcaccaccacgtgcaacaccctccaaatcagcggctcttgccttggggaagcctgctgcgaggcccccatggaccaggtgaacggcgccaaggcgttcagcctgtcgttcgaaaggaccacggccaacggcaccggcgaggaggacggaacctgcagcgccgcgttcttcctggacaaagacgagacggtcttcacgttcagtggcgatgaggtacggccgctaaaaacagccttgctgccaccaggtgagcgcaggatggttttggattgggcgattgggagcaccagctgcgagcaaactcagagctacaccttcgagaaactgtgcaagtacggcacctgcgtcgacgcgcccaccggagcgggctatctctgcaaatgccctagcgggtacgacgggaatccgtacgtcagtgacggatgccaagatatcaacgaatgccggaattacaatagtaataattgcacctatcagaacctctgcaacaatactttgggaggctatacttgttcttgccccgagaataatattggtgacggttacaggacaggaacaggctgcaacaccactcttgcgacacctgtttctccttcacaacaacctcaaggtacatgttctgtataacttgttcgttgctacgagtgtacgaatcaattagttcatcatgactatcatcctttgagatttgtttagcagtacttcaattcactctggtccacatgtattgggatgcattggagtagagaattaacagttttaattttcattctgatttatcctaatgcacattgatttatcctttgagacgtcgttgatgatccttggctatctatcaggtatcaacgtgtgtgatcacccggaaaagaacccttgtacatacattaagtattgcattgatttggaaggagttgtttcgtgcgcctgccctgaagggatgagtggcgatggcaggaaaaacggtagaggctgctgttttagctgtcaaaagcacttccctcttgacacagttttgggtgtaagtcttgtgcttatggttacaacgaccactgctgcgtcgtgctactgctgggcagtaaagaaaagagagctaggaagaaagagagcggaattattcaggaagaatggtggcttactcctgcagcagagattttcaacaatcacatctcaaggcgaggaccaatattcatcaaagatattcagtgcggaagagctcaaggctgctactgacaactatagcgagagtcgaatacttggccgaggtggacaaggcacagtgtacaagggcattcttccagatcaaactgtagtcgccataaaaaagtccaaggtgttcgatgagagccaagtggagcaatttgtcaatgagattgccatcttgtcacagattgatcacccaaatgttgtcaagcttttgggatgttgtttagagacacaggtaccattgctggtttatgagttcatatctaatggaacactcttccagcacatccacaacagaaatgcaactcgccctctaacatgggaagactgcttaaggatagctgcagagactgcagacgcacttgcctatctgcactccgcgtcttctatacctatcatacacagagacatcaaatcaagcaacattctgttggatgggaacttcgtggctaaaatagcagacttcggtgcatcaagatcagtcccatttgatcaaacccatataactactcttattcaggggactattgggtacctcgatcccgaatatttccaaagcagccaactcaccgagaagagtgacgtttacagtttcggagtcgttcttgcagaactgttgaccaggcaaaaacctatttctgcagcaaggccggaagattcatgtaacttggctatgcatctggtggttctatttaataaagggcgcctacttcaggagatagagccacacattttggccgaagcaggtgaagaccaatgttatgccgttgcagagctttcagtgagatgcttaaacgtgaagggagaagaacggcctgccatggtggtggtggcttctgttttacaagagctaagaaggtcattcaccatagaccaggctgtcggaataaaagatgaatcgatacaggaaaacagtgaacaagaagagaaacatctacatgagtccagatcaattcccagtttgcagtcatcagaagtaagcacacaatgtagcatggaggccaaaatgtcatctttttgttgacaaaataagcaaattttatattaaaatcagaacacatatactgtgacaatctcataaactaatataagtatagctcgtataccagttaaattaaaaacataaatataaatactagtataaacatagcccatagactagtcatattaaacaacgtgaacagtaaatgccagtgtaatcatagcgcttataataattaaattaatcagcatgaacaaaaacatttaatc

SEQ ID NO: 24196 - DNA, 2756 bp, Zea Mays
aaatcacgcaacaatacacgtccagcagagaccagagtccagactagcaaatgattccttagcagttccctgcatgccttctcgctcgccggcatgccggccgcgtggaagaaaccgccgatcagccgctgacgcggttgcacgaccactcgccctggcgctcattctcgtctctaccctgcctcgcgccgcgcactcgcaggatctggcgctgccaccagtccagccacgtggtgtgaggaggacgatgacgtgcgacaacatcccggagcccttcggcacaagatctagaggcgcgtcgcgtctacccggcttcgaggtgacgtgcgggccaaacagggaggccatgctgtccatcggcggcgatgcatacatgatcgatttcgtgtcggtgtcgggcagctacgtggtcgtcttcgcggagcccatcacgcaggtgtgctacgacggcaagggcaagccgacgccggacactggaaccggcgccaagagctcggaagggacgacgacgacgttcacttggagcttggaagggacgcccttcactttctccaagagtaacaagctggtcaacttcggctgcaaccgcacgctcatggctaacttcttcatcgtgcccggtgattccagcccgctatacaccagctgcaccaccacgtgcaacaccctccaaatcagcggctcttgccttggggaagcctgctgcgaggcccccatggaccaggtgaacggcgccaaggcgttcagcctgtcgttcgaaaggaccacggccaacggcaccggcgaggaggacggaacctgcagcgccgcgttcttcctggacaaagacgagacggtcttcacgttcagtggcgatgaggtacggccgctaaaaacagccttgctgccaccaggtgagcgcaggatggttttggattgggcgattgggagcaccagctgcgagcaaactcagagctacaccttcgagaaactgtgcaagtacggcacctgcgtcgacgcgcccaccggagcgggctatctctgcaaatgccctagcgggtacgacgggaatccgtacgtcagtgacggatgccaagatatcaacgaatgccggaattacaatagtaataattgcacctatcagaacctctgcaacaatactttgggaggctatacttgttcttgccccgagaataatattggtgacggttacaggacaggaacaggctgcaacaccactcttgcgacacctgtttctccttcacaacaacctcaaggaaaaacggtagaggctgctgttttagctgtcaaaagcacttccctcttgacacagttttgggtgtaagtcttgtgcttatggttacaacgaccactgctgcgtcgtgctactgctgggcagtaaagaaaagagagctaggaagaaagagagcggaattattcaggaagaatggtggcttactcctgcagcagagattttcaacaatcacatctcaaggcgaggaccaatattcatcaaagatattcagtgcggaagagctcaaggctgctactgacaactatagcgagagtcgaatacttggccgaggtggacaaggcacagtgtacaagggcattcttccagatcaaactgtagtcgccataaaaaagtccaaggtgttcgatgagagccaagtggagcaatttgtcaatgagattgccatcttgtcacagattgatcacccaaatgttgtcaagcttttgggatgttgtttagagacacaggtaccattgctggtttatgagttcatatctaatggaacactcttccagcacatccacaacagaaatgcaactcgccctctaacatgggaagactgcttaaggatagctgcagagactgcagacgcacttgcctatctgcactccgcgtcttctatacctatcatacacagagacatcaaatcaagcaacattctgttggatgggaacttcgtggctaaaatagcagacttcggtgcatcaagatcagtcccatttgatcaaacccatataactactcttattcaggggactattgggtacctcgatcccgaatatttccaaagcagccaactcaccgagaagagtgacgtttacagtttcggagtcgttcttgcagaactgttgaccaggcaaaaacctatttctgcagcaaggccggaagattcatgtaacttggctatgcatctggtggttctatttaataaagggcgcctacttcaggagatagagccacacattttggccgaagcaggtgaagaccaatgttatgccgttgcagagctttcagtgagatgcttaaacgtgaagggagaagaacggcctgccatggtggtggtggcttctgttttacaagagctaagaaggtcattcaccatagaccaggctgtcggaataaaagatgaatcgatacaggaaaacagtgaacaagaagagaaacatctacatgagtccagatcaattcccagtttgcagtcatcagaagtaagcacacaatgtagcatggaggccaaaatgtcatctttttgttgacaaaataagcaaattttatattaaaatcagaacacatatactgtgacaatctcataaactaatataagtatagctcgtataccagttaaattaaaaacataaatataaatactagtataaacatagcccatagactagtcatattaaacaacgtgaacagtaaatgccagtgtaatcatagcgcttataataattaaattaatcagcatgaacaaaaacatttaatc

SEQ ID NO: 24197 - DNA, 2095 bp, Zea Mays
tgtgtaggaggtttcaagggctatttgggtggtgtggtgtgctcggcttgtaatgaccagagtttgagctctagatgccaagtgcaacaaggtaacaaacacatgcagaaaccattgacccaagtacttataacactgacgacaccggtacatcacaggcacacatcgcctgcttgttcttattacaggcacgagcatcacgttgctactatcacaaccagtcctgatgcacgccatgcctgatacgactgtattatagtagaaccagtattatactggtattagcacagccacacactgctatcaagcaccactactagtagtataatattgcagtgatataagcagggagcccagcccggccgagcacgagcagagtgcctgccactgccaggctctcccgccgccctttttatgagcgagcagcagtgtgggctggcctagcagcgccgcgcggctcacgcggcggggggcggcttctcgacgtcctcgagcgggcggaaccacaccttctggtccagcaccgtgcctcctgcagcatccgcgccggcgtccggcgcgccaccagcggccagcttggggtccaccgccgccgggccgaagacgccggtcttggggtgggggctccagtacttgtcggggctcccggcgctgccgatcacatcgtccggcacgaacgccgggcgcacctggtcctccaggttcttgtcgtacgccgaggcgtgcacggccctccggatgccaaaggacggtaggtggggcccggcagacgcggatgcttctggtcccggtcgtaccgtggagagggttcctttctttcctttgagtgagaaccaaagcaagcgagccatggcagccaagatcggcaggtgggtaggagtgagtgactggccactgcactgcccactggtgagggtgagggtggagccgagcgacaactaccgcgcaccagacccacccatcaatccgcctttcggaaagcgatgcgatggaacacggaaggcaatcaggcgaggtcgcttgctgtttgctgcgcggcttgatgtgcacgtcctgcgcgcctccactgctcctcatcttctttgtgtgggtgcgcctgcagcctgctagtggcgtggcgtggcgtttggcttttccagttttcctagtggcagaggctgacagacagttttgcagatttgacagtctgaagtgggcagaaccgtagaacaacaaatacagtaatatctacggaggagggagagaaggactccgtggtactagtgtagtacaagcacatggatctggctttggttggggttcttctatcacttctacggagatggatggagttcttctatcacttatacggagatggtagtgtgcattcaagttgaagatacatactctccctcctagtcctagactcctagtatgtgttctattgttctcggacggacggccagaggattaaacaagctgggagatgttcagggttgccatatctacatactcgtgtgagaagataatcattctgttgtcgccaacttctagatatttctgctgaccaaaatcttggcaccagcagcacactgaaccaacacgaaacaagggctctctgcagaactagagttatagttatccacgaagctaagatcctcccaacaagtcccaagtcggaggggggcgaaataagcactatcgatccgagggaccggatcaccggacccagactcccagagcaaagctaagaacggccgtaaaaagaacagacagatcgctctgctacaagcctaaaactacggcgagatcttcgacgaactgatcaagaacaagcacgctcaaaaatagtaaaaaaaaaagcagaatcacagggcaaaccgaaacccgcgcgtgtggggtgagtgtggcccgtctgagtacctcggcgaggcggccttgccggcgaggacgcggctgacgaagcttccagcgatcgcccgccccttggagccagctgctgctgccatgcaaagatcgaccgttcgggagcggaggggagcggagcggagcggaggaagtcaccaagccaacagtggacaggcaggctgatgaaagggtgcggtgggttttcgat

SEQ ID NO: 24198 - DNA, 1811 bp, Zea Mays
atggctgaagccggcggcccgaattcatgttcaccaatggctatggcagcgctcgaactacagaagatactggagacagaggacactcacgatcacggctcacctaggcggttcggcggacggcgattggcggggcggctcggtctggagctgaagccttggatggaggggtcacaccggtggccgcctcttgtgggccttatgggtggtgttgggccttctaagtatacaagtgtatacaggctcggtgagaagctgcgaagcctgcgagcccgaccgcgaccgagcagatcgttccgtcgtgcattcgtgcttcggttcttcccgtgctcgtcttcttggccgggacgaaagaaaagggggactttggctgtcgatggcagcggcgttggagttcctggaggcgcagggcgcgacccagccggagctcgcggaatggtacgcggcgctcgccgacctgtaccagcgaaagctatggcaccagctcaccctcaagctggagcagttcctcgccctcgccgtcgtccaggcgatgctctgattcatctttataatcatttcatctctgattttgagacaaagatcagtcttcttaaatttgctcacttcacagtcgtagtttcacaccagtatttggacaagaatgctggtataaattatcttgaaggcgtaatttcaaaactacgtgatacccgtgaatcgcgggttgaagagcccattctgtatgtaaagatgcagattgcaacatttcttcttgagaaagggaatcaaaaggattgtaagaatctgctagaagaaggcaaaaccactttggacagcatggttgatgttgatccttctgtacatggtacctattactgggtgtgttcacagtatcataaggcccgtcaagaatactcagaattctacaaaagctgtcttctttaccttgcgtacacgacagtgagcttgttgttacagtttttgataaacctggcacttgacctctcacttgctgctttattgggtgaaaacatttacaactttggggaactacttgcccatccgattatccatagccttttgggaactcaggctgagtggatatttcatatgttgcaagctttcaactctgggaatctatccttgtatcaagaaatctgcaaagctcatagcaacgctttgagtgcacagcttgcattggtacaaaatgagaggaatctacttgaaaagatcaacatgctttgcttgatggaaatcattttcagtcgatcatctgaaaaccgcacgatcccaatgcgggatatagcagaacagaccaagctccctgttgaagatgtggagtatctattaatgaagagcctctctgctcgtctaatagaaggcataattgatcaggttgatggagttgtccatgtttcacgggttaaaccaagggtgttgggcatagaccaagtgaaatgcttgcatgaccggttggatacatggattgggaaggtcgatacgatcttgctttctgttgaagcggagacgccagacttggtgtcttcgtgatgttctgctcctctcgaaggatcactgtgacataatctgatgtgaacgaagtcgttagatatttatcgtgttgtcagcctgtaatcattggtgtaaacccctgtaacgattgtggtaacactgtaacctcgttgctgcagttttagtagtgtacattcttgaggaatcgttgtttcaaacaattgttcagctgactctcagctcaagatgtgtatcctcaaatatgccctcagctcccaagagatcggctctcagagaattcctgaacacagacagct

SEQ ID NO: 24199 - DNA, 4728 bp, Zea Mays
tgcaagtcgaaacaaatgaaactgtgttagcagcagtattttgttcaaagtgcacaacaaaattataccataaaatcatggttcttaaggcggtaaggcgaggcgacacacccctttcagccgcctaggcgcatgaagcgcgcggtgaggcgacgccttataaataaccttataagttataacaattaaaaactgcagacatatatataactgcagtgacataaacagtggtaattcagcacacataatccagcacacactagcaatataacaaaactacagtcacagaacaattgctgctgttcatcacccagtccataccagcacacataatccacataaaactacagcacacactagtcaaataacaacccctaaacagcagtacatcacccagttcctctctctcaatggccatgcccatcaccgagtcactcataatcatctaagctatcaaagatatcagcagctgctgcattttctccctcgtcagtgggctcatcagttgcatccccacgatctatcacatctgcatcatcatgtggatcttcttcctcatcatccagctgttcttcatcttgttcctcaatgaaatctaaaatatcatcatcaacatctggtgtgcagttcctggaacgattgctactgttcccacgagctttccttggaaaattacgacctcaaagagcttcacttgcacctacagcttcatctacaagttgccatgtgaagtctggtacggtgctgcctcccccactgttgctctgatgtccgcctctccctctcctacgtgtgcttggtcgctcgcctctcccactcccacctgtgtaccaccggaagggtgaggggaggaagtcggtggcggcgcaggtggggagaggctggaggcggcagatagcctgtaaccggaggtggggactgggagaagcctccctccctccctcactctcaaaggaattttattccatcatccatataactcaccttacatcgagtgatcaaaacaccggaagatagataacctgtatttattaatttaagaaataaatcattgtttgaaggtgttcatttcattaaatattttattccataagtagataattagggccctgtttggccagggtttcttgaggggattcaattgtggcttctctgacttcttgggtgaagttcttcaaacgtgaacttaagaaacggtttcacaagaggaactccatccagtttttttttttactacgaggatgaagccacataagcgtgccttctccagcttctctggtttcttgatgagtctggaactttggatacaaagtaccaaataggacttaagtgaatatgtaacaagtatctgacatggggcttaccaaaagcagattccccttctccctcataaacaatagcatcagcattagcacttcgttaggtacttggggccaagcaactctatgaattgctactcaagacacttcaaatctataaaattatgcaattggctaatgagcaatctaattttgtactcactttttttccaagaacccaacataacttgagtattcaacaaatcaaagttccaactagtgcagggaacatagatgtttgtaccgtttctttgaaaggaggagacaaccatgtgtgctgttgtgccagcacttgtaggtttgacacctctcggtcctcacctcctaggccacgctcgtgcctgtctccagcaaggacctgcaaaccgtcctgttcgctatatttagcggatcatgagctcctctatacgtccagcaatgcattgtaaaccgcccgctacgatagcggaggcagccgacgttctccaaatgtggagtgtcctctacgctcttcgctcccctccgccgccttcgttcgttgcttcctgtggcccatgggctcctccgccgtactattcattttttgcatttggatgaatacagcttttgtttaggcttatgatgacctatgaacgatcttttcatttgacgtacattaatataatatagaaataaatgtgggaactattttattagcttaattgatgtctactgtatgtaacgaattttaaaattttgaagttctccataattcaattgaggcacacacgaacgtttttttctgtttgtgtgcaaaaaagagtaaatgtagaattcaaagtttacgtaaattgtgttcgtaattatgaacggtgaataatttgtccgttgaacaaaaaaaattgtaacatgtttttttcatgacatgaaattaaaattttgtttgtacgctaaatggctaaaaaacaatgtaatttatgaaatctgttagtaccgtagatatagaggatcgaatttagaggacattgctggaaatggagaagaaagaataaagaacggaatcttttagagagtgttgtaaaggacataaaatattcatttagaggatgaaatttagcggccgccgcaggagagagtcaatgagccagctcgtttccccctatgttttcccttacccaccccccaatggctgaagccggcggcccgaattcatgttcaccaatggctatggcagcgctcgaactacagaagatactggagacagaggacactcacgatcacggctcacctaggcggttcggcggacggcgattggcggggcggctcggtctggagctgaagccttggatggaggggtcacaccggtggccgcctcttgtgggccttatgggtggtgttgggccttctaagtatacaagtgtatacaggctcggtgagaagctgcgaagcctgcgagcccgaccgcgaccgagcagatcgttccgtcgtgcattcgtgcttcggttcttcccgtgctcgtcttcttggccgggacgaaagaaaagggggactttggctgtcgatggcagcggcgttggagttcctggaggcgcagggcgcgacccagccggagctcgcggaatggtacgcggcgctcgccgacctgtaccagcgaaagctatggcaccagctcaccctcaagctggagcagttcctcgccctcgccgtcgtccaggcgatgctctgattcatctttataatcatttcatctctgattttgagacaaagatcagtcttcttaaatttgctcacttcacagtcgtagtttcacaccagtatttggacaagaatgctggtataaattatcttgaaggcgtaatttcaaaactacgtgatacccgtgaatcgcgggttgaagagcccattctgtatgtaaagatgcagattgcaacatttcttcttgagaaagggaatcaaaaggattgtaagaatctgctagaagaaggcaaaaccactttggacagcatggttgatgttgatccttctgtacatggtacctattactgggtgtgttcacagtatcataaggcccgtcaagaatactcagaattctacaaaagctgtcttctttaccttgcgtacacgacagtgagcttgttgttacagtttttgataggatttgtatgagtttcagaacctggcacttgacctctcacttgctgctttattgggtgaaaacatttacaactttggggaactacttgcccatccgattgtaagtacaagttttgcactcttttgtgctgtcttctttagaactgagttgtacacaagtccttgattctgaattgttttgacatggacttcagttttgtccatacagaagattttagaatgcgattgctgtaatcaaatgcaaacttgctaagctgaatcgatgggtttttcttacatatggcatacgaatcattaatttcactcaacatgaaaatacagcctaataaacaaactttgctgtattcatgaaccaaactcgtggccatacctaacagcttgcatagtctaatttatcttccctatataatgcaagcaaagctggaaccgatgtcatgaatactggtgttgccttgagaaaaaatcatcaactgaattccgttgttgataccatgtagatccatagccttttgggaactcaggctgagtggatatttcatatgttgcaagctttcaactctgggaatctatccttgtatcaagaaatctgcaaagctcatagcaacgctttgagtgcacagcttgcattggtacaaaatgagaggaatctacttgaaaagatcaacatgctttgcttgatggaaatcattttcagtcgatcatctgaaaaccgcacgatcccaatgcgggatatagcagaacagaccaagctccctgttgaagatgtggagtatctattaatgaagagcctctctgctcgtctaatagaaggcataattgatcaggttgatggagttgtccatgtttcacgggttaaaccaagggtgttgggcatagaccaagtgaaatgcttgcatgaccggttggatacatggattgggaaggtcgatacgatcttgctttctgttgaagcggagacgccagacttggtgtcttcgtgatgttctgctcctctcgaaggatcactgtgacataatctgatgtgaacgaagtcgttagatatttatcgtgttgtcagcctgtaatcattggtgtaaacccctgtaacgattgtggtaacactgtaacctcgttgctgcagttttagtagtgtacattcttgaggaatcgttgtttcaaacaattgttcagctgactctcagctcaagatgtgtatcctcaaatatgccctcagctcccaagagatcggctctcagagaattcctgaacacagacagct

SEQ ID NO: 24200 - DNA, 4732 bp, Zea Mays
tgcaagtcgaaacaaatgaaactgtgttagcagcagtattttgttcaaagtgcacaacaaaattataccataaaatcatggttcttaaggcggtaaggcgaggcgacacacccctttcagccgcctaggcgcatgaagcgcgcggtgaggcgacgccttataaataaccttataagttataacaattaaaaactgcagacatatatataactgcagtgacataaacagtggtaattcagcacacataatccagcacacactagcaatataacaaaactacagtcacagaacaattgctgctgttcatcacccagtccataccagcacacataatccacataaaactacagcacacactagtcaaataacaacccctaaacagcagtacatcacccagttcctctctctcaatggccatgcccatcaccgagtcactcataatcatctaagctatcaaagatatcagcagctgctgcattttctccctcgtcagtgggctcatcagttgcatccccacgatctatcacatctgcatcatcatgtggatcttcttcctcatcatccagctgttcttcatcttgttcctcaatgaaatctaaaatatcatcatcaacatctggtgtgcagttcctggaacgattgctactgttcccacgagctttccttggaaaattacgacctcaaagagcttcacttgcacctacagcttcatctacaagttgccatgtgaagtctggtacggtgctgcctcccccactgttgctctgatgtccgcctctccctctcctacgtgtgcttggtcgctcgcctctcccactcccacctgtgtaccaccggaagggtgaggggaggaagtcggtggcggcgcaggtggggagaggctggaggcggcagatagcctgtaaccggaggtggggactgggagaagcctccctccctccctcactctcaaaggaattttattccatcatccatataactcaccttacatcgagtgatcaaaacaccggaagatagataacctgtatttattaatttaagaaataaatcattgtttgaaggtgttcatttcattaaatattttattccataagtagataattagggccctgtttggccagggtttcttgaggggattcaattgtggcttctctgacttcttgggtgaagttcttcaaacgtgaacttaagaaacggtttcacaagaggaactccatccagtttttttttttactacgaggatgaagccacataagcgtgccttctccagcttctctggtttcttgatgagtctggaactttggatacaaagtaccaaataggacttaagtgaatatgtaacaagtatctgacatggggcttaccaaaagcagattccccttctccctcataaacaatagcatcagcattagcacttcgttaggtacttggggccaagcaactctatgaattgctactcaagacacttcaaatctataaaattatgcaattggctaatgagcaatctaattttgtactcactttttttccaagaacccaacataacttgagtattcaacaaatcaaagttccaactagtgcagggaacatagatgtttgtaccgtttctttgaaaggaggagacaaccatgtgtgctgttgtgccagcacttgtaggtttgacacctctcggtcctcacctcctaggccacgctcgtgcctgtctccagcaaggacctgcaaaccgtcctgttcgctatatttagcggatcatgagctcctctatacgtccagcaatgcattgtaaaccgcccgctacgatagcggaggcagccgacgttctccaaatgtggagtgtcctctacgctcttcgctcccctccgccgccttcgttcgttgcttcctgtggcccatgggctcctccgccgtactattcattttttgcatttggatgaatacagcttttgtttaggcttatgatgacctatgaacgatcttttcatttgacgtacattaatataatatagaaataaatgtgggaactattttattagcttaattgatgtctactgtatgtaacgaattttaaaattttgaagttctccataattcaattgaggcacacacgaacgtttttttctgtttgtgtgcaaaaaagagtaaatgtagaattcaaagtttacgtaaattgtgttcgtaattatgaacggtgaataatttgtccgttgaacaaaaaaaattgtaacatgtttttttcatgacatgaaattaaaattttgtttgtacgctaaatggctaaaaaacaatgtaatttatgaaatctgttagtaccgtagatatagaggatcgaatttagaggacattgctggaaatggagaagaaagaataaagaacggaatcttttagagagtgttgtaaaggacataaaatattcatttagaggatgaaatttagcggccgccgcaggagagagtcaatgagccagctcgtttccccctatgttttcccttacccaccccccaatggctgaagccggcggcccgaattcatgttcaccaatggctatggcagcgctcgaactacagaagatactggagacagaggacactcacgatcacggctcacctaggcggttcggcggacggcgattggcggggcggctcggtctggagctgaagccttggatggaggggtcacaccggtggccgcctcttgtgggccttatgggtggtgttgggccttctaagtatacaagtgtatacaggctcggtgagaagctgcgaagcctgcgagcccgaccgcgaccgagcagatcgttccgtcgtgcattcgtgcttcggttcttcccgtgctcgtcttcttggccgggacgaaagaaaagggggactttggctgtcgatggcagcggcgttggagttcctggaggcgcagggcgcgacccagccggagctcgcggaatggtacgcggcgctcgccgacctgtaccagcgaaagctatggcaccagctcaccctcaagctggagcagttcctcgccctcgccgtcgtccaggcaggcgatgctctgattcatctttataatcatttcatctctgattttgagacaaagatcagtcttcttaaatttgctcacttcacagtcgtagtttcacaccagtatttggacaagaatgctggtataaattatcttgaaggcgtaatttcaaaactacgtgatacccgtgaatcgcgggttgaagagcccattctgtatgtaaagatgcagattgcaacatttcttcttgagaaagggaatcaaaaggattgtaagaatctgctagaagaaggcaaaaccactttggacagcatggttgatgttgatccttctgtacatggtacctattactgggtgtgttcacagtatcataaggcccgtcaagaatactcagaattctacaaaagctgtcttctttaccttgcgtacacgacagtgagcttgttgttacagtttttgataggatttgtatgagtttcagaacctggcacttgacctctcacttgctgctttattgggtgaaaacatttacaactttggggaactacttgcccatccgattgtaagtacaagttttgcactcttttgtgctgtcttctttagaactgagttgtacacaagtccttgattctgaattgttttgacatggacttcagttttgtccatacagaagattttagaatgcgattgctgtaatcaaatgcaaacttgctaagctgaatcgatgggtttttcttacatatggcatacgaatcattaatttcactcaacatgaaaatacagcctaataaacaaactttgctgtattcatgaaccaaactcgtggccatacctaacagcttgcatagtctaatttatcttccctatataatgcaagcaaagctggaaccgatgtcatgaatactggtgttgccttgagaaaaaatcatcaactgaattccgttgttgataccatgtagatccatagccttttgggaactcaggctgagtggatatttcatatgttgcaagctttcaactctgggaatctatccttgtatcaagaaatctgcaaagctcatagcaacgctttgagtgcacagcttgcattggtacaaaatgagaggaatctacttgaaaagatcaacatgctttgcttgatggaaatcattttcagtcgatcatctgaaaaccgcacgatcccaatgcgggatatagcagaacagaccaagctccctgttgaagatgtggagtatctattaatgaagagcctctctgctcgtctaatagaaggcataattgatcaggttgatggagttgtccatgtttcacgggttaaaccaagggtgttgggcatagaccaagtgaaatgcttgcatgaccggttggatacatggattgggaaggtcgatacgatcttgctttctgttgaagcggagacgccagacttggtgtcttcgtgatgttctgctcctctcgaaggatcactgtgacataatctgatgtgaacgaagtcgttagatatttatcgtgttgtcagcctgtaatcattggtgtaaacccctgtaacgattgtggtaacactgtaacctcgttgctgcagttttagtagtgtacattcttgaggaatcgttgtttcaaacaattgttcagctgactctcagctcaagatgtgtatcctcaaatatgccctcagctcccaagagatcggctctcagagaattcctgaacacagacagct

SEQ ID NO: 24201 - DNA, 4989 bp, Zea Mays
catcattgagttcaattgagtcttcagtcaccacattaagctgttccagtgagtatgggtgctctggatcctttatatctctaatgtgatgtaagaacgttaaggaccgcaacaaccaaattgctaggatagaggattcacagataaatgaaaaggcaagcttcactacatttatataagggaaatcattaagaaggatatcaaatatttccagctggtctatggactctaccgcattttcatctgtggtctctggtgcctgtcggatgcgtctttcttttttctcatggattataggattagcattaatcaaccccatagccatttctatggaatacaatgcagtaactttagatgaggaaaacaaattcctgcaagtcgaaacaaatgaaactgtgttagcagcagtattttgttcaaagtgcacaacaaaattataccataaaatcatggttcttaaggcggtaaggcgaggcgacacacccctttcagccgcctaggcgcatgaagcgcgcggtgaggcgacgccttataaataaccttataagttataacaattaaaaactgcagacatatatataactgcagtgacataaacagtggtaattcagcacacataatccagcacacactagcaatataacaaaactacagtcacagaacaattgctgctgttcatcacccagtccataccagcacacataatccacataaaactacagcacacactagtcaaataacaacccctaaacagcagtacatcacccagttcctctctctcaatggccatgcccatcaccgagtcactcataatcatctaagctatcaaagatatcagcagctgctgcattttctccctcgtcagtgggctcatcagttgcatccccacgatctatcacatctgcatcatcatgtggatcttcttcctcatcatccagctgttcttcatcttgttcctcaatgaaatctaaaatatcatcatcaacatctggtgtgcagttcctggaacgattgctactgttcccacgagctttccttggaaaattacgacctcaaagagcttcacttgcacctacagcttcatctacaagttgccatgtgaagtctggtacggtgctgcctcccccactgttgctctgatgtccgcctctccctctcctacgtgtgcttggtcgctcgcctctcccactcccacctgtgtaccaccggaagggtgaggggaggaagtcggtggcggcgcaggtggggagaggctggaggcggcagatagcctgtaaccggaggtggggactgggagaagcctccctccctccctcactctcaaaggaattttattccatcatccatataactcaccttacatcgagtgatcaaaacaccggaagatagataacctgtatttattaatttaagaaataaatcattgtttgaaggtgttcatttcattaaatattttattccataagtagataattagggccctgtttggccagggtttcttgaggggattcaattgtggcttctctgacttcttgggtgaagttcttcaaacgtgaacttaagaaacggtttcacaagaggaactccatccagtttttttttttactacgaggatgaagccacataagcgtgccttctccagcttctctggtttcttgatgagtctggaactttggatacaaagtaccaaataggacttaagtgaatatgtaacaagtatctgacatggggcttaccaaaagcagattccccttctccctcataaacaatagcatcagcattagcacttcgttaggtacttggggccaagcaactctatgaattgctactcaagacacttcaaatctataaaattatgcaattggctaatgagcaatctaattttgtactcactttttttccaagaacccaacataacttgagtattcaacaaatcaaagttccaactagtgcagggaacatagatgtttgtaccgtttctttgaaaggaggagacaaccatgtgtgctgttgtgccagcacttgtaggtttgacacctctcggtcctcacctcctaggccacgctcgtgcctgtctccagcaaggacctgcaaaccgtcctgttcgctatatttagcggatcatgagctcctctatacgtccagcaatgcattgtaaaccgcccgctacgatagcggaggcagccgacgttctccaaatgtggagtgtcctctacgctcttcgctcccctccgccgccttcgttcgttgcttcctgtggcccatgggctcctccgccgtactattcattttttgcatttggatgaatacagcttttgtttaggcttatgatgacctatgaacgatcttttcatttgacgtacattaatataatatagaaataaatgtgggaactattttattagcttaattgatgtctactgtatgtaacgaattttaaaattttgaagttctccataattcaattgaggcacacacgaacgtttttttctgtttgtgtgcaaaaaagagtaaatgtagaattcaaagtttacgtaaattgtgttcgtaattatgaacggtgaataatttgtccgttgaacaaaaaaaattgtaacatgtttttttcatgacatgaaattaaaattttgtttgtacgctaaatggctaaaaaacaatgtaatttatgaaatctgttagtaccgtagatatagaggatcgaatttagaggacattgctggaaatggagaagaaagaataaagaacggaatcttttagagagtgttgtaaaggacataaaatattcatttagaggatgaaatttagcggccgccgcaggagagagtcaatgagccagctcgtttccccctatgttttcccttacccaccccccaatggctgaagccggcggcccgaattcatgttcaccaatggctatggcagcgctcgaagtatgaagtgatcagtgggaggtgctcacactggatgacacaaacggaaagggctgaaaagaaccgatctcgctccagcttgggctatttggcagttcggccattgccatcagccaagtcaagttaaactgggtcatctaatacagaaatacacctaattcggcctcgcgtgttcatcttcccatagcgctcacgccaggatttgggagagaaattgaagggaattctgtagctgtttctactctggacaattgtacatcaactagccgtctgttcctacagctacagaagatactggagacagaggacactcacgatcacggctcacctaggcggttcggcggacggcgattggcggggcggctcggtctggagctgaagccttggatggaggggtcacaccggtggccgcctcttgtgggccttatgggtggtgttgggccttctaagtatacaagtgtatacaggctcggtgagaagctgcgaagcctgcgagcccgaccgcgaccgagcagatcgttccgtcgtgcattcgtgcttcggttcttcccgtgctcgtcttcttggccgggacgaaagaaaagggggactttggctgtcgatggcagcggcgttggagttcctggaggcgcagggcgcgacccagccggagctcgcggaatggtacgcggcgctcgccgacctgtaccagcgaaagctatggcaccagctcaccctcaagctggagcagttcctcgccctcgccgtcgtccaggcaggcgatgctctgattcatctttataatcatttcatctctgattttgagacaaagatcagtcttcttaaatttgctcacttcacagtcgtagtttcacaccagtatttggacaagaatgctggtataaattatcttgaaggcgtaatttcaaaactacgtgatacccgtgaatcgcgggttgaagagcccattctgtatgtaaagatgcagattgcaacatttcttcttgagaaagggaatcaaaaggattgtaagaatctgctagaagaaggcaaaaccactttggacagcatggttgatgttgatccttctgtacatggtacctattactgggtgtgttcacagtatcataaggcccgtcaagaatactcagaattctacaaaagctgtcttctttaccttgcgtacacgacagtgagcttgttgttacagtttttgataggatttgtatgagtttcagaacctggcacttgacctctcacttgctgctttattgggtgaaaacatttacaactttggggaactacttgcccatccgattatccatagccttttgggaactcaggctgagtggatatttcatatgttgcaagctttcaactctgggaatctatccttgtatcaagaaatctgcaaagctcatagcaacgctttgagtgcacagcttgcattggtacaaaatgagaggaatctacttgaaaagatcaacatgctttgcttgatggaaatcattttcagtcgatcatctgaaaaccgcacgatcccaatgcgggatatagcagaacagaccaagctccctgttgaagatgtggagtatctattaatgaagagcctctctgctcgtctaatagaaggcataattgatcaggttgatggagttgtccatgtttcacgggttaaaccaagggtgttgggcatagaccaagtgaaatgcttgcatgaccggttggatacatggattgggaaggtcgatacgatcttgctttctgttgaagcggagacgccagacttggtgtcttcgtgatgttctgctcctctcgaaggatcactgtgacataatctgatgtgaacgaagtcgttagatatttatcgtgttgtcagcctgtaatcattggtgtaaacccctgtaacgattgtggtaacactgtaacctcgttgctgcagttttagtagtgtacattcttgaggaatcgttgtttcaaacaattgttcagctgactctcagctcaagatgtgtatcctcaaatatgccctcagctcccaagagatcggctctcagagaattcctgaacacagacagct

SEQ ID NO: 24202 - DNA, 5300 bp, Zea Mays
ggaagaggcaaagaagcacaaacagttcagacttaatttttttttcttttttcagaataatagtatctatactattaaaagattgaaaatttagatatatatcattaactcatgtgaattccaatcatttccgataaaacaattagatccacgatcaggacacggcaatttccgatgggcgtaccttgcgttgtggccggagctgcagcgggggagttggagcggtacaccgaagctagagcggacgctggagttggagctggacataggcgggcgggggaagctgggagctggagctggagcagtagcagtaggccggacgccggagttggagctggagcgcagccgcgcctacgcagaagcagaacgccggacgccgggaggcgggagcagtggatggcgggctgcggcaggcggcggccgagcagtggagaggctctaggttggctggtgggcgcctgggcggtctcggctgcctgcgggctgcggtagtgcggtcagggtcagggagacgagctttttttttttttggaaccgtgatatcgtcgatactggacttctgaaaataggtatctcaaacagaataattaaaattttagtattataattagttgaactttggaattatacgatctacgacagatttagccgcagtaatcctcgtaattttacggcagtccgtttcttaccacggatccaccaccgctcctctccccgagcgctgctcttcctcgggcatctccgccgcgcggatggtgatggtctcgggcggcgtcgctgttggatattcttcctaagtgggcaagtggctattgggctgactggtgactgttgtgtgttcttttttttttacattcggcttacgcgatataaaaaccgaaccctaactcgataaccgaataagtacgatatgtggatcgaacccgaaaaaccgaccaattcgatctattcgggttcggattcggttcatggggtttaaaatgccaagccctacacagcctgcctcgcttggtgtcgaccgatcccatcggtttgggctgggcttgagcccaatgtctttctttgctaatggaaatggtaaatttgtgtataactgtatatcctccaaaccaggaatgaaaaacttgagaagggggagagaaaaaaaaatgagcactgtagaattttgggtgaggaagtgggcaagtggcatatggttttggcaaaacctatattctggtaccacatcgcagcaaactttctcgagaccatctattgcgaaagtttgttcaattattgtgtctttaacatgttgcttctttaacagagctggaaaagacgtcactaatacaataaataaatagcaccctttacattggtttcgtctatattttccttaataaaaaatggtttcgcttatatatatataccttggtgcacaacgaagagtgtggagtcttcggctaattaaatgtgtagtagccaaccaagacattcaagataaatagtttaagagcaactctagaaagatgctaaaaaagtttttccaaaacattattattaggggcatgttaaaaaaatagaggtgaaatatggtatatactccaacagtttcttcaaacaaatgctaaaatacagtaaactaagctaaattaaaaaaacaaattcatctatacttgtgtgtgtgtgtttgggcctccggaccacattcctacatgctacctctattggtctatcatgttgatcgtttatattttggtggtttgctatttaacactgccatgttgaggtgagtatcacttgcaagaagctacatgttttagattaccgtgatcctgtgtcaaactctacaagtatttgattataatttaaactatgtcgtggcaacgactgaaatcatacaattcaatgccttcaaggaagtctgaaacataccgtttggcggcacaaatgatccagcaaggccgtcactgcgttcgaagaaggaagatgcacttggatccgagttcctactaccagcaaagttcctgccttcaaagaagatgtctccaccgtcacggtcgtcagctccatcaccggccatctaccacgaagagttcctaatgccgacggagaccctttccagcaaggcgcactgtcccagcgtgattgagctaagggatttcgggcagcagcccttgtcgggagcatatcatctgccgtgcctgcctcctctcggatcaacaatgcccagcgctgctttcgcactgccacctaggcctgctaatggcaaaaaatccaatccactcccacccatacccaaatctaattactttgatatccatcccacacccaaccaaaaaatactagagggaagttaaacccaacccatccaataacattattgatcccaaaccaacccgtaattgggtggaaacccatggaaaacccgtgggtttagcttattgtctcacatcaagccaactgcatacacattttaaaaatcacattttaaagcagtaaaataattcaaatgaaaaagttttcaactacaaatttgtataactcatcatgatgtacattttatattttgaacatttcttcatatgataaactaaaaatatatttgttcataaaacctatatctctctcatagtttatggaactacgagagatatgtatagaatttgtgcatattgttagaactatcatgtgagatgaacaaatgatcaaacaaccaaaataaactttgtagatcgtaaaaagttatagaagtttgtagttgacaacttttttatttgaagtcatattgtcaacgaaaactatgcctgaatttaaaaaatttaaaatttgaattttgaaaacaacctcgaaataaaaaaccaccaacatgaaagttgtaggtattgaagagttatgaaactttgtagttgacaatgttttggtttgaaatcatcttgccatgcaaaactatgtttgaattttgaatttttcaaactacctcggatggaaaaaccaccaaaataaaagttgtaggtcttgcaatgttatgaaactttgtaattgtcaacttttttatttgaaatcatcttataattgaaaaattcgtgtgaagttttcaaatttaaaattcaaattttgtaaacggtctcggacgtagaaactattaaaatagaatttgtagatatcaaaaagttatacaactttatagttggtcatattttttaaataaaatggtactgataaaatgatatagtatagtgtgttgtgtgtgactaaagaaatcaaagacttctctaaacctgaaataaaatggtactgattaaggtggtagtctgattggtgaatacccatggaaactcatacctatacaaatccatctatacccatgtgtatccaccattttgacccgcaatataaaataaacccacccaacccaacccgttaataattaaacccatcacaaacccaccaaaacaaaaccatttcttaaacccacctaaaatacccatttatacccaccccatttgcaggcctactgccaccagacgcggtcggcggctaatttggtagcacatatatgaaactagtgtgtttgaaaaaaaaggtcttgttcgtttgtactgaattggtgggtcggaacaattcctaatcggattgcttttctaatttatataaactttgattagctggaacgattccgggtgcaattcgacacaaacaaacaaggcctaaatcgattcagatgcccgggtcgggtctttgtctggatttgtggttggactaaaccgccacatggtttaatggttagtaaacggtagtgccctgtttccgccacatggtttatgtgtactagccccgtgcccgcataaaaaacaatataaaaaaccgggctatggttgaaagacccgagcgactcaacgaaacgcgggtactccgtcccaatcaactggcatgcattccgaccgcttcgcacgttgacagctcgccaccgctatatatccgcaccccgatccttgatgagcccttgaccgagctgcttgcactactgcaggtgatgatcctgttacatgatgtaagcagttattactgtactagtcgcatgaaacgaatggtcatgggacgtgtcccttcgcacgttctccactttcacatctcttcgcatgtgtcttcgcatgcgcccatgactaacgtgaacaagctccaaggctttcatgcccgagccaaacacccacccacgctgggcacgacgccgatgaccctcttggcccggcaactcgatcccgaggcatcccctacgatagagctctaatcaaagatacaaggagtaccggtgactcaccacgccttcagtgctcgcgcaagatcagtcggaatcaacatggattggacggccagcggtggagctgtccacggctgcgttctgcggcgacgtggccttgggttgcaactgctccaactgcgctggccacagtgaggtgagacatctgcggcatgagcacaagaatcaccacatcctcactgtggtcatcggttagagcttaaggcaggagagaaactctactagactatgccctttaagcagctgaactatgggatatgcccctgcacttgtcaaaaactcagtgtgcatgtactcccagggcgccagcagcacatggacacacctacgtggctgtcatgctcaagttcacagacacagcaaggaacacagaacttagtccccttctccagccaaaatatcacatgacatacaatacacaaatatcagcctggtccaacaagcagataagaacaccgagggcagactcaaatgaatctaaaaatgatatttactgcagggaaaactggatgtagtgtaacaaaattctagaatgagatcttaaaaataaggtatgaaccagatagggacaaagtggcaagaagaaatcgaaccaggcctggagcacgagcaggagcgtgaggggcagaagcctctcaggcccagccgcgtaccacagcaaggcgcccgcggcgcggcggacgagaacgggaggccgcgcgcctggcgcccgcacgccgtacatgaccagcagcaggccggcggacatgagcccgaacgccagggtgacttgccacgtggtgaagaggtcgagaggcgtgccgcagacggtgggcaggaggtacgacatggcggtggccacggcagcgagcccggtgccggcgaagtcggcgcgcccgtttcccgcgcggtccatgcgctcgacctacagtacttgtggtttccggcaaacagtgatgatgatgcgatgcacacctgcacaagttgcaggaaagtctctactgcaactgctgcagtctga

SEQ ID NO: 24203 - DNA, 5092 bp, Zea Mays
gaaagcccaggggatggagcgcaaaaggcgaccgtgaagaagacggcgctggagtctgaactctgaacagcggaagaggcaaagaagcacaaacagttcagacttaatttttttttcttttttcagaataatagtatctatactattaaaagattgaaaatttagatatatatcattaactcatgtgaattccaatcatttccgataaaacaattagatccacgatcaggacacggcaatttccgatgggcgtaccttgcgttgtggccggagctgcagcgggggagttggagcggtacaccgaagctagagcggacgctggagttggagctggacataggcgggcgggggaagctgggagctggagctggagcagtagcagtaggccggacgccggagttggagctggagcgcagccgcgcctacgcagaagcagaacgccggacgccgggaggcgggagcagtggatggcgggctgcggcaggcggcggccgagcagtggagaggctctaggttggctggtgggcgcctgggcggtctcggctgcctgcgggctgcggtagtgcggtcagggtcagggagacgagctttttttttttttggaaccgtgatatcgtcgatactggacttctgaaaataggtatctcaaacagaataattaaaattttagtattataattagttgaactttggaattatacgatctacgacagatttagccgcagtaatcctcgtaattttacggcagtccgtttcttaccacggatccaccaccgctcctctccccgagcgctgctcttcctcgggcatctccgccgcgcggatggtgatggtctcgggcggcgtcgctgttggatattcttcctaagtgggcaagtggctattgggctgactggtgactgttgtgtgttcttttttttttacattcggcttacgcgatataaaaaccgaaccctaactcgataaccgaataagtacgatatgtggatcgaacccgaaaaaccgaccaattcgatctattcgggttcggattcggttcatggggtttaaaatgccaagccctacacagcctgcctcgcttggtgtcgaccgatcccatcggtttgggctgggcttgagcccaatgtctttctttgctaatggaaatggtaaatttgtgtataactgtatatcctccaaaccaggaatgaaaaacttgagaagggggagagaaaaaaaaatgagcactgtagaattttgggtgaggaagtgggcaagtggcatatggttttggcaaaacctatattctggtaccacatcgcagcaaactttctcgagaccatctattgcgaaagtttgttcaattattgtgtctttaacatgttgcttctttaacagagctggaaaagacgtcactaatacaataaataaatagcaccctttacattggtttcgtctatattttccttaataaaaaatggtttcgcttatatatatataccttggtgcacaacgaagagtgtggagtcttcggctaattaaatgtgtagtagccaaccaagacattcaagataaatagtttaagagcaactctagaaagatgctaaaaaagtttttccaaaacattattattaggggcatgttaaaaaaatagaggtgaaatatggtatatactccaacagtttcttcaaacaaatgctaaaatacagtaaactaagctaaattaaaaaaacaaattcatctatacttgtgtgtgtgtgtttgggcctccggaccacattcctacatgctacctctattggtctatcatgttgatcgtttatattttggtggtttgctatttaacactgccatgttgaggtgagtatcacttgcaagaagctacatgttttagattaccgtgatcctgtgtcaaactctacaagtatttgattataatttaaactatgtcgtggcaacgactgaaatcatacaattcaatgccttcaaggaagtctgaaacataccgtttggcggcacaaatgatccagcaaggccgtcactgcgttcgaagaaggaagatgcacttggatccgagttcctactaccagcaaagttcctgccttcaaagaagatgtctccaccgtcacggtcgtcagctccatcaccggccatctaccacgaagagttcctaatgccgacggagaccctttccagcaaggcgcactgtcccagcgtgattgagctaagggatttcgggcagcagcccttgtcgggagcatatcatctgccgtgcctgcctcctctcggatcaacaatgcccagcgctgctttcgcactgccacctaggcctgctaatggcaaaaaatccaatccactcccacccatacccaaatctaattactttgatatccatcccacacccaaccaaaaaatactagagggaagttaaacccaacccatccaataacattattgatcccaaaccaacccgtaattgggtggaaacccatggaaaacccgtgggtttagcttattgtctcacatcaagccaactgcatacacattttaaaaatcacattttaaagcagtaaaataattcaaatgaaaaagttttcaactacaaatttgtataactcatcatgatgtacattttatattttgaacatttcttcatatgataaactaaaaatatatttgttcataaaacctatatctctctcatagtttatggaactacgagagatatgtatagaatttgtgcatattgttagaactatcatgtgagatgaacaaatgatcaaacaaccaaaataaactttgtagatcgtaaaaagttatagaagtttgtagttgacaacttttttatttgaagtcatattgtcaacgaaaactatgcctgaatttaaaaaatttaaaatttgaattttgaaaacaacctcgaaataaaaaaccaccaacatgaaagttgtaggtattgaagagttatgaaactttgtagttgacaatgttttggtttgaaatcatcttgccatgcaaaactatgtttgaattttgaatttttcaaactacctcggatggaaaaaccaccaaaataaaagttgtaggtcttgcaatgttatgaaactttgtaattgtcaacttttttatttgaaatcatcttataattgaaaaattcgtgtgaagttttcaaatttaaaattcaaattttgtaaacggtctcggacgtagaaactattaaaatagaatttgtagatatcaaaaagttatacaactttatagttggtcatattttttaaataaaatggtactgataaaatgatatagtatagtgtgttgtgtgtgactaaagaaatcaaagacttctctaaacctgaaataaaatggtactgattaaggtggtagtctgattggtgaatacccatggaaactcatacctatacaaatccatctatacccatgtgtatccaccattttgacccgcaatataaaataaacccacccaacccaacccgttaataattaaacccatcacaaacccaccaaaacaaaaccatttcttaaacccacctaaaatacccatttatacccaccccatttgcaggcctactgccaccagacgcggtcggcggctaatttggtagcacatatatgaaactagtgtgtttgaaaaaaaaggtcttgttcgtttgtactgaattggtgggtcggaacaattcctaatcggattgcttttctaatttatataaactttgattagctggaacgattccgggtgcaattcgacacaaacaaacaaggcctaaatcgattcagatgcccgggtcgggtctttgtctggatttgtggttggactaaaccgccacatggtttaatggttagtaaacggtagtgccctgtttccgccacatggtttatgtgtactagccccgtgcccgcataaaaaacaatataaaaaaccgggctatggttgaaagacccgagcgactcaacgaaacgcgggtactccgtcccaatcaactggcatgcattccgaccgcttcgcacgttgacagctcgccaccgctatatatccgcaccccgatccttgatgagcccttgaccgagctgcttgcactactgcaggtgatgatccacgccttcagtgctcgcgcaagatcagtcggaatcaacatggattggacggccagcggtggagctgtccacggctgcgttctgcggcgacgtggccttgggttgcaactgctccaactgcgctggccacagtgaggtgagacatctgcggcatgagcacaagaatcaccacatcctcactgtggtcatcggttagagcttaaggcaggagagaaactctactagactatgccctttaagcagctgaactatgggatatgcccctgcacttgtcaaaaactcagtgtgcatgtactcccagggcgccagcagcacatggacacacctacgtggctgtcatgctcaagttcacagacacagcaaggaacacagaacttagtccccttctccagccaaaatatcacatgacatacaatacacaaatatcagcctggtccaacaagcagataagaacaccgagggcagactcaaatgaatctaaaaatgatatttactgcagggaaaactggatgtagtgtaacaaaattctagaatgagatcttaaaaataaggtatgaaccagatagggacaaagtggcaagaagaaatcgaaccaggcctggagcacgagcaggagcgtgaggggcagaagcctctcaggcccagccgcgtaccacagcaaggcgcccgcggcgcggcggacgagaacgggaggccgcgcgcctggcgcccgcacgccgtacatgaccagcagcaggccggcggacatgagcccgaacgccagggtgacttgccacgtggtgaagaggtcgagaggcgtgccgcagacggtgggcaggaggtacgacatggcggtggccacggcagcgagcccggtgccggcgaagtcggcgcgcccgtttcccgcgcggtccatgcgctcgacctacagtacttgtggtttccggcaaacagtgatgatgatgcgatgcacacctgcacaagttgcaggaaagtctctactgcaactgctgcagtctga

SEQ ID NO: 24204 - DNA, 2446 bp, Zea Mays
cgactcgccgccgccgcagtcgcaaagcggaagcgcggaccatcttctcccgggtcgaatctctccaccgtgtaacacacagccttgacggccggcccgccaccgcgagatgcctcggaagtcgcacaaggcgaggggcgcggccgcgcacgccgccgttggtctcacggccgggccgaggcctcccctgaaggccacggccccaaaccctagcgccgccgccgagcttccccaggtcgtcgttgccgaggcagagggcctcaaggtacctgacgccggggcgtccgccgccgctgacgccctggagcgcctccacgtcgcccctgctcccgacggtgatccgccgcctcccgagcccgtgcacgagcccgccgcgccgcctcagcccccgccggccgaggcgtcgtcttctgggaggtctgcggcgggcgggagttgggaggaggaggctgtaaggaagctgcgggagctggcggaggttagtcgggatgagacggagttgaccgaggaggaggtgcgcgccaatgatcagaggcaggaggacgagatctgtgccctcgaagcaatttttggagatgctgtagtgattttggacagaaagggaggccagcggtctttccaggttcttgtgcatattgaggttccagattatatagatgtatcaacaaagctcagttatggtgatggaacattaaattatgcggcaacacatgatgatgatgaccttttctacaagttcagagttgagcatttgcctccgatcctgctaacatgtctcctgcctacatcatacccaagtcaccgtcctccctttttcactatatccacatattggcttgataaaggcatgatttcaccattatgtcgcatgcttgacatgctttgggaagagcaacaagggatggaaatggtgaagataagcgtgcttgtccagattatgcttcaccagatgttataattccaaggatgatgagatacaatgacaataagcatcatgaagctttcttacatgctatccatgattgcatgatttgtttaagcgagtgtcctggtgttgatttcatcaaacttccgtgtcaccatttcttttgctggaaatgcatgcaaacttactgcaaaatgaatgtcaaggaaggaaatgtagtgaagttgctatgtcctgatacaaaatgtgaaggtgctgttcctccgaatgtattgaaaaggctgcttggagaggatgaatatgaacgttgggagggattattgcttcagaaaacccttgatgccatgaaagatgttgtctactgtccaagatgtcaaactgcttgcttggaggacgtaggtaatgaagcagtatgttcaagttgtttgttcagcttttgcactctctgtagaaatcgccgccatattggagagcaatgtatgtctccagaagagagacttatgatcttggagaaacgccaagaatctgggaatgtgcaaggagatcagatgaaagttctacaggaactacgcagcctgaaggaaattatgaaggattcaaaacagtgcccaaaatgcaggatggccatatctaagacagaaggatgcaataagatgcattgtgagaactgtggggagtacttctgctatcaatgcaaccgtgcgatcactggatatgagcatttcaggggttcgtgtgtgcttttccctcaagaggaattggacagatgggaaatgcaaatgaatcaaagggtcggacgccaaattgttgcacatgctcatgctgcaatacatgggcagaatggtcaagctcatccttgccctacatgtcggcaaccgtctccaaagatcggaaacaacaaccacctcttctgttgggcatgccagaagcatttttgtgccctgtgccataaggctgtccaaaagcccgcacagcattatggccccaaaggatgcaagcaacatacggcagatccctgaatgaggttttcccatatgtgcatcaacaccgtggtgccagtgcagtttcgaagtgttctgtgcaagtacagataaatacttgtcctgggacgtacttcactcctggattccattattgttattattttttttgctgcaagcatgttttgaagtttccgtcgtcgttgtacctacagtaacagttgtgcagtttacattcgggaacatgaacaggaactgttcattcattcgttcagtaccagatggattgttgagaatactcgggtgttgaagttgagaatactcgcgtattaaagatgcgattgaacacaagtccaaaaccgatagaaccttgtaaaattctaaaagggaagattatttgttgtactgttggattgatcttatgccaatacaaaggaagctgtcattgtttggttatatggtttcaaattttaacttggcgttcccgatggtcggacctgtggtttgagtgactgttgtcattggaatattgaatgttctt

SEQ ID NO: 24205 - DNA, 2497 bp, Zea Mays
aagccggcctcttccaaaaatcgagcgtgtcgagattcgtgtccgcctgctgacgcgggcacgactcgccgccgccgcagtcgcaaagcggaagcgcggaccatcttctcccgggtcgaatctctccaccgtgtaacacacagccttgacggccggcccgccaccgcgagatgcctcggaagtcgcacaaggcgaggggcgcggccgcgcacgccgccgttggtctcacggccgggccgaggcctcccctgaaggccacggccccaaaccctagcgccgccgccgagcttccccaggtcgtcgttgccgaggcagagggcctcaaggtacctgacgccggggcgtccgccgccgctgacgccctggagcgcctccacgtcgcccctgctcccgacggtgatccgccgcctcccgagcccgtgcacgagcccgccgcgccgcctcagcccccgccggccgaggcgtcgtcttctgggaggtctgcggcgggcgggagttgggaggaggaggctgtaaggaagctgcgggagctggcggaggttagtcgggatgagacggagttgaccgaggaggaggtgcgcgccaatgatcagaggcaggaggacgagatctgtgccctcgaagcaatttttggagatgctgtagtgattttggacagaaagggaggccagcggtctttccaggttcttgtgcatattgaggttccagattatatagatgtatcaacaaagctcagttatggtgatggaacattaaattatgcggcaacacatgatgatgatgaccttttctacaagttcagagttgagcatttgcctccgatcctgctaacatgtctcctgcctacatcatacccaagtcaccgtcctccctttttcactatatccacatattggcttgataaaggcatgatttcaccattatgtcgcatgcttgacatgctttgggaagagcaacaagggatggaagtaacatatcaatgggtgcaatggctccagagttgttccctttctcacttagggtttactaatgaagtagttttgagaaagagttatgtaacatgttatgcagatggtgaagataagcgtgcttgtccagattatgcttcaccagatgttataattccaaggatgatgagatacaatgacaataagcatcatgaagctttcttacatgctatccatgattgcatgatttgtttaagcgagtgtcctggtgttgatttcatcaaacttccgtgtcaccatttcttttgctggaaatgcatgcaaacttactgcaaaatgaatgtcaaggaaggaaatgtagtgaagttgctatgtcctgatacaaaatgtgaaggtgctgttcctccgaatgtattgaaaaggctgcttggagaggatgaatatgaacgttgggagggattattgcttcagaaaacccttgatgccatgaaagatgttgtctactgtccaagatgtcaaactgcttgcttggaggacgtagaaacgccaagaatctgggaatgtgcaaggagatcagatgaaagttctacaggaactacgcagcctgaaggaaattatgaaggattcaaaacagtgcccaaaatgcaggatggccatatctaagacagaaggatgcaataagatgcattgtgagaactgtggggagtacttctgctatcaatgcaaccgtgcgatcactggatatgagcatttcaggggttcgtgtgtgcttttccctcaagaggaattggacagatgggaaatgcaaatgaatcaaagggtcggacgccaaattgttgcacatgctcatgctgcaatacatgggcagaatggtcaagctcatccttgccctacatgtcggcaaccgtctccaaagatcggaaacaacaaccacctcttctgttgggcatgccagaagcatttttgtgccctgtgccataaggctgtccaaaagcccgcacagcattatggccccaaaggatgcaagcaacatacggcagatccctgaatgaggttttcccatatgtgcatcaacaccgtggtgccagtgcagtttcgaagtgttctgtgcaagtacagataaatacttgtcctgggacgtacttcactcctggattccattattgttattattttttttgctgcaagcatgttttgaagtttccgtcgtcgttgtacctacagtaacagttgtgcagtttacattcgggaacatgaacaggaactgttcattcattcgttcagtaccagatggattgttgagaatactcgggtgttgaagttgagaatactcgcgtattaaagatgcgattgaacacaagtccaaaaccgatagaaccttgtaaaattctaaaagggaagattatttgttgtactgttggattgatcttatgccaatacaaaggaagctgtcattgtttggttatatggtttcaaattttaacttggcgttcccgatggtcggacctgtggtttgagtgactgttgtcattggaatattgaatgttctt

SEQ ID NO: 24206 - DNA, 2350 bp, Zea Mays
agtaaaggaagccggcctcttccaaaaatcgagcgtgtcgagattcgtgtccgcctgctgacgcgggcacgactcgccgccgccgcagtcgcaaagcggaagcgcggaccatcttctcccgggtcgaatctctccaccgtgtaacacacagccttgacggccggcccgccaccgcgagatgcctcggaagtcgcacaaggcgaggggcgcggccgcgcacgccgccgttggtctcacggccgggccgaggcctcccctgaaggccacggccccaaaccctagcgccgccgccgagcttccccaggtcgtcgttgccgaggcagagggcctcaaggtacctgacgccggggcgtccgccgccgctgacgccctggagcgcctccacgtcgcccctgctcccgacggtgatccgccgcctcccgagcccgtgcacgagcccgccgcgccgcctcagcccccgccggccgaggcgtcgtcttctgggaggtctgcggcgggcgggagttgggaggaggaggctgtaaggaagctgcgggagctggcggaggttagtcgggatgagacggagttgaccgaggaggaggtgcgcgccaatgatcagaggcaggaggacgagatctgtgccctcgaagcaatttttggagatgctgtagtgattttggacagaaagggaggccagcggtctttccaggttcttgtgcatattgaggttccagattatatagatgtatcaacaaagctcagttatggtgatggaacattaaattatgcggcaacacatgatgatgatgaccttttctacaagttcagaatggtgaagataagcgtgcttgtccagattatgcttcaccagatgttataattccaaggatgatgagatacaatgacaataagcatcatgaagctttcttacatgctatccatgattgcatgatttgtttaagcgagtgtcctggtgttgatttcatcaaacttccgtgtcaccatttcttttgctggaaatgcatgcaaacttactgcaaaatgaatgtcaaggaaggaaatgtagtgaagttgctatgtcctgatacaaaatgtgaaggtgctgttcctccgaatgtattgaaaaggctgcttggagaggatgaatatgaacgttgggagggattattgcttcagaaaacccttgatgccatgaaagatgttgtctactgtccaagatgtcaaactgcttgcttggaggacgtaggtaatgaagcagtatgttcaagttgtttgttcagcttttgcactctctgtagaaatcgccgccatattggagagcaatgtatgtctccagaagagagacttatgatcttggagaaacgccaagaatctgggaatgtgcaaggagatcagatgaaagttctacaggaactacgcagcctgaaggaaattatgaaggattcaaaacagtgcccaaaatgcaggatggccatatctaagacagaaggatgcaataagatgcattgtgagaactgtggggagtacttctgctatcaatgcaaccgtgcgatcactggatatgagcatttcaggggttcgtgtgtgcttttccctcaagaggaattggacagatgggaaatgcaaatgaatcaaagggtcggacgccaaattgttgcacatgctcatgctgcaatacatgggcagaatggtcaagctcatccttgccctacatgtcggcaaccgtctccaaagatcggaaacaacaaccacctcttctgttgggcatgccagaagcatttttgtgccctgtgccataaggctgtccaaaagcccgcacagcattatggccccaaaggatgcaagcaacatacggcagatccctgaatgaggttttcccatatgtgcatcaacaccgtggtgccagtgcagtttcgaagtgttctgtgcaagtacagataaatacttgtcctgggacgtacttcactcctggattccattattgttattattttttttgctgcaagcatgttttgaagtttccgtcgtcgttgtacctacagtaacagttgtgcagtttacattcgggaacatgaacaggaactgttcattcattcgttcagtaccagatggattgttgagaatactcgggtgttgaagttgagaatactcgcgtattaaagatgcgattgaacacaagtccaaaaccgatagaaccttgtaaaattctaaaagggaagattatttgttgtactgttggattgatcttatgccaatacaaaggaagctgtcattgtttggttatatggtttcaaattttaacttggcgttcccgatggtcggacctgtggtttgagtgactgttgtcattggaatattgaatgttctt

SEQ ID NO: 24207 - DNA, 2860 bp, Zea Mays
tgacaagtcaaactcaaacgtgagcaaagatccatggacgaaaattcctagcgtgatcgggccatcgggccgggtcactcgaatgctcacagagtttcagtctcacaccactcagaaagtcagactcatgcagacaaatgaaacttccgcttttgccagcgcacctgtagccgcgtagcgcctaggcgcctagcgcgaccgcgagacgcggaagcagagcagagtaaaggaagccggcctcttccaaaaatcgagcgtgtcgagattcgtgtccgcctgctgacgcgggcacgactcgccgccgccgcagtcgcaaagcggaagcgcggaccatcttctcccgggtcgaatctctccaccgtgtaacacacagccttgacggccggcccgccaccgcgagatgcctcggaagtcgcacaaggcgaggggcgcggccgcgcacgccgccgttggtctcacggccgggccgaggcctcccctgaaggccacggccccaaaccctagcgccgccgccgagcttccccaggtcgtcgttgccgaggcagagggcctcaaggtacctgacgccggggcgtccgccgccgctgacgccctggagcgcctccacgtcgcccctgctcccgacggtgatccgccgcctcccgagcccgtgcacgagcccgccgcgccgcctcagcccccgccggccgaggcgtcgtcttctgggaggtctgcggcgggcgggagttgggaggaggaggctgtaaggaagctgcgggagctggcggaggttagtcgggatgagacggagttgaccgaggaggaggtgcgcgccaatgatcagaggcaggaggacgagaatgcaaatccattgctcagatctgtgccctcgaagcaatttttggagatgctgtagtgattttggacagaaagggaggccagcggtctttccaggttcttgtgcatattgaggttccagattatatagatgtatcaacaaagctcagttatggtgatggaacattaaattatgcggcaacacatgatgatgatgaccttttctacaagttcagagttgagcatttgcctccgatcctgctaacatgtctcctgcctacatcatacccaagtcaccgtcctccctttttcactatatccacatattggcttgataaaggcatgatttcaccattatgtcgcatgcttgacatgctttgggaagagcaacaagggatggaagtaacatatcaatgggtgcaatggctccagagttgttccctttctcacttagggtttactaatgaagtagttttgagaaagagttatgtaacatgttatgcagatggtgaagataagcgtgcttgtccagattatgcttcaccagatgttataattccaaggatgatgagatacaatgacaataagcatcatgaagctttcttacatgctatccatgattgcatgatttgtttaagcgagtgtcctggtgttgatttcatcaaacttccgtgtcaccatttcttttgctggaaatgcatgcaaacttactgcaaaatgaatgtcaaggaaggaaatgtagtgaagttgctatgtcctgatacaaaatgtgaaggtgctgttcctccgaatgtattgaaaaggctgcttggagaggatgaatatgaacgttgggagggattattgcttcagaaaacccttgatgccatgaaagatgttgtctactgtccaagatgtcaaactgcttgcttggaggacgtaggtaatgaagcagtatgttcaagttgtttgttcagcttttgcactctctgtagaaatcgccgccatattggagagcaatgtatgtctccagaagagagacttatgatcttggagaaacgccaagaatctgggaatgtgcaaggagatcagatgaaagttctacaggaactacgcagcctgaaggaaattatgaaggattcaaaacagtgcccaaaatgcaggatggccatatctaagacagaaggatgcaataagatgcattgtgagaactgtggggagtacttctgctatcaatgcaaccgtgcgatcactggatatgagcatttcaggggttcgtgtgtgcttttccctcaagaggaattggacagatgggaaatgcaaatgaatcaaagggtcggacgccaaattgttgcacatgctcatgctgcaatacatgggcagaatggtcaagctcatccttgccctacatgtcggcaaccgtctccaaagatcggaaacaacaaccacctcttctgttgggcatgccagaagcatttttgtgccctgtgccataaggctgtccaaaagcccgcacagcattatggccccaaaggatgcaagcaacatacggcagatccctgaatgaggttttcccatatgtgcatcaacaccgtggtgccagtgcagtttcgaagtgttctgtgcaagtacagataaatacttgtcctgggacgtacttcactcctggattccattattgttattattttttttgctgcaagcatgttttgaagtttccgtcgtcgttgtacctacagtaacagttgtgcagtttacattcgggaacatgaacaggaactgttcattcattcgttcagtaccagatggattgttgagaatactcgggtgttgaagttgagaatactcgcgtattaaagatgcgattgaacacaagtccaaaaccgatagaaccttgtaaaattctaaaagggaagattatttgttgtactgttggattgatcttatgccaatacaaaggaagctgtcattgtttggttatatggtttcaaattttaacttggcgttcccgatggtcggacctgtggtttgagtgactgttgtcattggaatattgaatgttctt

SEQ ID NO: 24208 - DNA, 1017 bp, Zea Mays
ctcctttcgcggcacctagaacaatcttcatcctgttggaccaaggtaggggaagagccccttcaagattaaacaaagtaagatgacaggatcataagaacgagcagatagaaagattatggttgacaagattaggcacataaaaataaaatcaacttttgtgaaaagctggcaatgtccctacccccttcaaaataataagggaaatttggatccataccattaaaagatcatcattttagatccataccattactatctcacttacatgtgggtccacatgagtcaatgacatatggggtccatggtatatatctaaagtttggatcttttaatggtataaatccaattgttccaaataataatggttacatgggtatgacctaataccaatataaaagttagcaatagaatgaacaccaccattggtagtaggcatgcatccttgctcactacagtactattgcaacttttttgtgtgtgcgaaatgcatctagtatttaactaagaagatctgaacaggtgtaactggcacaaatcaaacttaataagggcaggctaaaatgttcatgtctacattaccataatcaaatcaagttagaatgtacttatctctgatgtcacagaggatagagaacaaaaaaaatccaaggttgctcggaaaaatgaaagaagacttagtgaagaaaaaaactggttaggcctaagtggggaaacaaattagtaataaaggcactaaatctacttaacttaaagcattaactctgttaggtgattgcttacttctgaaaagatgattttcaagacttccccgtgccatgaattcatatacaagtaacctttgatcatcctcaatacaatatccaatcaacttaacaaggtgtttatgatgcaactgtcccagaaagtcaacttctgccacccattctctatgaccttgaagcgcatctggcttcaaactttttactgccacagtaacccctgtgccaggttttgcaggagcagtgctgtttggct

SEQ ID NO: 24209 - DNA, 90 bp, Zea Mays
tccctcggtttgcttttcttggcccgttcgccgagtttaatgcggggacggagggagggagggagagaagaggggccgagggggagagct

SEQ ID NO: 24210 - DNA, 2801 bp, Zea Mays
atggctgcccggtgtcccggccacttcgcctgcctccctccctccctcactctcttccgtcttcccaatgaaaacctgcgaggaaaatgtgaagacgggaccccacgcgaccaacagcagacccacagggatgctgatcggaggcggtgtcttctacttgtaggcgcaaccgcaggccgcagccccaccgctcccccgtccatcttctccaactagtggcagcgcggtcgcaaccgctcacccaccgctccctcccccaaatttctccgcaatcttagcactacccgttagggagcaacgccgacacagcaaaggcacaagaggaggccaggcaacagctgcagaaacgcaggcgccgcaatgcagggctccaataccaaatctagctccgccgaggcgaagagcaacagcaaaccggacaaggagaagaaggggggcggaggcggcacgccgccaacccccaaggacagcaagccgcgcaagccggccgtgcccaaggcaagcgccgccggccatggcacgccgcgggcggctgacaagtcccccggctcggggtcggccgaccgcaaggcgcccacgcccaaggccgccgcctctcgcctcgccacgcctcccgagcccgcaaagcggccgcaggagcagcaggcgcagcttgccgagatccgtgaagagctcgtgaaggccaaagagcagttgctggagaacgagaaggagaagtgcagagttcttgctgagctggagcgtgccaagaaggtggctgatgaggccaatgccaagctgcaagatgctcttgatgtgcaaaggagggctattgaggcgcaggaggcagacaaactccctgccggagagtcgaagcaggcaagcatccacgaccagcaggaggatgatgacgctgtgctgcggtcgacagtggagcagcttgagaaggctaggtacgagctggccgatgcagtcgatgccaagaatgaagccctcagccaggtagatgatgccgttagggcttctgaggtgaaggcccaggaagttgagcatctcattgcagaggttacacgcctcaaagggctggttgattccaaggtggatggcaacaggaagaagactgcagagaggattcagaatcttgaagaagagaactttgcattaaagcttgagcttcagaaaaaaaaggctgctgaagaaaaggcggttcgattggagcgcatgattgatgaacttgagagtgatgttgatgatgctaggaattttggttccaagtcaaagcagttagctgatgaatggcagaagaaggcacagcttctcgaggtcagattggaagaggctgatcagtctaatattttgaagggtgaatctttgaattcagcaatggaagaattggattcaacaagtagtttgcttcgtgacagagaatctgaagttgctgctcttcgtgacaaagtaaggttctttgaggatgagcagacaaagctcaagaatgatattgttgtgtccggccaacgggcagatgcagcagagaaagaggcggcggatctatggacagaggttgaagggcttaggctgaagctccatacagtggaagaagagaaaatggaggccctgaacagtgataagagtactaccttagaaactgagaccttgaatgaacagaagaaccagctgactgacaagcttgaggcaaacaaagatgagcttgagaaaactaagaaggcaatggagggtctggcctcagccttacaggaaatgtcagctgaatccagagaggcgcaagagaagtaccttctcaaacaagatgagattgagcgtgctcaggcacaggtagaggagcttagcttgagtctgaagaatactaaggagaactatgagctattgcttgatgaggcaaactatgagaaggtttgccttacgaaaacagttgaaagactgaaagcagaagcaaagagtgcacatgaggaatggcattccaaagagctaagttttgtcaattctattaagaattcagaggaagagatagttgctatcagagttcagatgatcaggaccttggaggttgttaaagagaaagaacgtgaaaacactgagttgcaggagaagctgcagcagcttgagtctcagctaatggaagcaaacagaatcagggaggaagccagcgctgaaactatccgatggaaggagaacatattagaccaagagaatgaattacagaacataaaacaggagaacgacgacctgcaggcaaaggaattagcagcttctgagaaggttaaggaactctctttccagcttgctaatgtaaaagatagcctgataaatggtaacaccaaggaaggagataatgagaaggggggtactgaagaggatgatgaacctgttgtggtagttgccaaaatgtgggagaacggcaagtttgctgactgtgattcatctaaggagaaggataatgatggtgactcgcaggttgatttggaatcaaacaagggggatgcaggtcttgacagcaatgggttgcactcaactaatgagagcagtggcagagcatcaactaaacagccgcaacagcataagaagcctttgctgaagagattcggtggtttgctgaagaagaaaagcgaaaagtagcataaaaccatctgatgatattctttgttctatcttttgacatatttctacatatttctttgattagctatctagttcctgagtcttcccccgatattatggtaaactgagtgatggatgcttcaaagaatacaaaatgtcgcctgtatttacatcactgccatgtcttacttttttgtatgtttggc

SEQ ID NO: 24211 - DNA, 2839 bp, Zea Mays
gtcctggcgacctggccacttcgcctatctgcctccctccctccctcctcgaataaaaacttgcgaggaaaatgtgaagaccccacgcgacccaacagcagacccacagggagtcagagatactgatcggaggcggtgtcttctacttctagccgcaaccgcaggccgcacgcagccccaccgctccgcccgtccatcctctccaactagtggcagcgcggtggcaaccgctcacccaccactcctcccccaaatttccccacaatcatagctctgcacgttagggagcgacgccgacgcaccaaaggaacgaggggaggccagggaacagcagatacgcaagcgccggaatgctgggctccaagacgaaatctggctccgccgaggcgaagagcaacggcaaaccggacaaggagaagaagggcggcggaggcggcacgccgccaacccccaaggacagcaagccgcgcaagccggccgagcagcacgcgcagcttgccgcgatccgagaagagctcgtgaaggccaaggagcagttggtggagaacgagaaggagaagtgcaaagtttttgctgagctggagcgtgccaagaaggtggctgatgaggccaatgccaagctgcaggatgcgcttgatgtgcaaaggagggctattgaggcgcaggaggcagacaaactccctgccagagagtcggagcaggcaagcatccatggccagcaggaggctgatgacgctgtgctgcggtcgacagtggagcagctggagaaggccaggtatgagctggccgacgcaatcgatgccaagaatgaagccctcagccaggtagatgatgccgttagggcttccgaggtgaaggcccaggaagttgagcatctcactgtagaggttacgcgcctcaaagggctggttgattccaaggtggatggcaacaggaagaagactgcagagaggattcagaatcttgaagaagagaactttgcattaaagcttgagcttgagaaaaaaaaggctgctgaagaaaaggcagttcgattggagcgcatgattgatgaacttaagagtgatgttgatgatgctaggaattttggttccaagtcaaagcagttagctgacgaatggcagaagaaggcacagcttctcgaggtcagattggaagaggctgatcagtctaatattttgaagggtgaatctttgaattcagcaatggaagaattggattcaacaagtagtttgcttcgtgacagagaatctgaagttgctgctcttcgtgacaaagtcaggttcttggaggatgagctgacaaagctcaagagtgatattgttgtgtccggccaacgggcagatgcagcagagaaagagacgacggatctatggacagagattgaagggcttaggctgaagctccatacagtggaagaagagaaaatggaggccttgaacagtgataagaatactagctcagaaattgagaccttgaatgaacagaagaaccagctggctgacgagcttgaggctagcaaagatgagcttgagaaaattaagaaggcaatggagggtctggcctcagccttacaggaaatgtcagctgaatccagagaggcgcaagaaaagtaccttctgaaacaagatgagatggagcgtgctcaggcacaggtagaggagcttaacttgagtctgaagaatattaaggagaactatgagctactgcttgatgaggcaaactatgagaaggtttgccttacgaaagcagttgaaagactggaagcagaagctaagagagcgcatgaggaatggcagtccaaagagctaagttttgtcagctctattaagaattcagaagaagagatagtcgctgtcagggttcaaatggacaggaccttggaggttgttaaggagaaagaaaatgaaaacacagagttgcaggagaagctgcagcagcttgaatctcagctaatggaagcgaacagaatcagagaggaaggcaacactgaaactatccgatggaaggagaacatattagaccaagagaatgaattacagaacataaaacaggagaatgacgacctgcaggcaaaggaatcagcagcttctgagaagattaaggaactctcttcccagcttactaatgcaaaagatggcacgataaatagtaacaccaaggatggagataatgagaaggggggcactgaagaggatgatgaacctgttgtagtagttgccaaaatgtgggagaacagcaagtttgctgactatgattcagctaaggaggagaatgatggcgactcacaggttgatttggaatcaaacaagggggatgcaggtcttgacagcaatgggttgcactcaactaaggagaacagtggcagggcatcaccaactaaacagcaccagcagtataagaagaagcctttgctgaagagattcggtggtctgctaaaaaagaaaagcgaaaattagcataaaaccggctgatgatattctttgttctatcatttgacatttctttgattagatatctagttcccgagtcttcccccatattatggtaaactaagtgatggatgcttcaaagaatacaaaatgtcgactttatttacataattgcctctcttgagttagggagtgttcgcagttcagttcagctgtctggtgtgagctgtctgctgtggaaaaactgttgtgagctaaactaaaagaaagtcgtttggttggagcttcggtgaaacattagatttttttatgatttatctgtattgcttctgagattgtttatatgcaaatgaccgtaatagaacgatttttgtgttgactgatgtgtgtttggcacagcttatttt

SEQ ID NO: 24212 - DNA, 1791 bp, Zea Mays
attggatcaagcaccgattgaggttggcgtggtgccgcgggcggtgtggtgatgcctgcgcttgtggtctgtgatggtggctcaacatcagcccatgccaaacggaggatggtggaggacagggccaatctatgggcggagcatggtggcaccagcaggtgcagaaaggagtggcggtggcggcgcgaatgcaggtggtgctgagagattgattgtcgatgcggcttgtcagcttgctgcccacgatcatgatgttcatgtcttcacatcacatcatgataaaaaacgttgctttgaggagactctttctggtttgtttccggttactgtacatggggatttcctgcctcgccatgtgttctaccgctttcatgctgtttgtgcttatcttcgctgcatttttgttgcgctctgtgtgctactcagatggcccttctttgatgtcatattggtagaccaggtttctgttgtgattccactacttaaactaatggcatcatcgaagataatattttactgtcatttccctgatctgttacttgcacaacatactactatgcttcggaggttatatcgcaagccaattgacatgattgaggaaagcactactggtatggctgatttgattcttgtcaatagcaagttcactgcagcaacttttgcaaggaccttttctggtttacatgctagaggaatcgagcctggtgttctttatccagctgtctctgttgagcagtttcacgaaccccatgcttataagttgaatttcctatcaatcaaccggtttgagaggaaaaagaatcttgatcttgccatttcagcatttgctttgctccgttctgctgcttggactctacctggtgatgctctacaagaagcaacattaacagtggcaggtggctatgataagcgtctcaaggaaaatgttgaataccttgaggaactcaaaagactcgcattgacggaaggggtttctggacaggttaattttgttacatcttgctcaacatctgaaagaaacgagcttctctccaactgcctctgcgttttatacactccaaaggatgaacatttcggtattgtacctcttgaagccatggccgcccataagccggtaattgcctgcaatagtggtggcccagtggaaacagttgtgaatgaagtaacagggtttctgtgtgatccctctcccgcagaattctccaaagccatgctgaaacttgtgaatgatcatgatcttgctgtcagattgggtgaacaagcacgtgaccatgtggtgcaaaaattctcgaccaagacatttggtgatctcctcaacagctacgtcttgaacatctaccatgagaggatggaatgatctataatattgggtcagccatgccatatgaaaacaatttgttcaatacaaggttttttttgcacctttacgtctaatctgattttgatggacacacataatgacaatgacattccattgaatccctttggcatactgtagtcactctatgatctgtatattgttttcaattataacatcaaatttggcttggtccatcctagaatctgaatggagctggagtagagatggcaatggggacccgatttcctgcggggaattcttctgttagagcaacttcaaaagaacgtgtaaactaaccccaaaacagatattagtcaagaatagtgatttttttactccaacaacttcctcaattttccccaaaaaattcgtgtcccgtattcacagcctcttgtccctcatattttggtgggtttcatcctctctaattc

SEQ ID NO: 24213 - DNA, 2138 bp, Zea Mays
ctgtctccctcgtccgtctcccctgccgcccagcccaccgccgcccctccctcgagttcccccgaacgccgcccctcaggttcccgggacgccgcccctcagttttcctggacgccgaccctccctcgaggttctccgtgtagatccgccacctctcccttgcacgaactcgcgcccctccgtcgaggtcccctggacgccgcgcccacccctagcgcctatcttgccaaacaccatcaaaactccagaggagttgccccaccagggagttttggagcagagcagctctaggtggagcagagctatgccaaacacgcttgtcccaaacaggacctgagacgaaccctttggcctcggctctcgtcttgtgagtgtgtaatctcggatcgggaaactcgactgcggggtcggagaagatggcggcggcgggagaagttgccggcgcttcgtcggggacgaggacgaagcggcttaagattgccgtcatccacccggatctcggaatcggtggtgctgagagattgattgtcgatgcggcttgtcagcttgctgcccacgatcatgatgttcatgtcttcacatcacatcatgataaaaaacgttgctttgaggagactctttctggtttgtttccggttactgtacatggggatttcctgcctcgccatgtgttctaccgctttcatgctgtttgtgcttatcttcgctgcatttttgttgcgctctgtgtgctactcagatggcccttctttgatgtcatattggtagaccaggtttctgttgtgattccactacttaaactaatggcatcatcgaagataatattttactgtcatttccctgatctgttacttgcacaacatactactatgcttcggaggttatatcgcaagccaattgacatgattgaggaaagcactactggtatggctgatttgattcttgtcaatagcaagttcactgcagcaacttttgcaaggaccttttctggtttacatgctagaggaatcgagcctggtgttctttatccagctgtctctgttgagcagtttcacgaaccccatgcttataagtaacttcatgcttgcatatctccttacatttaggttgaatttcctatcaatcaaccggtttgagaggaaaaagaatcttgatcttgccatttcagcatttgctttgctccgttctgctgcttggactctacctggtgatgctctacaagaagcaacattaacagtggcaggtggctatgataagcgtctcaaggaaaatgttgaataccttgaggaactcaaaagactcgcattgacggaaggggtttctggacaggttaattttgttacatcttgctcaacatctgaaagaaacgagcttctctccaactgcctctgcgttttatacactccaaaggatgaacatttcggtattgtacctcttgaagccatggccgcccataagccggtaattgcctgcaatagtggtggcccagtggaaacagttgtgaatgaagtaacagggtttctgtgtgatccctctcccgcagaattctccaaagccatgctgaaacttgtgaatgatcatgatcttgctgtcagattgggtgaacaagcacgtgaccatgtggtgcaaaaattctcgaccaagacatttggtgatctcctcaacagctacgtcttgaacatctaccatgagaggatggaatgatctataatattgggtcagccatgccatatgaaaacaatttgttcaatacaaggttttttttgcacctttacgtctaatctgattttgatggacacacataatgacaatgacattccattgaatccctttggcatactgtagtcactctatgatctgtatattgttttcaattataacatcaaatttggcttggtccatcctagaatctgaatggagctggagtagagatggcaatggggacccgatttcctgcggggaattcttctgttagagcaacttcaaaagaacgtgtaaactaaccccaaaacagatattagtcaagaatagtgatttttttactccaacaacttcctcaattttccccaaaaaattcgtgtcccgtattcacagcctcttgtccctcatattttggtgggtttcatcctctctaattc

SEQ ID NO: 24214 - DNA, 2316 bp, Zea Mays
ctgtctccctcgtccgtctcccctgccgcccagcccaccgccgcccctccctcgagttcccccgaacgccgcccctcaggttcccgggacgccgcccctcagttttcctggacgccgaccctccctcgaggttctccgtgtagatccgccacctctcccttgcacgaactcgcgcccctccgtcgaggtcccctggacgccgcgcccacccctagcgcctatcttgccaaacaccatcaaaactccagaggagttgccccaccagggagttttggagcagagcagctctaggtggagcagagctatgccaaacacgcttgtcccaaacaggacctgagacgaaccctttggcctcggctctcgtcttgtgagtgtgtaatctcggatcgggaaactcgactgcggggtcggagaagatggcggcggcgggagaagttgccggcgcttcgtcggggacgaggacgaagcggcttaagattgccgtcatccacccggatctcggaatcgcacattctgccgcattatggtcaaggtatgaccatacacacagcatgaaaagtcgtagctcctcaactattgttgatcttttgtataggtggtgctgagagattgattgtcgatgcggcttgtcagcttgctgcccacgatcatgatgttcatgtcttcacatcacatcatgataaaaaacgttgctttgaggagactctttctggtttgtttccggttactgtacatggggatttcctgcctcgccatgtgttctaccgctttcatgctgtttgtgcttatcttcgctgcatttttgttgcgctctgtgtgctactcagatggcccttctttgatgtcatattggtagaccaggtttctgttgtgattccactacttaaactaatggcatcatcgaagataatattttactgtcatttccctgatctgttacttgcacaacatactactatgcttcggaggttatatcgcaagccaattgacatgattgaggaaagcactactggtatggctgatttgattcttgtcaatagcaagttcactgcagcaacttttgcaaggaccttttctggtttacatgctagaggaatcgagcctggtgttctttatccagctgtctctgttgagcagtttcacgaaccccatgcttataagtaacttcatgcttgcatatctccttacatttaggtctaacttattcagtttatagactaaacagatctttttaccattatcatattaatatttagctaaagtagacaacaatcttttgtacaggttgaatttcctatcaatcaaccggtttgagaggaaaaagaatcttgatcttgccatttcagcatttgctttgctccgttctgctgcttggactctacctggtgatgctctacaagaagcaacattaacagtggcaggtggctatgataagcgtctcaaggaaaatgttgaataccttgaggaactcaaaagactcgcattgacggaaggggtttctggacaggttaattttgttacatcttgctcaacatctgaaagaaacgagcttctctccaactgcctctgcgttttatacactccaaaggatgaacatttcggtattgtacctcttgaagccatggccgcccataagccggtaattgcctgcaatagtggtggcccagtggaaacagttgtgaatgaagtaacagggtttctgtgtgatccctctcccgcagaattctccaaagccatgctgaaacttgtgaatgatcatgatcttgctgtcagattgggtgaacaagcacgtgaccatgtggtgcaaaaattctcgaccaagacatttggtgatctcctcaacagctacgtcttgaacatctaccatgagaggatggaatgatctataatattgggtcagccatgccatatgaaaacaatttgttcaatacaaggttttttttgcacctttacgtctaatctgattttgatggacacacataatgacaatgacattccattgaatccctttggcatactgtagtcactctatgatctgtatattgttttcaattataacatcaaatttggcttggtccatcctagaatctgaatggagctggagtagagatggcaatggggacccgatttcctgcggggaattcttctgttagagcaacttcaaaagaacgtgtaaactaaccccaaaacagatattagtcaagaatagtgatttttttactccaacaacttcctcaattttccccaaaaaattcgtgtcccgtattcacagcctcttgtccctcatattttggtgggtttcatcctctctaattc

SEQ ID NO: 24215 - DNA, 2027 bp, Zea Mays
cgaaattacccaagttgccaccggttatgaacaaaacgattcgtttttgtttctatccgctggccgataccctgtctccctcgtccgtctcccctgccgcccagcccaccgccgcccctccctcgagttcccccgaacgccgcccctcaggttcccgggacgccgcccctcagttttcctggacgccgaccctccctcgaggttctccgtgtagatccgccacctctcccttgcacgaactcgcgcccctccgtcgaggtcccctggacgccgcgcccacccctagcgcctatcttgccaaacaccatcaaaactccagaggagttgccccaccagggagttttggagcagagcagctctaggtggagcagagctatgccaaacacgcttgtcccaaacaggacctgagacgaaccctttggcctcggctctcgtcttgtgagtgtgtaatctcggatcgggaaactcgactgcggggtcggagaagatggcggcggcgggagaagttgccggcgcttcgtcggggacgaggacgaagcggcttaagattgccgtcatccacccggatctcggaatcggtggtgctgagagattgattgtcgatgcggcttgtcagcttgctgcccacgatcatgatgttcatgtcttcacatcacatcatgataaaaaacgttgctttgaggagactctttctggtttgtttccggttactgtacatggggatttcctgcctcgccatgtgttctaccgctttcatgctgtttgtgcttatcttcgctgcatttttgttgcgctctgtgtgctactcagatggcccttctttgatgtcatattggtagaccaggtttctgttgtgattccactacttaaactaatggcatcatcgaagataatattttactgtcatttccctgatctgttacttgcacaacatactactatgcttcggaggttatatcgcaagccaattgacatgattgaggaaagcactactggttgaatttcctatcaatcaaccggtttgagaggaaaaagaatcttgatcttgccatttcagcatttgctttgctccgttctgctgcttggactctacctggtgatgctctacaagaagcaacattaacagtggcaggtggctatgataagcgtctcaaggaaaatgttgaataccttgaggaactcaaaagactcgcattgacggaaggggtttctggacaggttaattttgttacatcttgctcaacatctgaaagaaacgagcttctctccaactgcctctgcgttttatacactccaaaggatgaacatttcggtattgtacctcttgaagccatggccgcccataagccggtaattgcctgcaatagtggtggcccagtggaaacagttgtgaatgaagtaacagggtttctgtgtgatccctctcccgcagaattctccaaagccatgctgaaacttgtgaatgatcatgatcttgctgtcagattgggtgaacaagcacgtgaccatgtggtgcaaaaattctcgaccaagacatttggtgatctcctcaacagctacgtcttgaacatctaccatgagaggatggaatgatctataatattgggtcagccatgccatatgaaaacaatttgttcaatacaaggttttttttgcacctttacgtctaatctgattttgatggacacacataatgacaatgacattccattgaatccctttggcatactgtagtcactctatgatctgtatattgttttcaattataacatcaaatttggcttggtccatcctagaatctgaatggagctggagtagagatggcaatggggacccgatttcctgcggggaattcttctgttagagcaacttcaaaagaacgtgtaaactaaccccaaaacagatattagtcaagaatagtgatttttttactccaacaacttcctcaattttccccaaaaaattcgtgtcccgtattcacagcctcttgtccctcatattttggtgggtttcatcctctctaattc

SEQ ID NO: 24216 - DNA, 720 bp, Zea Mays
gtgtctgatgtggagccatgccatccggatagggatagcctcgcccatagcagctgcctgaaagttctctctgtttcctttgtcttctccagttgcccggcttcgtctccggtaacgcaccggcagagttcacgcagatggaagccgcgcgccagtccctcatcgcgatctcccagtcggtcccggaggtcggggcgcccgtcgtcagcccgcccagcggcggccgaggcatggatgagaatgggcacgaggacgtcgcggagcggaggtacagggcgaagcttatctccatctccaaccagtcgcccgacgcgcggcctacgacgtgccctcgcaacaacggcgccgcctaaagagccgcgtttgtgtattgtaacgtcgccgcatgtacgtgtacgtgtactggacacctaggtgtgtccgtgtgtgttctgcagttctgctaataatactcgtagcccaagaacaagaaccaggatatgggccttaataatcaccttgaactgccaaagggaacgcctgtgtggctgtgtgcaagcgtgctaaaggccacttagaaaagtctcattagcatctgagttgagttccagttccactcttatgttttcaacagtagacaatgttcctgttcgtgagttgtctgtgtgattttcttctaaatttttttatggactaaaaaaaggctacggtgattttagagagaatatttaatgctagact

SEQ ID NO: 24217 - DNA, 5501 bp, Zea Mays
aatgcttgcaagaaatagttgaagtccagtcctcacaagaacgtgtttgtttctacttttcttgagtaccggttctactatattgcatcatatgcaagaatggcaagacctatattcaccttgcttctggatggtcacttttgcactgatacaattgatgttcatcatgagtatattggctcaatttctgttcaagaaattcagatggtggagacagagactgaagggttcagctcctgaaagcaataaacaacatcaggaacacaagattacagatataaagctggacatctcatacaaagcatgcaaagcttgttgcctgcttatactaggaagtcatgttctgagggcagtatttctacagttacatgaaagaataagtgattgcaagtatccaccctttattatttgtgaaggtttgcaggtgctatcgtggataatattgtcactagcagtattcagttttcagaaagcaaaatctacaaaaattccaaaggtaattcggacatggtggatatttagctttctacaatcagttgccatcgttgtatttgatctcaggtcaattttggcaacccatgaagatataggatttgaagaatggatcgatatgtgcatgcttgttgtttgcacttatctgtttgcaatttcagtcagggggaaaacaggaatcagattcacagacagcagcgtaacagaggcactattgaatccatctgtgggacagcaggcagaagtcaaacggccatgcccatatggaagagcaaatattcttgaacttgtcaccttctcctggatgaaccccgtcttttctatcggatacaagaaacctctagagaagaatgaggtgccagatgttgatggcaaagacgctgctgagtttctttctgattcatttaaaaagatcataggtgatgttgaacacaggcatggtttaagtactttatcgatctatagagcaatgtttctatttataggacggaaagcaattatcaatgcaggatttgcaattttaagtgccagcgcatcctatgtcggaccctcactgattaatgatttggtgaaattccttggaggagagaggcaatatggactcaaaagaggttatattctcgctgttgtttttctaagtgccaaagttgtggagaccatagcacagaggcagtggatttttggagctcgacagcttgggatgcggctgcgagctgctttgatatcccacatctatcaaaagggccttcgcttatcctgcagttcaaggcagaagcatactagtggagagatcataaactacatgagtgtggatatacaaaggataactgatgttatatggtatacaaactatatctggatgctacccattcaactttctctagctgtttatgtgctccatacaaacttaggggtcggggcctgggctggtttagcagcgacattagcaataatggcttgcaatattccactaaccagaatgcaaaagaggttgcaagccaaaatcatggttgccaaagacaacagaatgaaggcaacaacggaagttcttagaagcatgaaaatactgaaacttcaagcgtgggatatgaagtaccttcagaagctagaaagtttacgaggcgaggagtacaactggctatggagatcggtgaggttgtcggctctaacaacgttcatattttgggggtcacctgcattcatttcctccataacatttggctcatgtatacttatggggattcctctgacagctggaactgttttgtcagctcttgcgacattccgcatgctacaagatccaattttcacacttcctgacttactttcagtgtttgctcagggaaaagtttcagctgacagagtggcaaaataccttgaggaagaagaattgaaatgtgatgcggttacacaagtaccaagaaatgacacagactatgatgtggagattgatcatggaatattcagctgggaacttgagacgacttctccaactctaacagatgtagagttaaaggtaaagagagggatgaaagtggctatctgtggaatcgttggttctggcaaatccagtctattatcatgcatactcggggagatgccaaagctagatgggactgtcagggtcagtggccgcaaagcatatgttcctcaaactgcctggatcctgtctgggaacataagggaaaacattctgtttggaaacacacatgacaaggaaaaatatgaaaacatcatacaagcatgtgcattgacaaaagattttgagttgtttgcaaatggtgatttgactgagattggtgaaagaggaattaacatgagtggtggacagaaacagcgaattcagattgcaaggtcagtgtatgaagatgcagatatttacctctttgatgatcctttcagtgcagtagatgcccatactggaagccagcttttcaaggattgtgtaatgggaattcttaaagataaaacagtgttgtatgtgacccaccaagtcgaattccttcctgccgcagaccttatattggtgatgcaagatggtaaaatcgtgcagaaagggaaattcgatgaacttcttcaacaaaacatagggtttgaagctatagtaggtgcacatagccaggctcttgaatctgttataaatgctgagagttccagcagaatacagtcaggcaaccaaaaatcagcagatagtgaggatgagttcgatacagaaaatgaaacggatgatcaacttcagggcataacaaaacaagagtctgcacatgatgtctcacaagacatcagtgacaagggaaggttaacacaagaagaagaacgggaaaaaggaggcattggcaagaaggtttactggacttacctgagggcagttcatggtggagccttagtgccagtaacaatagctgcacaatcattctttcaaatcttccaggtagccagcaactattggatggcatgggcatcacctcctacaactgcaaccactccaaccgttggattaggcctcctcttctctgtatacatagcactatctatgggaagtgccctgtgtgtcttatttcggtccttgcttgtgtcactgattggtctactaacatcagaaaggttcttcaagaacatgctccactgcatcctgcgtgccccaatgtccttctttgattccacacctactggtagaattttgaacagggcctctaatgaccaaagtgttctagatctagaaatagcaaacaagctaggctggtgtgtgttttcaatcatacaaattctggggaccattggtgttatgtcacaagttgcatggccagtttttgctatctttgttccggtgacggtgatctgtttcctctgtcaacgctactacataccaacagcgagagagttggctcgtttatcacaaattcaaagggctccaatcctacaccattttgcagaatcgctggcaggagcatcaagtattagagcatatgcacagaaagatcgtttcagaaaagcaaaccttggtcttgttgacaaccactccaggccatggttccataacgtttccgcaatggagtggctttctttcaggctaaacatgctatccaactttgtctttgccttttctttgactctgctagtgagcctccctgaaggttttataaatccaagtattgctggacttgcagtgacttatgcattgaacctcaactcacagctggcatccataatttggaacatttgcaacacagaaaacaaaatgatatcagttgaaagaataatgcagtactcgaggatccctagtgaggctcctctcatagttgatcactaccgccctccaaacagctggccagatgctggaactatcaatataagatcattggaggttcgatatgcagagcatctcccatcagttttgagaaacatatcatgcacaattccaggaaggaagaaggtggggattgtaggacgtactggtagcggaaagtcaacttttatccaagcacttttcaggatcattgaaccaaggggaggaacgatccaaatcgacaatgttgacatcttgaaaatagggctgcatgatttaagaggaagactaagcatcattccacaggatccaacgatgtttgagggaacagttagagggaatctggatcccctgaatgagtaccctgatcatcgtgtgtgggagattttggacaaatgccagcttggtgatatagttcggcaaaacccaaagaaattggactccatagttgtagagaatggggaaaattggagtgttgggcagagacaactattttgcctcggaagggttctcctaaagcgaagcaatgttcttgttcttgatgaggcaactgcttcagttgactcctccactgatgcagttatccaaggaacgatacgcgaggaattcaggaaatgtacggtattgacaatagctcacagaatccacaccgtaattgacagtgatctcattcttgttttcagtgaaggaagaattatagaatatgacacaccctcaaaattactggagaacgagagctctgaattctccagactcataaaggagtactcacggcgatcccatggcttcagtggaacagcaaacaattgaatggcgacaagagaatgaatccaagatggtgaaagtagatacgaaagttgattaccccacaatattatatctatatatgacaagcaggaaccaaaacaacacggggcagggtttacaagggagggcgcttccgtaattaagatgattcagcaaattggagtaatgcaatgtactatatagtttatagcagattcgggacatgactgaaatggggaaaagataacttggtagctattccgtataaattgtgcactgaggtggatttaaacctctctaatccccttctggattggtgtaaccgaacaagccctgaggtggattggagaggagtagacttgatcccctctaatccacctcaaaccgaacaaagtagacttgatcccctccaattcctctcaatccacctcaaatcgaactagccctaagtggtatcttccaccctttatatagagctagatatctagatcgattatgataacccacatctatagtacttacctacaaatgtaagataaaacattaatatgcaagcaatcatggtattgacaaaaatagtttacaaatattcgtaccttgtagttgatgaggaaactccttttcattaacccccatatcaaacaaacgtataataatgtcaaataagatagcaaatatgagattttatacaaacacaagtaatagtacaataatacataaccatcatcaaatgagatagcagatacaatgatccattgagtctcacataaagaaatgaaagtaacaagaaacaaataagtctcacataacgagataaaaaaacaaacatttacaactcatatcacacccatggccctttataattaccatacttggttatgtatttccctgaaagccagttgaatctatgttcggtaagaaaggtcatgaacatctc

SEQ ID NO: 24218 - DNA, 1650 bp, Zea Mays
attgcacacaccaattttggcaacaatcaaaatggtagccatggtaaggttcatagggatccaaaccaaatagttctcaagagtcaagagtcctatggtggtgcggccaagcagatgtctgttgtctcctcccctgtcccctctcttcctgccactcctgtttcatcctagtgaagcagagatccatccatcctgaccttgattggctgattcttctgctggttgttcttctctggcgctcaaggccatatccttggtaaccgattgattaaggtgcgggcacaactcttttttgggggtgggggttggtctgttgccatgacaagtccatgcatggtgtggagatcaccaatgaggtgcttaagagcgtgaagatagggttgaccttccaaggaatggtagaattagttctatggattttcacagcaaggctaccaactatcttgtgacagctagcgacgatgaatcaatccgcctatacgacactcaaaatgcagtatgtttgaagactattaatagcaaaaaatatggggtcgaactagtgtgcttcactgataacccaaatattgtcttatattcatcaaaaaatggctgggatgggttgtctgcatctcattttgctctgagaaagaaaattttctctctggttcacttgaccgtactgttctcttatgggatcaacgggctgaaaaatcacagggcttactgcgtgtgcaagggaggcctgcagtttcatatgacgatcagggcatggtatttgcagttgcctatggtggtcacataaggatgtttgatgctcgaaaatttgaaaaggggccttttgagatcttctctgttggtaataacgattcagaggcccatgtcataaagttcagcagtgatggcaggcggattctgttaaccactaaagctggacgtgtccatgtgctagattcattccatggcaatagcattgcgtcgtgcaatgtgaagccagtggtaaccaactcaacactggaggcgtcgttcagccctgatggaaaccatatcatatctggctccggtgacggtagtgtttatgcttggaatgttaggagtggaaaggtcgcgcgctggggaagcacagacgacgaaccgccgctggtaaggtgggctccaggatccttgatgttcgtgacaggatcatcagaactgtcatgctgggttccggacctgtctaagctgggatcctttaccattagcaagtaggtgaaaatgatgagaggtggactgcccttgcaaaccctgttcgtccctgtatggtatgtcgtgtggctggttgaagcgactcatcctttagccaggtggccgtggtaaacttgcaacctgttacaattgaatgacttgtatagagcatcggctgtggcgatctggcttctgaagccagcggctagacaatgaagatggatccatgctttagttctgtaaaccggagattgtagctgagtattgctgtatctctttgtttctggaaggcgtcttggctcgtaaagattctgcaactcagagcagatggctaatatatagagagagcaaagaaacaatggatagctgggctggttgttctgttttcagttggattccttgtactgacgtgtgattccgttgtgcatgcaccgattcatatttcag

SEQ ID NO: 24219 - DNA, 1650 bp, Zea Mays
ggatgactcagccctcttttagcaagtctatccgctgtccagagacgattttgtgcaaccagccagatgaagaaacgacattttggcaaggcaaatagacattggtattgcacacaccaattttggcaacaatcaaaatggtagccatggtaaggttcatagggatccaaaccaaatagttctcaagagtcaagagtcctatggtggtgcggccaagcagatgtctgttgtctcctcccctgtcccctctcttcctgccactcctgtttcatcctagtgaagcagagatccatccatcctgaccttgattggctgattcttctgctgaatggtagaattagttctatggattttcacagcaaggctaccaactatcttgtgacagctagcgacgatgaatcaatccgcctatacgacactcaaaatgcagtatgtttgaagactattaatagcaaaaaatatggggtcgaactagtgtgcttcactgataacccaaatattgtcttatattcatcaaaaaatggctgggatgaatctctgcgtctactctcactgaatgataatcggtttcttagatattttaaaggtcaccttgacagggttgtctgcatctcattttgctctgagaaagaaaattttctctctggttcacttgaccgtactgttctcttatgggatcaacgggctgaaaaatcacagggcttactgcgtgtgcaagggaggcctgcagtttcatatgacgatcagggcatggtatttgcagttgcctatggtggtcacataaggatgtttgatgctcgaaaatttgaaaaggggccttttgagatcttctctgttggtaataacgattcagaggcccatgtcataaagttcagcagtgatggcaggcggattctgttaaccactaaagctggacgtgtccatgtgctagattcattccatggcaatagcattgcgtcgtgcaatgtgaagccagtggtaaccaactcaacactggaggcgtcgttcagccctgatggaaaccatatcatatctggctccggtgacggtagtgtttatgcttggaatgttaggagtggaaaggtcgcgcgctggggaagcacagacgacgaaccgccgctggtaaggtgggctccaggatccttgatgttcgtgacaggatcatcagaactgtcatgctgggttccggacctgtctaagctgggatcctttaccattagcaagtaggtgaaaatgatgagaggtggactgcccttgcaaaccctgttcgtccctgtatggtatgtcgtgtggctggttgaagcgactcatcctttagccaggtggccgtggtaaacttgcaacctgttacaattgaatgacttgtatagagcatcggctgtggcgatctggcttctgaagccagcggctagacaatgaagatggatccatgctttagttctgtaaaccggagattgtagctgagtattgctgtatctctttgtttctggaaggcgtcttggctcgtaaagattctgcaactcagagcagatggctaatatatagagagagcaaagaaacaatggatagctgggctggttgttctgttttcagttggattccttgtactgacgtgtgattccgttgtgcatgcaccgattcatatttcag

SEQ ID NO: 24220 - DNA, 1840 bp, Zea Mays
aaaaggggcacttttcaggatgactcagccctcttttagcaagtctatccgctgtccagagacgattttgtgcaaccagccagatgaagaaacgacattttggcaaggcaaatagacattggtattgcacacaccaattttggcaacaatcaaaatggtagccatggtaaggttcatagggatccaaaccaaatagttctcaagagtcaagagtcctatggtggtgcggccaagcagatgtctgttgtctcctcccctgtcccctctcttcctgccactcctgtttcatcctagtgaagcagagatccatccatcctgaccttgattggctgattcttctgctggttgttcttctctggcgctcaaggccatatccttggtaaccgattgattaaggtgcgggcacaactcttttttgggggtgggggttggtctgttgccatgacaagtccatgcatggtgtggagatcaccaatgaggtgcttaagagcgtgaagatagggttgaccttccaaggaatggtagaattagttctatggattttcacagcaaggctaccaactatcttgtgacagctagcgacgatgaatcaatccgcctatacgacactcaaaatgcagtatgtttgaagactattaatagcaaaaaatatggggtcgaactagtgtgcttcactgataacccaaatattgtcttatattcatcaaaaaatggctgggatgaatctctgcgtctactctcactgaatgataatcggtttcttagatattttaaaggtcaccttgacagggttgtctgcatctcattttgctctgagaaagaaaattttctctctggttcacttgaccgtactgttctcttatgggatcaacgggctgaaaaatcacagggcttactgcgtgtgcaagggaggcctgcagtttcatatgacgatcagggcatggtatttgcagttgcctatggtggtcacataaggatgtttgatgctcgaaaatttgaaaaggggccttttgagatcttctctgttggtaataacgattcagaggcccatgtcataaagttcagcagtgatggcaggcggattctgttaaccactaaagctggacgtgtccatgtgctagattcattccatggcaatagcattgcgtcgtgcaatgtgaagccagtggtaaccaactcaacactggaggcgtcgttcagccctgatggaaaccatatcatatctggctccggtgacggtagtgtttatgcttggaatgttaggagtggaaaggtcgcgcgctggggaagcacagacgacgaaccgccgctggtaaggtgggctccaggatccttgatgttcgtgacaggatcatcagaactgtcatgctgggttccggacctgtctaagctgggatcctttaccattagcaagtaggtgaaaatgatgagaggtggactgcccttgcaaaccctgttcgtccctgtatggtatgtcgtgtggctggttgaagcgactcatcctttagccaggtggccgtggtaaacttgcaacctgttacaattgaatgacttgtatagagcatcggctgtggcgatctggcttctgaagccagcggctagacaatgaagatggatccatgctttagttctgtaaaccggagattgtagctgagtattgctgtatctctttgtttctggaaggcgtcttggctcgtaaagattctgcaactcagagcagatggctaatatatagagagagcaaagaaacaatggatagctgggctggttgttctgttttcagttggattccttgtactgacgtgtgattccgttgtgcatgcaccgattcatatttcag

SEQ ID NO: 24221 - DNA, 1507 bp, Zea Mays
aaaaggggcacttttcaggatgactcagccctcttttagcaagtctatccgctgtccagagacgattttgtgcaaccagccagatgaagaaacgacattttggcaaggcaaatagacattggtattgcacacaccaattttggcaacaatcaaaatggtagccatggtaaggttcatagggatccaaaccaaatagttctcaagagtcaagagtcctatggtggtgcggccaagcagatgtctgttgtctcctcccctgtcccctctcttcctgccactcctgtttcatcctagtgaagcagagatccatccatcctgaccttgattggctgattcttctgctgaatggtagaattagttctatggattttcacagcaaggctaccaactatcttgtgacagctagcgacgatgaatcaatccgcctatacgacactcaaaatgcagtatgtttgaagactattaatagcaaaaaatatggggtcgaactagtgtgcttcactgataacccaaatattgtcttatattcatcaaaaaatggctgggatgggttgtctgcatctcattttgctctgagaaagaaaattttctctctggttcacttgaccgtactgttctcttatgggatcaacgggctgaaaaatcacagggcttactgcgtgtgcaagggaggcctgcagtttcatatgacgatcagggcatggtatttgcagttgcctatggtggtcacataaggatgtttgatgctcgaaaatttgaaaaggggccttttgagatcttctctgttggtaataacgattcagaggcccatgtcataaagttcagcagtgatggcaggcggattctgttaaccactaaagctggacgtgtccatgtgctagattcattccatggcaatagcattgcgtcgtgcaatgtgaagccagtggtaaccaactcaacactggaggcgtcgttcagccctgatggaaaccatatcatatctggctccggtgacggtagtgtttatgcttggaatgttaggagtggaaaggtcgcgcgctggggaagcacagacgacgaaccgccgctggtaagcaagtaggtgaaaatgatgagaggtggactgcccttgcaaaccctgttcgtccctgtatggtatgtcgtgtggctggttgaagcgactcatcctttagccaggtggccgtggtaaacttgcaacctgttacaattgaatgacttgtatagagcatcggctgtggcgatctggcttctgaagccagcggctagacaatgaagatggatccatgctttagttctgtaaaccggagattgtagctgagtattgctgtatctctttgtttctggaaggcgtcttggctcgtaaagattctgcaactcagagcagatggctaatatatagagagagcaaagaaacaatggatagctgggctggttgttctgttttcagttggattccttgtactgacgtgtgattccgttgtgcatgcaccgattcatatttcag

SEQ ID NO: 24222 - DNA, 1632 bp, Zea Mays
atttataaacactgccaattagtccgcgccggacctccaacccgcccccacggcccacgccatcctccgcaccccccacgccggacaaccggggctcgccgcgccgctacgctcccaagccggaactccgaactcgccgcgccgttctcactgtggcaccagagctgctcgatctgccccgccctcgcccctcgcccctcgcccccttgccggaggggcgcgaactcgcaaaaattattgggtgtgcatttatacacccatgttctttgctgaccctgtctggtagcagattaaggtttggttgcggaaaatattggtgggttgtccaccatgacgagtccgccaagggtgagcatggagatcaccgacgacatgctcaagagcatggaggtcggcctagctttccgggactatctagcgacgatgaatcaatccgcctatacgacactcaaaatgcagtatgtttgaagactattaatagcaaaaaatatggggtcgaactagtgtgcttcactgataacccaaatattgtcttatattcatcaaaaaatggctgggatgaatctctgcgtctactctcactgaatgataatcggtttcttagatattttaaaggtcaccttgacagggttgtctgcatctcattttgctctgagaaagaaaattttctctctggttcacttgaccgtactgttctcttatgggatcaacgggctgaaaaatcacagggcttactgcgtgtgcaagggaggcctgcagtttcatatgacgatcagggcatggtatttgcagttgcctatggtggtcacataaggatgtttgatgctcgaaaatttgaaaaggggccttttgagatcttctctgttggtaataacgattcagaggcccatgtcataaagttcagcagtgatggcaggcggattctgttaaccactaaagctggacgtgtccatgtgctagattcattccatggcaatagcattgcgtcgtgcaatgtgaagccagtggtaaccaactcaacactggaggcgtcgttcagccctgatggaaaccatatcatatctggtcgcgcgctggggaagcacagacgacgaaccgccgctggtaaggtgggctccaggatccttgatgttcgtgacaggatcatcagaactgtcatgctgggttccggacctgtctaagctgggatcctttaccattagcaagtaggtgaaaatgatgagaggtggactgcccttgcaaaccctgttcgtccctgtatggtatgtcgtgtggctggttgaagcgactcatcctttagccaggtggccgtggtaaacttgcaacctgttacaattgaatgacttgtatagagcatcggctgtggcgatctggcttctgaagccagcggctagacaatgaagatggatccatgctttagttctgtaaaccggagattgtagctgagtattgctgtatctctttgtttctggaaggcgtcttggctcgtaaagattctgcaactcagagcagatggctaatatatagagagagcaaagaaacaatggatagctgggctggttgttctgttttcagttggattccttgtactgacgtgtgattccgttgtgcatgcaccgattcatatttcag

SEQ ID NO: 24223 - DNA, 1899 bp, Zea Mays
atttataaacactgccaattagtccgcgccggacctccaacccgcccccacggcccacgccatcctccgcaccccccacgccggacaaccggggctcgccgcgccgctacgctcccaagccggaactccgaactcgccgcgccgttctcactgtggcaccagagctgctcgatctgccccgccctcgcccctcgcccctcgcccccttgccggaggggcgcgaactcgcaaaaattattgggtgtgcatttatacacccatgttctttgctgaccctgtctggtagcagattaaggtttggttgcggaaaatattggtgggttgtccaccatgacgagtccgccaagggtgagcatggagatcaccgacgacatgctcaagagcatggaggtcggcctagctttccgggactataatggtagaattagttctatggattttcacagcaaggctaccaactatcttgtgacagctagcgacgatgaatcaatccgcctatacgacactcaaaatgcagtatgtttgaagactattaatagcaaaaaatatggggtcgaactagtgtgcttcactgataacccaaatattgtcttatattcatcaaaaaatggctgggatgaatctctgcgtctactctcactgaatgataatcggtttcttagatattttaaaggtcaccttgacaggtatgtcacactatcttaaaataaattgtactccctactttcctatgtcaaacttgttgaacttcaaccaagcttataggaaaatgcacaaattaaatgtcttgatagtgcaatatactttcctaaggcttggtcaaatttagagaagtttgactgacgacaaaagccaaagggaactataatttggaaaggagggagtagttaacattttggtcgtgctaatgccagtggaggatgctaatatgctgtgttttgtccagggttgtctgcatctcattttgctctgagaaagaaaattttctctctggttcacttgaccgtactgttctcttatgggatcaacgggctgaaaaatcacagggcttactgcgtgtgcaagggaggcctgcagtttcatatgacgatcagggcatggtatttgcagttgcctatggtggtcacataaggatgtttgatgctcgaaaatttgaaaaggggccttttgagatcttctctgttggtaataacgattcagaggcccatgtcataaagttcagcagtgatggcaggcggattctgttaaccactaaagctggacgtgtccatgtgctagattcattccatggcaatagcattgcgtcgtgcaatgtgaagccagtggtaaccaactcaacactggaggcgtcgttcagccctgatggaaaccatatcatatctggctccggtgacggtagtgtttatgcttggaatgttaggagtggaaaggtcgcgcgctggggaagcacagacgacgaaccgccgctgcaagtaggtgaaaatgatgagaggtggactgcccttgcaaaccctgttcgtccctgtatggtatgtcgtgtggctggttgaagcgactcatcctttagccaggtggccgtggtaaacttgcaacctgttacaattgaatgacttgtatagagcatcggctgtggcgatctggcttctgaagccagcggctagacaatgaagatggatccatgctttagttctgtaaaccggagattgtagctgagtattgctgtatctctttgtttctggaaggcgtcttggctcgtaaagattctgcaactcagagcagatggctaatatatagagagagcaaagaaacaatggatagctgggctggttgttctgttttcagttggattccttgtactgacgtgtgattccgttgtgcatgcaccgattcatatttcag

SEQ ID NO: 24224 - DNA, 2202 bp, Zea Mays
tgctattacacatggaataaacttagttcaaaaataatctgatagacgataaatattcgataactatgtgtattgtttaaccctattttttatttataaacactgccaattagtccgcgccggacctccaacccgcccccacggcccacgccatcctccgcaccccccacgccggacaaccggggctcgccgcgccgctacgctcccaagccggaactccgaactcgccgcgccgttctcactgtggcaccagagctgctcgatctgccccgccctcgcccctcgcccctcgcccccttgccggaggggcgcgaactcgcaaaaattattgggtgtgcatttatacacccatgttctttgctgaccctgtctggtagcagattaaggtttggttgcggaaaatattggtgggttgtccaccatgacgagtccgccaagggtgagcatggagatcaccgacgacatgctcaagagcatggaggtcggcctagctttccgggactataatggtagaattagttctatggattttcacagcaaggctaccaactatcttgtgacagctagcgacgatgaatcaatccgcctatacgacactcaaaatgcagtgtgagtgcaaaacgttattctgtcttcagaagtatttattataagtaaatagggtctctagttggttttttttttgtcttaaaagaagcaatctgttccattctagtagtttgctaggtttcactgttgtcctgtagaatttactcttcattttccagttcctaacattaatactgcactgatacaaattctcgtgtatgtttattagtttgttttagtgtctaatataacttatattcgactttggtattgcacacaacaagatttagtttatgacaacagtttagtaccttttgtagcgatttattttttttcctctaaactgtttctgtcttcgtgatatgtattggttgctcactcattcaagttttcagatgtttgaagactattaatagcaaaaaatatggggtcgaactagtgtgcttcactgataacccaaatattgtcttatattcatcaaaaaatggctgggatgaatctctgcgtctactctcactgaatgataatcggtttcttagatattttaaaggtcaccttgacagggttgtctgcatctcattttgctctgagaaagaaaattttctctctggttcacttgaccgtactgttctcttatgggatcaacgggctgaaaaatcacagggcttactgcgtgtgcaagggaggcctgcagtttcatatgacgatcagggcatggtatttgcagttgcctatggtggtcacataaggatgtttgatgctcgaaaatttgaaaaggggccttttgagatcttctctgttggtaataacgattcagaggcccatgtcataaagttcagcagtgatggcaggcggattctgttaaccactaaagctggacgtgtccatgtgctagattcattccatggcaatagcattgcgtcgtgcaatgtgaagccagtggtaaccaactcaacactggaggcgtcgttcagccctgatggaaaccatatcatatctggctccggtgacggtagtgtttatgcttggaatgttaggagtggaaaggtcgcgcgctggggaagcacagacgacgaaccgccgctggtaaggtgggctccaggatccttgatgttcgtgacaggatcatcagaactgtcatgctgggttccggacctgtctaagctgggatcctttaccattagcaagtaggtgaaaatgatgagaggtggactgcccttgcaaaccctgttcgtccctgtatggtatgtcgtgtggctggttgaagcgactcatcctttagccaggtggccgtggtaaacttgcaacctgttacaattgaatgacttgtatagagcatcggctgtggcgatctggcttctgaagccagcggctagacaatgaagatggatccatgctttagttctgtaaaccggagattgtagctgagtattgctgtatctctttgtttctggaaggcgtcttggctcgtaaagattctgcaactcagagcagatggctaatatatagagagagcaaagaaacaatggatagctgggctggttgttctgttttcagttggattccttgtactgacgtgtgattccgttgtgcatgcaccgattcatatttcag

SEQ ID NO: 24225 - DNA, 1852 bp, Zea Mays
ctcctctccaccctcagctggtgcttagcactcagtctgggagaatagcagttgcaaatggatgtataagagaaataataagtcactctcacataacgatagcaattccttgtcagagcaagaggatctgacacgtgaaatttggcggatagacaaggatgaatttagttcttcatttggaataatgagactcaacattgtccaactatttgctcagaatccacaaaactctcacctgcgcaagttgattgttgatcttgaggcacccaggtttgatagcggaggtctgtttagccaagatcctgcactatcatacataaggtcactaccaaacttgaataatgaccaacaaaggtcactgcataaaattctaggagcaaaggattatgctcttattttaggaatgcctggaacaggcaaaacatacacaatggtgcatgctgtgaagtcattattgataagaggggaatctattttgctaacttcatatactaactcggctattgataccctgctcatgaagttgaagactgagggtgtagattttattcggattggaaggcctgaggctgtacatcctgatgtcagggcccactgcttgtcaacaactgaggcacaatcggttgatgccattaaagcaaggatggagcaagtacaggttgttggagttacttgcttgggaatgtatcatcctttattagcacataagaagtttgacacatgtatcatggatgaagctggacaaattacattgccggtttcactgggacctttgatgcttgcaacaaagtttgttctagtaggagaccattatcaacttcctccactggttcagagctctgaagcgcgagaaaatgggatgggcatcagcttattttggagattgtcagaagcacattcccaggcaatttcagcactgcgatgccagtaccgtatgtcatctggtatcatggagctctcaaattcgttgatttacggtaataggttgtgctgtggttcattggaaattgcaaatgccaaactcaagttttctggtagagaaccaatgcagttgaagttaaaagagatcttgaatcccgatagggctgtgatctttgccaacacagatcaaatacctgcacttgaggcaaaggaacacagaactgtgaacaatcctacagaagcacacattatttcatggatcatcaaagaattactaagaaggggtgtagctcaagatgctattggtatcataaccccatataacgctcaagtgaatatcattcagcaatacactgattgtttggttgaggttcatacgatcgataaataccagggtagagataaggagtgtataatagtatctttcgtgcgctccactgcaaactcaagggctagtggttcttctctgcttggtgattggcacaggatcaatgttctgttgacacgtgcaaagaagaagctcatcatggtgggatcacgtggaacgctttcaacaatacctttgctcaggcttcttgtcgacaaagtagctgagattggtggcctgttggatttgacaaataaggatgcacattctttttcgagaacttgaagttcttgtttgaatgcacaataggatgcacggtagatgaatctggaaggtttttataaggccaagctgtaaataagaatatgctgtaaattttgtttttggaaatgtatagtaaacctagccaagagccacacagctagaggttaggttttgtatattccttccgttagttataacttatttcaatttcattaaagtaccataagtttactaatattatagaaaaactttcaaaaatttatgacatcaaatatacgtactataaaaatataattaatg

SEQ ID NO: 24226 - DNA, 4234 bp, Zea Mays
ccaggccattccgcaccgccaaaattgctccgcgcgggaattccaatttcctccccacctccgcccgcttcccagttcccagtgcacagccgattcgtctccattcctatcttctcccattccctccccagtccgacctccgaccccccatttcgtcgccgccgccgtactcgccgagaacccgccccaaatccataggcccatcccttacccattaacccccaatgcctccgaagaagcgcgccgccgccgccgcctcttcaaagaagccgcagccatcgcagccatcgcagcccgccaagttcggtatcctccacttcttcgagcgccagacccaggcctcccagaacgccaagcgccagaagcccgacccccctgcgcctccccctcctcctccgccgccgcccgagaaggagccctcggaggtctcgccggaggttaccaagacgctggcgccgaagcgtgtcagattttctcccggaatgttgattaagcagagccaggacgatggggtcgcggaggtggtgacttggaagatctcgccggtgaaccatcgccttggtacgacgaagtcgaagcaatttctggggatggcgccccatccgtactcaagcgagaaaaattcctcccttgatgctatgaagaagtggcattcatctccattgggcttgtcaaggtgtactactttgggaagtaattcaggagttcttggatctgctatagttggttgtgatggtgtgggggatactcagagtccatttcggaccccaccatcgctttcctatggctgcaacgagcagcaagtgagcagtggtgtaacttctgagggaggtgccgaaccatcgggagcagggcagcacaaaaaggcattacttgatcttctagaccaagtagaggatgcaatcatggaagaagaattgcctgctgatcctggaaataaaggagggcaaaccacgaatgaggatatcaccaacaatagccgttctcctgttgctgatactgacttaactatcccatccaagaaaactattcatgtcccacccttcaatagttttcttgtcttggaggtgtccgaaaaacataaagctgatgattcatcatgtgatcgctaccctgttaaggttctgcgtctgctgaatgaacactctggtacagaatgtgccgtgcatctgtgtgatgagtggttcgacagtattgttgggcctggtgatactgtaaatgtcattggagaatttagtaaccatggaaaatgtattgttgaccatgacaataatcttgttattgtccatccagagcaactcatttccgggacacgggctgcttctagcttccaatgtttaagaaggtctgttctcgatgagaggctaaaaagcaatgaatattctaccagcgcgttgactggtactctgcttcaccaagtctttcaggctggattactcaatgatgctccttcatggcagtttttggaacaacaggcaaaggaagtacttctgaaaaatattgaaactttatatgcatgtggagtcaatgaaagcaacatgtactctacgctcattgaagctatccccaaaatgttgaattggttcaagtgtttcttaaagggttcaaaatgttctgatgttgattttggacataacgaagtgagaaagactgttggagtgactgaggtcatggatattgaggaaatggcatgggcaccaagatatggtatgaaaggggttatcgatgcttctgttagatcaagagttgagtcacacaatggtggttcatatgatagaataatgccactagagttcaaaactggcaaagcaactagtggccaggcagctatggaacactcagctcaggtgatgttatacacactgttgatgacagagagatacttgaatgaggatattgacttgggccttctgtattatcttcacacagaccagacattgggcattaaagtaaagaggactgatttaattgggctaataatgcgccgaaacgagcttgctactgagatcctgaaggcatcgatgtcacagagttttcctccaatgttacagagcccatcaacatgtaatagatgtcgacacctgatttcttgcaccatatatcacaaggcacacggaggcagtggtacaactagtgggcttggtgatctatttgacaaccttgtgaatcacttaacagtcacacatcataattttcttaaacattgggatagattgattgatcttgaagctagagcttctcagattcttcaggaaaaagcaaaagatacatatataattttgttcagcaaaagatgcagcctgaaacagctgatcagttagatgctcaatttgacagcatagatttcagcctgaaagttggtgattttgtggtgcttagcactcagtctgggagaatagcagttgcaaatggatgtataagagaaataataagtcactctcacataacggtctctttgccacgccgtttgagaattccagatagcaattccttgtcagagcaagaggatctgacacgtgaaatttggcggatagacaaggatgaatttagttcttcatttggaataatgagactcaacattgtccaactatttgctcagaatccacaaaactctcacctgcgcaagttgattgttgatcttgaggcacccaggtttgatagcggaggtctgtttagccaagatcctgcactatcatacataaggtcactaccaaacttgaataatgaccaacaaaggtcactgcataaaattctaggagcaaaggattatgctcttattttaggaatgcctggaacaggcaaaacatacacaatggtgcatgctgtgaagtcattattgataagaggggaatctattttgctaacttcatatactaactcggctattgataccctgctcatgaagttgaagactgagggtgtagattttattcggattggaaggcctgaggctgtacatcctgatgtcagggcccactgcttgtcaacaactgaggcacaatcggttgatgccattaaagcaaggatggagcaagtacaggttgttggagttacttgcttgggaatgtatcatcctttattagcacataagaagtttgacacatgtatcatggatgaagctggacaaattacattgccggtttcactgggacctttgatgcttgcaacaaagtttgttctagtaggagaccattatcaacttcctccactggttcagagctctgaagcgcgagaaaatgggatgggcatcagcttattttggagattgtcagaagcacattcccaggcaatttcagcactgcgatgccagtaccgtatgtcatctggtatcatggagctctcaaattcgttgatttacggtaataggttgtgctgtggttcattggaaattgcaaatgccaaactcaagttttctggtagagaaccaatgcagttgaagttaaaagagatcttgaatcccgatagggctgtgatctttgccaacacagatcaaatacctgcacttgaggcaaaggaacacagaactgtgaacaatcctacagaagcacacattatttcatggatcatcaaagaattactaagaaggggtgtagctcaagatgctattggtatcataaccccatataacgctcaagtgaatatcattcagcaatacactgattgtttggttgaggttcatacgatcgataaataccagggtagagataaggagtgtataatagtatctttcgtgcgctccactgcaaactcaagggctagtggttcttctctgcttggtgattggcacaggatcaatgttctgttgacacgtgcaaagaagaagctcatcatggtgggatcacgtggaacgctttcaacaatacctttgctcaggcttcttgtcgacaaagtagctgagattggtggcctgttggatttgacaaataaggatgcacattctttttcgagaacttgaagttcttgtttgaatgcacaataggatgcacggtagatgaatctggaaggtttttataaggccaagctgtaaataagaatatgctgtaaattttgtttttggaaatgtatagtaaacctagccaagagccacacagctagaggttaggttttgtatattccttccgttagttataacttatttcaatttcattaaagtaccataagtttactaatattatagaaaaactttcaaaaatttatgacatcaaatatacgtactataaaaatataattaatg

SEQ ID NO: 24227 - DNA, 4099 bp, Zea Mays
ccaggccattccgcaccgccaaaattgctccgcgcgggaattccaatttcctccccacctccgcccgcttcccagttcccagtgcacagccgattcgtctccattcctatcttctcccattccctccccagtccgacctccgaccccccatttcgtcgccgccgccgtactcgccgagaacccgccccaaatccataggcccatcccttacccattaacccccaatgcctccgaagaagcgcgccgccgccgccgcctcttcaaagaagccgcagccatcgcagccatcgcagcccgccaagttcggtatcctccacttcttcgagcgccagacccaggcctcccagaacgccaagcgccagaagcccgacccccctgcgcctccccctcctcctccgccgccgcccgagaaggagccctcggaggtctcgccggaggttaccaagacgctggcgccgaagcgtgtcagattttctcccggaatgttgattaagcagagccaggacgatggggtcgcggaggtggtgacttggaagatctcgccggtgaaccatcgccttggtacgacgaagtcgaagcaatttctggggatggcgccccatccgtactcaagcgagaaaaattcctcccttgatgctatgaagaagtggcattcatctccattgggcttgtcaaggtgtactactttgggaagtaattcaggagttcttggatctgctatagttggttgtgatggtgtgggggatactcagagtccatttcggaccccaccatcgctttcctatggctgcaacgagcagcaagtgagcagtggtgtaacttctgagggaggtgccgaaccatcgggagcagggcagcacaaaaaggcattacttgatcttctagaccaagtagaggatgcaatcatggaagaagaattgcctgctgatcctggaaataaaggagggcaaaccacgaatgaggatatcaccaacaatagccgttctcctgttgctgatactgacttaactatcccatccaagaaaactattcatgtcccacccttcaatagttttcttgtcttggaggtgtccgaaaaacataaagctgatgattcatcatgtgatcgctaccctgttaaggttctgcgtctgctgaatgaacactctggtacagaatgtgccgtgcatctgtgtgatgagtggttcgacagtattgttgggcctggtgatactgtaaatgtcattggagaatttagtaaccatggaaaatgtattgttgaccatgacaataatcttgttattgtccatccagagcaactcatttccgggacacgggctgcttctagcttccaatgtttaagaaggtctgttctcgatgagaggctaaaaagcaatgaatattctaccagcgcgttgactggtactctgcttcaccaagtctttcaggctggattactcaatgatgctccttcatggcagtttttggaacaacaggcaaaggaagtacttctgaaaaatattgaaactttatatgcatgtggagtcaatgaaagcaacatgtactctacgctcattgaagctatccccaaaatgttgaattggttcaagtgtttcttaaagggttcaaaatgttctgatgttgattttggacataacgaagtgagaaagactgttggagtgactgaggtcatggatattgaggaaatggcatgggcaccaagatatggtatgaaaggggttatcgatgcttctgttagatcaagagttgagtcacacaatggtggttcatatgatagaataatgccactagagttcaaaactggcaaagcaactagtggccaggcagctatggaacactcagctcaggtgatgttatacacactgttgatgacagagagatacttgaatgaggatattgacttgggccttctgtattatcttcacacagaccagacattgggcattaaagtaaagaggactgatttaattgggctaataatgcgccgaaacgagcttgctactgagatcctgaaggcatcgatgtcacagagttttcctccaatgttacagagcccatcaacatgtaatagatgtcgacacctgatttcttgcaccatatatcacaagattcttcaggaaaaagcaaaagatacatatataattttgttcagcaaaagatgcagcctgaaacagctgatcagttagatgctcaatttgacagcatagatttcagcctgaaagttggtgattttgtggtgcttagcactcagtctgggagaatagcagttgcaaatggatgtataagagaaataataagtcactctcacataacggtctctttgccacgccgtttgagaattccagatagcaattccttgtcagagcaagaggatctgacacgtgaaatttggcggatagacaaggatgaatttagttcttcatttggaataatgagactcaacattgtccaactatttgctcagaatccacaaaactctcacctgcgcaagttgattgttgatcttgaggcacccaggtttgatagcggaggtctgtttagccaagatcctgcactatcatacataaggtcactaccaaacttgaataatgaccaacaaaggtcactgcataaaattctaggagcaaaggattatgctcttattttaggaatgcctggaacaggcaaaacatacacaatggtgcatgctgtgaagtcattattgataagaggggaatctattttgctaacttcatatactaactcggctattgataccctgctcatgaagttgaagactgagggtgtagattttattcggattggaaggcctgaggctgtacatcctgatgtcagggcccactgcttgtcaacaactgaggcacaatcggttgatgccattaaagcaaggatggagcaagtacaggttgttggagttacttgcttgggaatgtatcatcctttattagcacataagaagtttgacacatgtatcatggatgaagctggacaaattacattgccggtttcactgggacctttgatgcttgcaacaaagtttgttctagtaggagaccattatcaacttcctccactggttcagagctctgaagcgcgagaaaatgggatgggcatcagcttattttggagattgtcagaagcacattcccaggcaatttcagcactgcgatgccagtaccgtatgtcatctggtatcatggagctctcaaattcgttgatttacggtaataggttgtgctgtggttcattggaaattgcaaatgccaaactcaagttttctggtagagaaccaatgcagttgaagttaaaagagatcttgaatcccgatagggctgtgatctttgccaacacagatcaaatacctgcacttgaggcaaaggaacacagaactgtgaacaatcctacagaagcacacattatttcatggatcatcaaagaattactaagaaggggtgtagctcaagatgctattggtatcataaccccatataacgctcaagtgaatatcattcagcaatacactgattgtttggttgaggttcatacgatcgataaataccagggtagagataaggagtgtataatagtatctttcgtgcgctccactgcaaactcaagggctagtggttcttctctgcttggtgattggcacaggatcaatgttctgttgacacgtgcaaagaagaagctcatcatggtgggatcacgtggaacgctttcaacaatacctttgctcaggcttcttgtcgacaaagtagctgagattggtggcctgttggatttgacaaataaggatgcacattctttttcgagaacttgaagttcttgtttgaatgcacaataggatgcacggtagatgaatctggaaggtttttataaggccaagctgtaaataagaatatgctgtaaattttgtttttggaaatgtatagtaaacctagccaagagccacacagctagaggttaggttttgtatattccttccgttagttataacttatttcaatttcattaaagtaccataagtttactaatattatagaaaaactttcaaaaatttatgacatcaaatatacgtactataaaaatataattaatg

SEQ ID NO: 24228 - DNA, 4377 bp, Zea Mays
ccaggccattccgcaccgccaaaattgctccgcgcgggaattccaatttcctccccacctccgcccgcttcccagttcccagtgcacagccgattcgtctccattcctatcttctcccattccctccccagtccgacctccgaccccccatttcgtcgccgccgccgtactcgccgagaacccgccccaaatccataggcccatcccttacccattaacccccaatgcctccgaagaagcgcgccgccgccgccgcctcttcaaagaagccgcagccatcgcagccatcgcagcccgccaagttcggtatcctccacttcttcgagcgccagacccaggcctcccagaacgccaagcgccagaagcccgacccccctgcgcctccccctcctcctccgccgccgcccgagaaggagccctcggaggtctcgccggaggttaccaagacgctggcgccgaagcgtgtcagattttctcccggaatgttgattaagcagagccaggacgatggggtcgcggaggtggtgacttggaagatctcgccggtgaaccatcgccttggtacgacgaagtcgaagcaatttctggggatggcgccccatccgtactcaagcgagaaaaattcctcccttgatgctatgaagaagtggcattcatctccattgggcttgtcaaggtgtactactttgggaagtaattcaggagttcttggatctgctatagttggttgtgatggtgtgggggatactcagagtccatttcggaccccaccatcgctttcctatggctgcaacgaggtaaccttcttgttccttgagcagcaagtgagcagtggtgtaacttctgagggaggtgccgaaccatcgggagcagggcagcacaaaaaggcattacttgatcttctagaccaagtagaggatgcaatcatggaagaagaattgcctgctgatcctggaaataaaggagggcaaaccacgaatgaggatatcaccaacaatagccgttctcctgttgctgatactgacttaactatcccatccaagaaaactattcatgtcccacccttcaatagttttcttgtcttggaggtgtccgaaaaacataaagctgatgattcatcatgtgatcgctaccctgttaaggttctgcgtctgctgaatgaacactctggtacagaatgtgccgtgcatctgtgtgatgagtggttcgacagtattgttgggcctggtgatactgtaaatgtcattggagaatttagtaaccatggaaaatgtattgttgaccatgacaataatcttgttattgtccatccagagcaactcatttccgggacacgggctgcttctagcttccaatgtttaagaaggtctgttctcgatgagaggctaaaaagcaatgaatattctaccagcgcgttgactggtactctgcttcaccaagtctttcaggctggattactcaatgatgctccttcatggcagtttttggaacaacaggcaaaggaagtacttctgaaaaatattgaaactttatatgcatgtggagtcaatgaaagcaacatgtactctacgctcattgaagctatccccaaaatgttgaattggttcaagtgtttcttaaagggttcaaaatgttctgatgttgattttggacataacgaagtgagaaagactgttggagtgactgaggtcatggatattgaggaaatggcatgggcaccaagatatggtatgaaaggggttatcgatgcttctgttagatcaagagttgagtcacacaatggtggttcatatgatagaataatgccactagagttcaaaactggcaaagcaactagtggccaggcagctatggaacactcagctcaggtgatgttatacacactgttgatgacagagagatacttgaatgaggatattgacttgggccttctgtattatcttcacacagaccagacattgggcattaaagtaaagaggactgatttaattgggctaataatgcgccgaaacgagcttgctactgagatcctgaaggcatcgatgtcacagagttttcctccaatgttacagagcccatcaacatgtaatagatgtcgacacctgatttcttgcaccatatatcacaaggcacacggaggcagtggtacaactagtgggcttggtgatctatttgacaaccttgtgaatcacttaacagtcacacatcataattttcttaaacattgggatagattgattgatcttgaagctagagcttctcaggtaaaaaagaacatcttgcagcctcataattcaaactatgggagtgggagttctgctgtaccttattttgttcttgacataaaaaatggacattcaatagattcttcaggaaaaagcaaaagatacatatataattttgttcagcaaaagatgcagcctgaaacagctgatcagttagatgctcaatttgacagcatagatttcagcctgaaagttggtgattttgtggtgcttagcactcagtctgggagaatagcagttgcaaatggatgtataagagaaataataagtcactctcacataacggtctctttgccacgccgtttgagaattccagatagcaattccttgtcagagcaagaggatctgacacgtgaaatttggcggatagacaaggatgaatttagttcttcatttggaataatgagactcaacattgtccaactatttgctcagaatccacaaaactctcacctgcgcaagttgattgttgatcttgaggcacccaggtttgatagcggaggtctgtttagccaagatcctgcactatcatacataaggtcactaccaaacttgaataatgaccaacaaaggtcactgcataaaattctaggagcaaaggattatgctcttattttaggaatgcctggaacaggcaaaacatacacaatggtgcatgctgtgaagtcattattgataagaggggaatctattttgctaacttcatatactaactcggctattgataccctgctcatgaagttgaagactgagggtgtagattttattcggattggaaggcctgaggctgtacatcctgatgtcagggcccactgcttgtcaagtcagaactaaaactttatgaacatacctgcagtttttaaaaagaaactgattttattatttttttgttgtggaacagcaactgaggcacaatcggttgatgccattaaagcaaggatggagcaagtacaggttgttggagttacttgcttgggaatgtatcatcctttattagcacataagaagtttgacacatgtatcatggatgaagctggacaaattacattgccggtttcactgggacctttgatgcttgcaacaaagtttgttctagtaggagaccattatcaacttcctccactggttcagagctctgaagcgcgagaaaatgggatgggcatcagcttattttggagattgtcagaagcacattcccaggcaatttcagcactgcgatgccaggttgtgctgtggttcattggaaattgcaaatgccaaactcaagttttctggtagagaaccaatgcagttgaagttaaaagagatcttgaatcccgatagggctgtgatctttgccaacacagatcaaatacctgcacttgaggcaaaggaacacagaactgtgaacaatcctacagaagcacacattatttcatggatcatcaaagaattactaagaaggggtgtagctcaagatgctattggtatcataaccccatataacgctcaagtgaatatcattcagcaatacactgattgtttggttgaggttcatacgatcgataaataccagggtagagataaggagtgtataatagtatctttcgtgcgctccactgcaaactcaagggctagtggttcttctctgcttggtgattggcacaggatcaatgttctgttgacacgtgcaaagaagaagctcatcatggtgggatcacgtggaacgctttcaacaatacctttgctcaggcttcttgtcgacaaagtagctgagattggtggcctgttggatttgacaaataaggatgcacattctttttcgagaacttgaagttcttgtttgaatgcacaataggatgcacggtagatgaatctggaaggtttttataaggccaagctgtaaataagaatatgctgtaaattttgtttttggaaatgtatagtaaacctagccaagagccacacagctagaggttaggttttgtatattccttccgttagttataacttatttcaatttcattaaagtaccataagtttactaatattatagaaaaactttcaaaaatttatgacatcaaatatacgtactataaaaatataattaatg

SEQ ID NO: 24229 - DNA, 4066 bp, Zea Mays
ccaggccattccgcaccgccaaaattgctccgcgcgggaattccaatttcctccccacctccgcccgcttcccagttcccagtgcacagccgattcgtctccattcctatcttctcccattccctccccagtccgacctccgaccccccatttcgtcgccgccgccgtactcgccgagaacccgccccaaatccataggcccatcccttacccattaacccccaatgcctccgaagaagcgcgccgccgccgccgcctcttcaaagaagccgcagccatcgcagccatcgcagcccgccaagttcggtatcctccacttcttcgagcgccagacccaggcctcccagaacgccaagcgccagaagcccgacccccctgcgcctccccctcctcctccgccgccgcccgagaaggagccctcggaggtctcgccggaggttaccaagacgctggcgccgaagcgtgtcagattttctcccggaatgttgattaagcagagccaggacgatggggtcgcggaggtggtgacttggaagatctcgccggtgaaccatcgccttggtacgacgaagtcgaagcaatttctggggatggcgccccatccgtactcaagcgagaaaaattcctcccttgatgctatgaagaagtggcattcatctccattgggcttgtcaaggtgtactactttgggaagtaattcaggagttcttggatctgctatagttggttgtgatggtgtgggggatactcagagtccatttcggaccccaccatcgctttcctatggctgcaacgagcagcaagtgagcagtggtgtaacttctgagggaggtgccgaaccatcgggagcagggcagcacaaaaaggcattacttgatcttctagaccaagtagaggatgcaatcatggaagaagaattgcctgctgatcctggaaataaaggagggcaaaccacgaatgaggatatcaccaacaatagccgttctcctgttgctgatactgacttaactatcccatccaagaaaactattcatgtcccacccttcaatagttttcttgtcttggaggtgtccgaaaaacataaagctgatgattcatcatgtgatcgctaccctgttaaggttctgcgtctgctgaatgaacactctggtacagaatgtgccgtgcatctgtgtgatgagtggttcgacagtattgttgggcctggtgatactgtaaatgtcattggagaatttagtaaccatggaaaatgtattgttgaccatgacaataatcttgttattgtccatccagagcaactcatttccgggacacgggctgcttctagcttccaatgtttaagaaggtctgttctcgatgagaggctaaaaagcaatgaatattctaccagcgcgttgactggtactctgcttcaccaagtctttcaggctggattactcaatgatgctccttcatggcagtttttggaacaacaggcaaaggaagtacttctgaaaaatattgaaactttatatgcatgtggagtcaatgaaagcaacatgtactctacgctcattgaagctatccccaaaatgttgaattggttcaagtgtttcttaaagggttcaaaatgttctgatgttgattttggacataacgaagtgagaaagactgttggagtgactgaggtcatggatattgaggaaatggcatgggcaccaagatatggtatgaaaggggttatcgatgcttctgttagatcaagagttgagtcacacaatggtggttcatatgatagaataatgccactagagttcaaaactggcaaagcaactagtggccaggcagctatggaacactcagctcaggtgatgttatacacactgttgatgacagagagatacttgaatgaggatattgacttgggccttctgtattatcttcacacagaccagacattgggcattaaagtaaagaggactgatttaattgggctaataatgcgccgaaacgagcttgctactgagatcctgaaggcatcgatgtcacagagttttcctccaatgttacaggcacacggaggcagtggtacaactagtgggcttggtgatctatttgacaaccttgtgaatcacttaacagtcacacatcataattttcttaaacattgggatagattgattgatcttgaagctagagcttctcaggtaaaaaagaacatcttgcagcctcataattcaaactatgggagtgggagttctgctgtaccttattttgttcttgacataaaaaatggacattcaatagattcttcaggaaaaagcaaaagatacatatataattttgttcagcaaaagatgcagcctgaaacagctgatcagttagatgctcaatttgacagcatagatttcagcctgaaagttggtgattttgtgatagcaattccttgtcagagcaagaggatctgacacgtgaaatttggcggatagacaaggatgaatttagttcttcatttggaataatgagactcaacattgtccaactatttgctcagaatccacaaaactctcacctgcgcaagttgattgttgatcttgaggcacccaggtttgatagcggaggtctgtttagccaagatcctgcactatcatacataagattctaggagcaaaggattatgctcttattttaggaatgcctggaacaggcaaaacatacacaatggtgcatgctgtgaagtcattattgataagaggggaatctattttgctaacttcatatactaactcggctattgataccctgctcatgaagttgaagactgagggtgtagattttattcggattggaaggcctgaggctgtacatcctgatgtcagggcccactgcttgtcaacaactgaggcacaatcggttgatgccattaaagcaaggatggagcaagtacaggttgttggagttacttgcttgggaatgtatcatcctttattagcacataagaagtttgacacatgtatcatggatgaagctggacaaattacattgccggtttcactgggacctttgatgcttgcaacaaagtttgttctagtaggagaccattatcaacttcctccactggttcagagctctgaagcgcgagaaaatgggatgggcatcagcttattttggagattgtcagaagcacattcccaggcaatttcagcactgcgatgccaggttgtgctgtggttcattggaaattgcaaatgccaaactcaagttttctggtagagaaccaatgcagttgaagttaaaagagatcttgaatcccgatagggctgtgatctttgccaacacagatcaaatacctgcacttgaggcaaaggaacacagaactgtgaacaatcctacagaagcacacattatttcatggatcatcaaagaattactaagaaggggtgtagctcaagatgctattggtatcataaccccatataacgctcaagtgaatatcattcagcaatacactgattgtttggttgaggttcatacgatcgataaataccagggtagagataaggagtgtataatagtatctttcgtgcgctccactgcaaactcaagggctagtggttcttctctgcttggtgattggcacaggatcaatgttctgttgacacgtgcaaagaagaagctcatcatggtgggatcacgtggaacgctttcaacaatacctttgctcaggcttcttgtcgacaaagtagctgagattggtggcctgttggatttgacaaataaggatgcacattctttttcgagaacttgaagttcttgtttgaatgcacaataggatgcacggtagatgaatctggaaggtttttataaggccaagctgtaaataagaatatgctgtaaattttgtttttggaaatgtatagtaaacctagccaagagccacacagctagaggttaggttttgtatattccttccgttagttataacttatttcaatttcattaaagtaccataagtttactaatattatagaaaaactttcaaaaatttatgacatcaaatatacgtactataaaaatataattaatg

SEQ ID NO: 24230 - DNA, 4331 bp, Zea Mays
ccaggccattccgcaccgccaaaattgctccgcgcgggaattccaatttcctccccacctccgcccgcttcccagttcccagtgcacagccgattcgtctccattcctatcttctcccattccctccccagtccgacctccgaccccccatttcgtcgccgccgccgtactcgccgagaacccgccccaaatccataggcccatcccttacccattaacccccaatgcctccgaagaagcgcgccgccgccgccgcctcttcaaagaagccgcagccatcgcagccatcgcagcccgccaagttcggtatcctccacttcttcgagcgccagacccaggcctcccagaacgccaagcgccagaagcccgacccccctgcgcctccccctcctcctccgccgccgcccgagaaggagccctcggaggtctcgccggaggttaccaagacgctggcgccgaagcgtgtcagattttctcccggaatgttgattaagcagagccaggacgatggggtcgcggaggtggtgacttggaagatctcgccggtgaaccatcgccttggtacgacgaagtcgaagcaatttctggggatggcgccccatccgtactcaagcgagaaaaattcctcccttgatgctatgaagaagtggcattcatctccattgggcttgtcaaggtgtactactttgggaagtaattcaggagttcttggatctgctatagttggttgtgatggtgtgggggatactcagagtccatttcggaccccaccatcgctttcctatggctgcaacgagcaagtgagcagtggtgtaacttctgagggaggtgccgaaccatcgggagcagggcagcacaaaaaggcattacttgatcttctagaccaagtagaggatgcaatcatggaagaagaattgcctgctgatcctggaaataaaggagggcaaaccacgaatgaggatatcaccaacaatagccgttctcctgttgctgatactgacttaactatcccatccaagaaaactattcatgtcccacccttcaatagttttcttgtcttggaggtgtccgaaaaacataaagctgatgattcatcatgtgatcgctaccctgttaaggttctgcgtctgctgaatgaacactctggtacagaatgtgccgtgcatctgtgtgatgagtggttcgacagtattgttgggcctggtgatactgtaaatgtcattggagaatttagtaaccatggaaaatgtattgttgaccatgacaataatcttgttattgtccatccagagcaactcatttccgggacacgggctgcttctagcttccaatgtttaagaaggtctgttctcgatgagaggctaaaaagcaatgaatattctaccagcgcgttgactggtactctgcttcaccaagtctttcaggctggattactcaatgatgctccttcatggcagtttttggaacaacaggcaaaggaagtacttctgaaaaatattgaaactttatatgcatgtggagtcaatgaaagcaacatgtactctacgctcattgaagctatccccaaaatgttgaattggttcaagtgtttcttaaagggttcaaaatgttctgatgttgattttggacataacgaagtgagaaagactgttggagtgactgaggtcatggatattgaggaaatggcatgggcaccaagatatggtatgaaaggggttatcgatgcttctgttagatcaagagttgagtcacacaatggtggttcatatgatagaataatgccactagagttcaaaactggcaaagcaactagtggccaggcagctatggaacactcagctcaggtgatgttatacacactgttgatgacagagagatacttgaatgaggatattgacttgggccttctgtattatcttcacacagaccagacattgggcattaaagtaaagaggactgatttaattgggctaataatgcgccgaaacgagcttgctactgagatcctgaaggcatcgatgtcacagagttttcctccaatgttacagagcccatcaacatgtaatagatgtcgacacctgatttcttgcaccatatatcacaaggcacacggaggcagtggtacaactagtgggcttggtgatctatttgacaaccttgtgaatcacttaacagtcacacatcataattttcttaaacattgggatagattgattgatcttgaagctagagcttctcaggtaaaaaagaacatcttgcagcctcataattcaaactatgggagtgggagttctgctgtaccttattttgttcttgacataaaaaatggacattcaatagattcttcaggaaaaagcaaaagatacatatataattttgttcagcaaaagatgcagcctgaaacagctgatcagttagatgctcaatttgacagcatagatttcagcctgaaagttggtgattttgtggtgcttagcactcagtctgggagaatagcagttgcaaatggatgtataagagaaataataagtcactctcacataacggtctctttgccacgccgtttgagaattccagatagcaattccttgtcagagcaagaggatctgacacgtgaaatttggcggatagacaaggatgaatttagttcttcatttggaataatgagactcaacattgtccaactatttgctcagaatccacaaaactctcacctgcgcaagttgattgttgatcttgaggcacccaggtttgatagcggaggtctgtttagccaagatcctgcactatcatacataaggtcactaccaaacttgaataatgaccaacaaaggtcactgcataaaattctaggagcaaaggattatgctcttattttaggaatgcctggaacaggcaaaacatacacaatggtgcatgctgtgaagtcattattgataagaggggaatctattttgctaacttcatatactaactcggctattgataccctgctcatgaagttgaagactgagggtgtagattttattcggattggaaggcctgaggctgtacatcctgatgtcagggcccactgcttgtcaacaactgaggcacaatcggttgatgccattaaagcaaggatggagcaagtacaggttgttggagttacttgcttgggaatgtatcatcctttattagcacataagaagtttgacacatgtatcatggatgaagctggacaaattacattgccggtttcactgggacctttgatgcttgcaacaaagtttgttctagtaggagaccattatcaacttcctccactggttcagagctctgaagcgcgagaaaatgggatgggcatcagcttattttggagattgtcagaagcacattcccaggcaatttcagcactgcgatgccagtaccgtatgtcatctggtatcatggagctctcaaattcgttgatttacggtaataggttgtgctgtggttcattggaaattgcaaatgccaaactcaagttttctggtagagaaccaatgcagttgaagttaaaagagatcttgaatcccgatagggctgtgatctttgccaacacagatcaaatacctgcacttgaggcaaaggaacacagaactgtgaacaatcctacagaagcacacattatttcatggatcatcaaagaattactaagaaggggtgtagctcaagatgctattggtatcataaccccatataacgctcaagtgaatatcattcagcaatacactgattgtttggttgaggttcatacgatcgataaataccagggtagagataaggagtgtataatagtatctttcgtgcgctccactgcaaactcaagggctagtggttcttctctgcttggtgattggcacaggatcaatgttctgttgacacgtgcaaagaagaagctcatcatggtgggatcacgtggaacgctttcaacaatacctttgctcaggcttcttgtcgacaaagtagctgagattggtggcctgttggatttgacaaataaggatgcacattctttttcgagaacttgaagttcttgtttgaatgcacaataggatgcacggtagatgaatctggaaggtttttataaggccaagctgtaaataagaatatgctgtaaattttgtttttggaaatgtatagtaaacctagccaagagccacacagctagaggttaggttttgtatattccttccgttagttataacttatttcaatttcattaaagtaccataagtttactaatattatagaaaaactttcaaaaatttatgacatcaaatatacgtactataaaaatataattaatg

SEQ ID NO: 24231 - DNA, 4232 bp, Zea Mays
ccaggccattccgcaccgccaaaattgctccgcgcgggaattccaatttcctccccacctccgcccgcttcccagttcccagtgcacagccgattcgtctccattcctatcttctcccattccctccccagtccgacctccgaccccccatttcgtcgccgccgccgtactcgccgagaacccgccccaaatccataggcccatcccttacccattaacccccaatgcctccgaagaagcgcgccgccgccgccgcctcttcaaagaagccgcagccatcgcagccatcgcagcccgccaagttcggtatcctccacttcttcgagcgccagacccaggcctcccagaacgccaagcgccagaagcccgacccccctgcgcctccccctcctcctccgccgccgcccgagaaggagccctcggaggtctcgccggaggttaccaagacgctggcgccgaagcgtgtcagattttctcccggaatgttgattaagcagagccaggacgatggggtcgcggaggtggtgacttggaagatctcgccggtgaaccatcgccttggtacgacgaagtcgaagcaatttctggggatggcgccccatccgtactcaagcgagaaaaattcctcccttgatgctatgaagaagtggcattcatctccattgggcttgtcaaggtgtactactttgggaagtaattcaggagttcttggatctgctatagttggttgtgatggtgtgggggatactcagagtccatttcggaccccaccatcgctttcctatggctgcaacgagcagcaagtgagcagtggtgtaacttctgagggaggtgccgaaccatcgggagcagggcagcacaaaaaggcattacttgatcttctagaccaagtagaggatgcaatcatggaagaagaattgcctgctgatcctggaaataaaggagggcaaaccacgaatgaggatatcaccaacaatagccgttctcctgttgctgatactgacttaactatcccatccaagaaaactattcatgtcccacccttcaatagttttcttgtcttggaggtgtccgaaaaacataaagctgatgattcatcatgtgatcgctaccctgttaaggttctgcgtctgctgaatgaacactctggtacagaatgtgccgtgcatctgtgtgatgagtggttcgacagtattgttgggcctggtgatactgtaaatgtcattggagaatttagtaaccatggaaaatgtattgttgaccatgacaataatcttgttattgtccatccagagcaactcatttccgggacacgggctgcttctagcttccaatgtttaagaaggtctgttctcgatgagaggctaaaaagcaatgaatattctaccagcgcgttgactggtactctgcttcaccaagtctttcaggctggattactcaatgatgctccttcatggcagtttttggaacaacaggcaaaggaagtacttctgaaaaatattgaaactttatatgcatgtggagtcaatgaaagcaacatgtactctacgctcattgaagctatccccaaaatgttgaattggttcaagtgtttcttaaagggttcaaaatgttctgatgttgattttggacataacgaagtgagaaagactgttggagtgactgaggtcatggatattgaggaaatggcatgggcaccaagatatggtatgaaaggggttatcgatgcttctgttagatcaagagttgagtcacacaatggtggttcatatgatagaataatgccactagagttcaaaactggcaaagcaactagtggccaggcagctatggaacactcagctcaggtgatgttatacacactgttgatgacagagagatacttgaatgaggatattgacttgggccttctgtattatcttcacacagaccagacattgggcattaaagtaaagaggactgatttaattgggctaataatgcgccgaaacgagcttgctactgagatcctgaaggcatcgatgtcacagagttttcctccaatgttacagagcccatcaacatgtaatagatgtcgacacctgatttcttgcaccatatatcacaaggcacacggaggcagtggtacaactagtgggcttggtgatctatttgacaaccttgtgaatcacttaacagtcacacatcataattttcttaaacattgggatagattgattgatcttgaagctagagcttctcaggtaaaaaagaacatcttgcagcctcataattcaaactatgggagtgggagttctgctgtaccttattttgttcttgacataaaaaatggacattcaatagattcttcaggaaaaagcaaaagatacatatataattttgttcagcaaaagatgcagcctgaaacagctgatcagttagatgctcaatttgacagcatagatttcagcctgaaagttggtgattttgtggtgcttagcactcagtctgggagaatagcagttgcaaatggatgtataagagaaataataagtcactctcacataacggtctctttgccacgccgtttgagaattccagatagcaattccttgtcagagcaagaggatctgacacgtgaaatttggcggatagacaaggatgaatttagttcttcatttggaataatgagactcaacattgtccaactatttgctcagaatccacaaaactctcacctgcgcaagttgattgttgatcttgaggcacccaggtttgatagcggaggtctgtttagccaagatcctgcactatcatacataagattctaggagcaaaggattatgctcttattttaggaatgcctggaacaggcaaaacatacacaatggtgcatgctgtgaagtcattattgataagaggggaatctattttgctaacttcatatactaactcggctattgataccctgctcatgaagttgaagactgagggtgtagattttattcggattggaaggcctgaggctgtacatcctgatgtcagggcccactgcttgtcaacaactgaggcacaatcggttgatgccattaaagcaaggatggagcaagtacaggttgttggagttacttgcttgggaatgtatcatcctttattagcacataagaagtttgacacatgtatcatggatgaagctggacaaattacattgccggtttcactgggacctttgatgcttgcaacaaagtttgttctagtaggagaccattatcaacttcctccactggttcagagctctgaagcgcgagaaaatgggatgggcatcagcttattttggagattgtcagaagcacattcccaggcaatttcagcactgcgatgccaggttgtgctgtggttcattggaaattgcaaatgccaaactcaagttttctggtagagaaccaatgcagttgaagttaaaagagatcttgaatcccgatagggctgtgatctttgccaacacagatcaaatacctgcacttgaggcaaaggaacacagaactgtgaacaatcctacagaagcacacattatttcatggatcatcaaagaattactaagaaggggtgtagctcaagatgctattggtatcataaccccatataacgctcaagtgaatatcattcagcaatacactgattgtttggttgaggttcatacgatcgataaataccagggtagagataaggagtgtataatagtatctttcgtgcgctccactgcaaactcaagggctagtggttcttctctgcttggtgattggcacaggatcaatgttctgttgacacgtgcaaagaagaagctcatcatggtgggatcacgtggaacgctttcaacaatacctttgctcaggcttcttgtcgacaaagtagctgagattggtggcctgttggatttgacaaataaggatgcacattctttttcgagaacttgaagttcttgtttgaatgcacaataggatgcacggtagatgaatctggaaggtttttataaggccaagctgtaaataagaatatgctgtaaattttgtttttggaaatgtatagtaaacctagccaagagccacacagctagaggttaggttttgtatattccttccgttagttataacttatttcaatttcattaaagtaccataagtttactaatattatagaaaaactttcaaaaatttatgacatcaaatatacgtactataaaaatataattaatg

SEQ ID NO: 24232 - DNA, 4275 bp, Zea Mays
ccaggccattccgcaccgccaaaattgctccgcgcgggaattccaatttcctccccacctccgcccgcttcccagttcccagtgcacagccgattcgtctccattcctatcttctcccattccctccccagtccgacctccgaccccccatttcgtcgccgccgccgtactcgccgagaacccgccccaaatccataggcccatcccttacccattaacccccaatgcctccgaagaagcgcgccgccgccgccgcctcttcaaagaagccgcagccatcgcagccatcgcagcccgccaagttcggtatcctccacttcttcgagcgccagacccaggcctcccagaacgccaagcgccagaagcccgacccccctgcgcctccccctcctcctccgccgccgcccgagaaggagccctcggaggtctcgccggaggttaccaagacgctggcgccgaagcgtgtcagattttctcccggaatgttgattaagcagagccaggacgatggggtcgcggaggtggtgacttggaagatctcgccggtgaaccatcgccttggtacgacgaagtcgaagcaatttctggggatggcgccccatccgtactcaagcgagaaaaattcctcccttgatgctatgaagaagtggcattcatctccattgggcttgtcaaggtgtactactttgggaagtaattcaggagttcttggatctgctatagttggttgtgatggtgtgggggatactcagagtccatttcggaccccaccatcgctttcctatggctgcaacgagcaagtgagcagtggtgtaacttctgagggaggtgccgaaccatcgggagcagggcagcacaaaaaggcattacttgatcttctagaccaagtagaggatgcaatcatggaagaagaattgcctgctgatcctggaaataaaggagggcaaaccacgaatgaggatatcaccaacaatagccgttctcctgttgctgatactgacttaactatcccatccaagaaaactattcatgtcccacccttcaatagttttcttgtcttggaggtgtccgaaaaacataaagctgatgattcatcatgtgatcgctaccctgttaaggttctgcgtctgctgaatgaacactctggtacagaatgtgccgtgcatctgtgtgatgagtggttcgacagtattgttgggcctggtgatactgtaaatgtcattggagaatttagtaaccatggaaaatgtattgttgaccatgacaataatcttgttattgtccatccagagcaactcatttccgggacacgggctgcttctagcttccaatgtttaagaaggtctgttctcgatgagaggctaaaaagcaatgaatattctaccagcgcgttgactggtactctgcttcaccaagtctttcaggctggattactcaatgatgctccttcatggcagtttttggaacaacaggcaaaggaagtacttctgaaaaatattgaaactttatatgcatgtggagtcaatgaaagcaacatgtactctacgctcattgaagctatccccaaaatgttgaattggttcaagtgtttcttaaagggttcaaaatgttctgatgttgattttggacataacgaagtgagaaagactgttggagtgactgaggtcatggatattgaggaaatggcatgggcaccaagatatggtatgaaaggggttatcgatgcttctgttagatcaagagttgagtcacacaatggtggttcatatgatagaataatgccactagagttcaaaactggcaaagcaactagtggccaggcagctatggaacactcagctcaggtgatgttatacacactgttgatgacagagagatacttgaatgaggatattgacttgggccttctgtattatcttcacacagaccagacattgggcattaaagtaaagaggactgatttaattgggctaataatgcgccgaaacgagcttgctactgagatcctgaaggcatcgatgtcacagagttttcctccaatgttacagagcccatcaacatgtaatagatgtcgacacctgatttcttgcaccatatatcacaaggcacacggaggcagtggtacaactagtgggcttggtgatctatttgacaaccttgtgaatcacttaacagtcacacatcataattttcttaaacattgggatagattgattgatcttgaagctagagcttctcaggtaaaaaagaacatcttgcagcctcataattcaaactatgggagtgggagttctgctgtaccttattttgttcttgacataaaaaatggacattcaatagattcttcaggaaaaagcaaaagatacatatataattttgttcagcaaaagatgcagcctgaaacagctgatcagttagatgctcaatttgacagcatagatttcagcctgaaagttggtgattttgtggtgcttagcactcagtctgggagaatagcagttgcaaatggatgtataagagaaataataagtcactctcacataacggtctctttgccacgccgtttgagaattccagatagcaattccttgtcagagcaagaggatctgacacgtgaaatttggcggatagacaaggatgaatttagttcttcatttggaataatgagactcaacattgtccaactatttgctcagaatccacaaaactctcacctgcgcaagttgattgttgatcttgaggcacccaggtttgatagcggaggtctgtttagccaagatcctgcactatcatacataaggtcactaccaaacttgaataatgaccaacaaaggtcactgcataaaattctaggagcaaaggattatgctcttattttaggaatgcctggaacaggcaaaacatacacaatggtgcatgctgtgaagtcattattgataagaggggaatctattttgctaacttcatatactaactcggctattgataccctgctcatgaagttgaagactgagggtgtagattttattcggattggaaggcctgaggctgtacatcctgatgtcagggcccactgcttgtcaacaactgaggcacaatcggttgatgccattaaagcaaggatggagcaagtacaggttgttggagttacttgcttgggaatgtatcatcctttattagcacataagaagtttgacacatgtatcatggatgaagctggacaaattacattgccggtttcactgggacctttgatgcttgcaacaaagtttgttctagtaggagaccattatcaacttcctccactggttcagagctctgaagcgcgagaaaatgggatgggcatcagcttattttggagattgtcagaagcacattcccaggcaatttcagcactgcgatgccaggttgtgctgtggttcattggaaattgcaaatgccaaactcaagttttctggtagagaaccaatgcagttgaagttaaaagagatcttgaatcccgatagggctgtgatctttgccaacacagatcaaatacctgcacttgaggcaaaggaacacagaactgtgaacaatcctacagaagcacacattatttcatggatcatcaaagaattactaagaaggggtgtagctcaagatgctattggtatcataaccccatataacgctcaagtgaatatcattcagcaatacactgattgtttggttgaggttcatacgatcgataaataccagggtagagataaggagtgtataatagtatctttcgtgcgctccactgcaaactcaagggctagtggttcttctctgcttggtgattggcacaggatcaatgttctgttgacacgtgcaaagaagaagctcatcatggtgggatcacgtggaacgctttcaacaatacctttgctcaggcttcttgtcgacaaagtagctgagattggtggcctgttggatttgacaaataaggatgcacattctttttcgagaacttgaagttcttgtttgaatgcacaataggatgcacggtagatgaatctggaaggtttttataaggccaagctgtaaataagaatatgctgtaaattttgtttttggaaatgtatagtaaacctagccaagagccacacagctagaggttaggttttgtatattccttccgttagttataacttatttcaatttcattaaagtaccataagtttactaatattatagaaaaactttcaaaaatttatgacatcaaatatacgtactataaaaatataattaatg

SEQ ID NO: 24233 - DNA, 4285 bp, Zea Mays
ccaggccattccgcaccgccaaaattgctccgcgcgggaattccaatttcctccccacctccgcccgcttcccagttcccagtgcacagccgattcgtctccattcctatcttctcccattccctccccagtccgacctccgaccccccatttcgtcgccgccgccgtactcgccgagaacccgccccaaatccataggcccatcccttacccattaacccccaatgcctccgaagaagcgcgccgccgccgccgcctcttcaaagaagccgcagccatcgcagccatcgcagcccgccaagttcggtatcctccacttcttcgagcgccagacccaggcctcccagaacgccaagcgccagaagcccgacccccctgcgcctccccctcctcctccgccgccgcccgagaaggagccctcggaggtctcgccggaggttaccaagacgctggcgccgaagcgtgtcagattttctcccggaatgttgattaagcagagccaggacgatggggtcgcggaggtggtgacttggaagatctcgccggtgaaccatcgccttggtacgacgaagtcgaagcaatttctggggatggcgccccatccgtactcaagcgagaaaaattcctcccttgatgctatgaagaagtggcattcatctccattgggcttgtcaaggtgtactactttgggaagtaattcaggagttcttggatctgctatagttggttgtgatggtgtgggggatactcagagtccatttcggaccccaccatcgctttcctatggctgcaacgagcaagtgagcagtggtgtaacttctgagggaggtgccgaaccatcgggagcagggcagcacaaaaaggcattacttgatcttctagaccaagtagaggatgcaatcatggaagaagaattgcctgctgatcctggaaataaaggagggcaaaccacgaatgaggatatcaccaacaatagccgttctcctgttgctgatactgacttaactatcccatccaagaaaactattcatgtcccacccttcaatagttttcttgtcttggaggtgtccgaaaaacataaagctgatgattcatcatgtgatcgctaccctgttaaggttctgcgtctgctgaatgaacactctggtacagaatgtgccgtgcatctgtgtgatgagtggttcgacagtattgttgggcctggtgatactgtaaatgtcattggagaatttagtaaccatggaaaatgtattgttgaccatgacaataatcttgttattgtccatccagagcaactcatttccgggacacgggctgcttctagcttccaatgtttaagaaggtctgttctcgatgagaggctaaaaagcaatgaatattctaccagcgcgttgactggtactctgcttcaccaagtctttcaggctggattactcaatgatgctccttcatggcagtttttggaacaacaggcaaaggaagtacttctgaaaaatattgaaactttatatgcatgtggagtcaatgaaagcaacatgtactctacgctcattgaagctatccccaaaatgttgaattggttcaagtgtttcttaaagggttcaaaatgttctgatgttgattttggacataacgaagtgagaaagactgttggagtgactgaggtcatggatattgaggaaatggcatgggcaccaagatatggtatgaaaggggttatcgatgcttctgttagatcaagagttgagtcacacaatggtggttcatatgatagaataatgccactagagttcaaaactggcaaagcaactagtggccaggcagctatggaacactcagctcaggtgatgttatacacactgttgatgacagagagatacttgaatgaggatattgacttgggccttctgtattatcttcacacagaccagacattgggcattaaagtaaagaggactgatttaattgggctaataatgcgccgaaacgagcttgctactgagatcctgaaggcatcgatgtcacagagttttcctccaatgttacagagcccatcaacatgtaatagatgtcgacacctgatttcttgcaccatatatcacaaggcacacggaggcagtggtacaactagtgggcttggtgatctatttgacaaccttgtgaatcacttaacagtcacacatcataattttcttaaacattgggatagattgattgatcttgaagctagagcttctcaggtaaaaaagaacatcttgcagcctcataattcaaactatgggagtgggagttctgctgtaccttattttgttcttgacataaaaaatggacattcaatagattcttcaggaaaaagcaaaagatacatatataattttgttcagcaaaagatgcagcctgaaacagctgatcagttagatgctcaatttgacagcatagatttcagcctgaaagttggtgattttgtggtgcttagcactcagtctgggagaatagcagttgcaaatggatgtataagagaaataataagtcactctcacataacggtctctttgccacgccgtttgagaattccagatagcaattccttgtcagagcaagaggatctgacacgtgaaatttggcggatagacaaggatgaatttagttcttcatttggaataatgagactcaacattgtccaactatttgctcagaatccacaaaactctcacctgcgcaagttgattgttgatcttgaggcacccaggtttgatagcggaggtctgtttagccaagatcctgcactatcatacataagattctaggagcaaaggattatgctcttattttaggaatgcctggaacaggcaaaacatacacaatggtgcatgctgtgaagtcattattgataagaggggaatctattttgctaacttcatatactaactcggctattgataccctgctcatgaagttgaagactgagggtgtagattttattcggattggaaggcctgaggctgtacatcctgatgtcagggcccactgcttgtcaacaactgaggcacaatcggttgatgccattaaagcaaggatggagcaagtacaggttgttggagttacttgcttgggaatgtatcatcctttattagcacataagaagtttgacacatgtatcatggatgaagctggacaaattacattgccggtttcactgggacctttgatgcttgcaacaaagtttgttctagtaggagaccattatcaacttcctccactggttcagagctctgaagcgcgagaaaatgggatgggcatcagcttattttggagattgtcagaagcacattcccaggcaatttcagcactgcgatgccagtaccgtatgtcatctggtatcatggagctctcaaattcgttgatttacggtaataggttgtgctgtggttcattggaaattgcaaatgccaaactcaagttttctggtagagaaccaatgcagttgaagttaaaagagatcttgaatcccgatagggctgtgatctttgccaacacagatcaaatacctgcacttgaggcaaaggaacacagaactgtgaacaatcctacagaagcacacattatttcatggatcatcaaagaattactaagaaggggtgtagctcaagatgctattggtatcataaccccatataacgctcaagtgaatatcattcagcaatacactgattgtttggttgaggttcatacgatcgataaataccagggtagagataaggagtgtataatagtatctttcgtgcgctccactgcaaactcaagggctagtggttcttctctgcttggtgattggcacaggatcaatgttctgttgacacgtgcaaagaagaagctcatcatggtgggatcacgtggaacgctttcaacaatacctttgctcaggcttcttgtcgacaaagtagctgagattggtggcctgttggatttgacaaataaggatgcacattctttttcgagaacttgaagttcttgtttgaatgcacaataggatgcacggtagatgaatctggaaggtttttataaggccaagctgtaaataagaatatgctgtaaattttgtttttggaaatgtatagtaaacctagccaagagccacacagctagaggttaggttttgtatattccttccgttagttataacttatttcaatttcattaaagtaccataagtttactaatattatagaaaaactttcaaaaatttatgacatcaaatatacgtactataaaaatataattaatg

SEQ ID NO: 24234 - DNA, 4327 bp, Zea Mays
ccaggccattccgcaccgccaaaattgctccgcgcgggaattccaatttcctccccacctccgcccgcttcccagttcccagtgcacagccgattcgtctccattcctatcttctcccattccctccccagtccgacctccgaccccccatttcgtcgccgccgccgtactcgccgagaacccgccccaaatccataggcccatcccttacccattaacccccaatgcctccgaagaagcgcgccgccgccgccgcctcttcaaagaagccgcagccatcgcagccatcgcagcccgccaagttcggtatcctccacttcttcgagcgccagacccaggcctcccagaacgccaagcgccagaagcccgacccccctgcgcctccccctcctcctccgccgccgcccgagaaggagccctcggaggtctcgccggaggttaccaagacgctggcgccgaagcgtgtcagattttctcccggaatgttgattaagcagagccaggacgatggggtcgcggaggtggtgacttggaagatctcgccggtgaaccatcgccttggtacgacgaagtcgaagcaatttctggggatggcgccccatccgtactcaagcgagaaaaattcctcccttgatgctatgaagaagtggcattcatctccattgggcttgtcaaggtgtactactttgggaagtaattcaggagttcttggatctgctatagttggttgtgatggtgtgggggatactcagagtccatttcggaccccaccatcgctttcctatggctgcaacgagcagcaagtgagcagtggtgtaacttctgagggaggtgccgaaccatcgggagcagggcagcacaaaaaggcattacttgatcttctagaccaagtagaggatgcaatcatggaagaagaattgcctgctgatcctggaaataaaggagggcaaaccacgaatgaggatatcaccaacaatagccgttctcctgttgctgatactgacttaactatcccatccaagaaaactattcatgtcccacccttcaatagttttcttgtcttggaggtgtccgaaaaacataaagctgatgattcatcatgtgatcgctaccctgttaaggttctgcgtctgctgaatgaacactctggtacagaatgtgccgtgcatctgtgtgatgagtggttcgacagtattgttgggcctggtgatactgtaaatgtcattggagaatttagtaaccatggaaaatgtattgttgaccatgacaataatcttgttattgtccatccagagcaactcatttccgggacacgggctgcttctagcttccaatgtttaagaaggtctgttctcgatgagaggctaaaaagcaatgaatattctaccagcgcgttgactggtactctgcttcaccaagtctttcaggctggattactcaatgatgctccttcatggcagtttttggaacaacaggcaaaggaagtacttctgaaaaatattgaaactttatatgcatgtggagtcaatgaaagcaacatgtactctacgctcattgaagctatccccaaaatgttgaattggttcaagtgtttcttaaagggttcaaaatgttctgatgttgattttggacataacgaagtgagaaagactgttggagtgactgaggtcatggatattgaggaaatggcatgggcaccaagatatggtatgaaaggggttatcgatgcttctgttagatcaagagttgagtcacacaatggtggttcatatgatagaataatgccactagagttcaaaactggcaaagcaactagtggccaggcagctatggaacactcagctcaggtgatgttatacacactgttgatgacagagagatacttgaatgaggatattgacttgggccttctgtattatcttcacacagaccagacattgggcattaaagtaaagaggactgatttaattgggctaataatgcgccgaaacgagcttgctactgagatcctgaaggcatcgatgtcacagagttttcctccaatgttacagagcccatcaacatgtaatagatgtcgacacctgatttcttgcaccatatatcacaaggcacacggaggcagtggtacaactagtgggcttggtgatctatttgacaaccttgtgaatcacttaacagtcacacatcataattttcttaaacattgggatagattgattgatcttgaagctagagcttctcaggtaaaaaagaacatcttgcagcctcataattcaaactatgggagtgggagttctgctgtaccttattttgttcttgacataaaaaatggacattcaatagattcttcaggaaaaagcaaaagatacatatataattttgttcagcaaaagatgcagcctgaaacagctgatcagttagatgctcaatttgacagcatagatttcagcctgaaagttggtgattttgtggtgcttagcactcagtctgggagaatagcagttgcaaatggatgtataagagaaataataagtcactctcacataacggtctctttgccacgccgtttgagaattccagatagcaattccttgtcagagcaagaggatctgacacgtgaaatttggcggatagacaaggatgaatttagttcttcatttggaataatgagactcaacattgtccaactatttgctcagaatccacaaaactctcacctgcgcaagttgattgttgatcttgaggcacccaggtttgatagcggaggtctgtttagccaagatcctgcactatcatacataaggtcactaccaaacttgaataatgaccaacaaaggtcactgcataaaattctaggagcaaaggattatgctcttattttaggaatgcctggaacaggcaaaacatacacaatggtgcatgctgtgaagtcattattgataagaggggaatctattttgctaacttcatatactaactcggctattgataccctgctcatgaagttgaagactgagattttattcggattggaaggcctgaggctgtacatcctgatgtcagggcccactgcttgtcaacaactgaggcacaatcggttgatgccattaaagcaaggatggagcaagtacaggttgttggagttacttgcttgggaatgtatcatcctttattagcacataagaagtttgacacatgtatcatggatgaagctggacaaattacattgccggtttcactgggacctttgatgcttgcaacaaagtttgttctagtaggagaccattatcaacttcctccactggttcagagctctgaagcgcgagaaaatgggatgggcatcagcttattttggagattgtcagaagcacattcccaggcaatttcagcactgcgatgccagtaccgtatgtcatctggtatcatggagctctcaaattcgttgatttacggtaataggttgtgctgtggttcattggaaattgcaaatgccaaactcaagttttctggtagagaaccaatgcagttgaagttaaaagagatcttgaatcccgatagggctgtgatctttgccaacacagatcaaatacctgcacttgaggcaaaggaacacagaactgtgaacaatcctacagaagcacacattatttcatggatcatcaaagaattactaagaaggggtgtagctcaagatgctattggtatcataaccccatataacgctcaagtgaatatcattcagcaatacactgattgtttggttgaggttcatacgatcgataaataccagggtagagataaggagtgtataatagtatctttcgtgcgctccactgcaaactcaagggctagtggttcttctctgcttggtgattggcacaggatcaatgttctgttgacacgtgcaaagaagaagctcatcatggtgggatcacgtggaacgctttcaacaatacctttgctcaggcttcttgtcgacaaagtagctgagattggtggcctgttggatttgacaaataaggatgcacattctttttcgagaacttgaagttcttgtttgaatgcacaataggatgcacggtagatgaatctggaaggtttttataaggccaagctgtaaataagaatatgctgtaaattttgtttttggaaatgtatagtaaacctagccaagagccacacagctagaggttaggttttgtatattccttccgttagttataacttatttcaatttcattaaagtaccataagtttactaatattatagaaaaactttcaaaaatttatgacatcaaatatacgtactataaaaatataattaatg

SEQ ID NO: 24235 - DNA, 4229 bp, Zea Mays
ccaggccattccgcaccgccaaaattgctccgcgcgggaattccaatttcctccccacctccgcccgcttcccagttcccagtgcacagccgattcgtctccattcctatcttctcccattccctccccagtccgacctccgaccccccatttcgtcgccgccgccgtactcgccgagaacccgccccaaatccataggcccatcccttacccattaacccccaatgcctccgaagaagcgcgccgccgccgccgcctcttcaaagaagccgcagccatcgcagccatcgcagcccgccaagttcggtatcctccacttcttcgagcgccagacccaggcctcccagaacgccaagcgccagaagcccgacccccctgcgcctccccctcctcctccgccgccgcccgagaaggagccctcggaggtctcgccggaggttaccaagacgctggcgccgaagcgtgtcagattttctcccggaatgttgattaagcagagccaggacgatggggtcgcggaggtggtgacttggaagatctcgccggtgaaccatcgccttggtacgacgaagtcgaagcaatttctggggatggcgccccatccgtactcaagcgagaaaaattcctcccttgatgctatgaagaagtggcattcatctccattgggcttgtcaaggtgtactactttgggaagtaattcaggagttcttggatctgctatagttggttgtgatggtgtgggggatactcagagtccatttcggaccccaccatcgctttcctatggctgcaacgagcaagtgagcagtggtgtaacttctgagggaggtgccgaaccatcgggagcagggcagcacaaaaaggcattacttgatcttctagaccaagtagaggatgcaatcatggaagaagaattgcctgctgatcctggaaataaaggagggcaaaccacgaatgaggatatcaccaacaatagccgttctcctgttgctgatactgacttaactatcccatccaagaaaactattcatgtcccacccttcaatagttttcttgtcttggaggtgtccgaaaaacataaagctgatgattcatcatgtgatcgctaccctgttaaggttctgcgtctgctgaatgaacactctggtacagaatgtgccgtgcatctgtgtgatgagtggttcgacagtattgttgggcctggtgatactgtaaatgtcattggagaatttagtaaccatggaaaatgtattgttgaccatgacaataatcttgttattgtccatccagagcaactcatttccgggacacgggctgcttctagcttccaatgtttaagaaggtctgttctcgatgagaggctaaaaagcaatgaatattctaccagcgcgttgactggtactctgcttcaccaagtctttcaggctggattactcaatgatgctccttcatggcagtttttggaacaacaggcaaaggaagtacttctgaaaaatattgaaactttatatgcatgtggagtcaatgaaagcaacatgtactctacgctcattgaagctatccccaaaatgttgaattggttcaagtgtttcttaaagggttcaaaatgttctgatgttgattttggacataacgaagtgagaaagactgttggagtgactgaggtcatggatattgaggaaatggcatgggcaccaagatatggtatgaaaggggttatcgatgcttctgttagatcaagagttgagtcacacaatggtggttcatatgatagaataatgccactagagttcaaaactggcaaagcaactagtggccaggcagctatggaacactcagctcaggtgatgttatacacactgttgatgacagagagatacttgaatgaggatattgacttgggccttctgtattatcttcacacagaccagacattgggcattaaagtaaagaggactgatttaattgggctaataatgcgccgaaacgagcttgctactgagatcctgaaggcatcgatgtcacagagttttcctccaatgttacagagcccatcaacatgtaatagatgtcgacacctgatttcttgcaccatatatcacaaggcacacggaggcagtggtacaactagtgggcttggtgatctatttgacaaccttgtgaatcacttaacagtcacacatcataattttcttaaacattgggatagattgattgatcttgaagctagagcttctcaggtaaaaaagaacatcttgcagcctcataattcaaactatgggagtgggagttctgctgtaccttattttgttcttgacataaaaaatggacattcaatagattcttcaggaaaaagcaaaagatacatatataattttgttcagcaaaagatgcagcctgaaacagctgatcagttagatgctcaatttgacagcatagatttcagcctgaaagttggtgattttgtggtgcttagcactcagtctgggagaatagcagttgcaaatggatgtataagagaaataataagtcactctcacataacggtctctttgccacgccgtttgagaattccagatagcaattccttgtcagagcaagaggatctgacacgtgaaatttggcggatagacaaggatgaatttagttcttcatttggaataatgagactcaacattgtccaactatttgctcagaatccacaaaactctcacctgcgcaagttgattgttgatcttgaggcacccaggtttgatagcggaggtctgtttagccaagatcctgcactatcatacataagattctaggagcaaaggattatgctcttattttaggaatgcctggaacaggcaaaacatacacaatggtgcatgctgtgaagtcattattgataagaggggaatctattttgctaacttcatatactaactcggctattgataccctgctcatgaagttgaagactgagggtgtagattttattcggattggaaggcctgaggctgtacatcctgatgtcagggcccactgcttgtcaacaactgaggcacaatcggttgatgccattaaagcaaggatggagcaagtacaggttgttggagttacttgcttgggaatgtatcatcctttattagcacataagaagtttgacacatgtatcatggatgaagctggacaaattacattgccggtttcactgggacctttgatgcttgcaacaaagtttgttctagtaggagaccattatcaacttcctccactggttcagagctctgaagcgcgagaaaatgggatgggcatcagcttattttggagattgtcagaagcacattcccaggcaatttcagcactgcgatgccaggttgtgctgtggttcattggaaattgcaaatgccaaactcaagttttctggtagagaaccaatgcagttgaagttaaaagagatcttgaatcccgatagggctgtgatctttgccaacacagatcaaatacctgcacttgaggcaaaggaacacagaactgtgaacaatcctacagaagcacacattatttcatggatcatcaaagaattactaagaaggggtgtagctcaagatgctattggtatcataaccccatataacgctcaagtgaatatcattcagcaatacactgattgtttggttgaggttcatacgatcgataaataccagggtagagataaggagtgtataatagtatctttcgtgcgctccactgcaaactcaagggctagtggttcttctctgcttggtgattggcacaggatcaatgttctgttgacacgtgcaaagaagaagctcatcatggtgggatcacgtggaacgctttcaacaatacctttgctcaggcttcttgtcgacaaagtagctgagattggtggcctgttggatttgacaaataaggatgcacattctttttcgagaacttgaagttcttgtttgaatgcacaataggatgcacggtagatgaatctggaaggtttttataaggccaagctgtaaataagaatatgctgtaaattttgtttttggaaatgtatagtaaacctagccaagagccacacagctagaggttaggttttgtatattccttccgttagttataacttatttcaatttcattaaagtaccataagtttactaatattatagaaaaactttcaaaaatttatgacatcaaatatacgtactataaaaatataattaatg

SEQ ID NO: 24236 - DNA, 4416 bp, Zea Mays
ccaggccattccgcaccgccaaaattgctccgcgcgggaattccaatttcctccccacctccgcccgcttcccagttcccagtgcacagccgattcgtctccattcctatcttctcccattccctccccagtccgacctccgaccccccatttcgtcgccgccgccgtactcgccgagaacccgccccaaatccataggcccatcccttacccattaacccccaatgcctccgaagaagcgcgccgccgccgccgcctcttcaaagaagccgcagccatcgcagccatcgcagcccgccaagttcggtatcctccacttcttcgagcgccagacccaggcctcccagaacgccaagcgccagaagcccgacccccctgcgcctccccctcctcctccgccgccgcccgagaaggagccctcggaggtctcgccggaggttaccaagacgctggcgccgaagcgtgtcagattttctcccggaatgttgattaagcagagccaggacgatggggtcgcggaggtggtgacttggaagatctcgccggtgaaccatcgccttggtacgacgaagtcgaagcaatttctggggatggcgccccatccgtactcaagcgagaaaaattcctcccttgatgctatgaagaagtggcattcatctccattgggcttgtcaaggtgtactactttgggaagtaattcaggagttcttggatctgctatagttggttgtgatggtgtgggggatactcagagtccatttcggaccccaccatcgctttcctatggctgcaacgaggtaaccttcttgttccttgagcagcaagtgagcagtggtgtaacttctgagggaggtgccgaaccatcgggagcagggcagcacaaaaaggcattacttgatcttctagaccaagtagaggatgcaatcatggaagaagaattgcctgctgatcctggaaataaaggagggcaaaccacgaatgaggatatcaccaacaatagccgttctcctgttgctgatactgacttaactatcccatccaagaaaactattcatgtcccacccttcaatagttttcttgtcttggaggtgtccgaaaaacataaagctgatgattcatcatgtgatcgctaccctgttaaggttctgcgtctgctgaatgaacactctggtacagaatgtgccgtgcatctgtgtgatgagtggttcgacagtattgttgggcctggtgatactgtaaatgtcattggagaatttagtaaccatggaaaatgtattgttgaccatgacaataatcttgttattgtccatccagagcaactcatttccgggacacgggctgcttctagcttccaatgtttaagaaggtctgttctcgatgagaggctaaaaagcaatgaatattctaccagcgcgttgactggtactctgcttcaccaagtctttcaggctggattactcaatgatgctccttcatggcagtttttggaacaacaggcaaaggaagtacttctgaaaaatattgaaactttatatgcatgtggagtcaatgaaagcaacatgtactctacgctcattgaagctatccccaaaatgttgaattggttcaagtgtttcttaaagggttcaaaatgttctgatgttgattttggacataacgaagtgagaaagactgttggagtgactgaggtcatggatattgaggaaatggcatgggcaccaagatatggtatgaaaggggttatcgatgcttctgttagatcaagagttgagtcacacaatggtggttcatatgatagaataatgccactagagttcaaaactggcaaagcaactagtggccaggcagctatggaacactcagctcaggtgatgttatacacactgttgatgacagagagatacttgaatgaggatattgacttgggccttctgtattatcttcacacagaccagacattgggcattaaagtaaagaggactgatttaattgggctaataatgcgccgaaacgagcttgctactgagatcctgaaggcatcgatgtcacagagttttcctccaatgttacagagcccatcaacatgtaatagatgtcgacacctgatttcttgcaccatatatcacaaggcacacggaggcagtggtacaactagtgggcttggtgatctatttgacaaccttgtgaatcacttaacagtcacacatcataattttcttaaacattgggatagattgattgatcttgaagctagagcttctcaggtaaaaaagaacatcttgcagcctcataattcaaactatgggagtgggagttctgctgtaccttattttgttcttgacataaaaaatggacattcaatagattcttcaggaaaaagcaaaagatacatatataattttgttcagcaaaagatgcagcctgaaacagctgatcagttagatgctcaatttgacagcatagatttcagcctgaaagttggtgattttgtggtgcttagcactcagtctgggagaatagcagttgcaaatggatgtataagagaaataataagtcactctcacataacgatagcaattccttgtcagagcaagaggatctgacacgtgaaatttggcggatagacaaggatgaatttagttcttcatttggaataatgagactcaacattgtccaactatttgctcagaatccacaaaactctcacctgcgcaagttgattgttgatcttgaggcacccaggtttgatagcggaggtctgtttagccaagatcctgcactatcatacataaggtcactaccaaacttgaataatgaccaacaaaggtcactgcataaagtaaatttttttgctctttcattttcacccctcctgtagtctggacattaatgtctagctgtccactctgcaaactaatgtgttcctttcagattctaggagcaaaggattatgctcttattttaggaatgcctggaacaggcaaaacatacacaatggtgcatgctgtgaagtcattattgataagaggggaatctattttgctaacttcatatactaactcggctattgataccctgctcatgaagttgaagactgagggtgtagattttattcggattggaaggcctgaggctgtacatcctgatgtcagggcccactgcttgtcaacaactgaggcacaatcggttgatgccattaaagcaaggatggagcaagtacaggttgttggagttacttgcttgggaatgtatcatcctttattagcacataagaagtttgacacatgtatcatggatgaagctggacaaattacattgccggtttcactgggacctttgatgcttgcaacaaagtttgttctagtaggagaccattatcaacttcctccactggttcagagctctgaagcgcgagaaaatgggatgggcatcagcttattttggagattgtcagaagcacattcccaggcaatttcagcactgcgatgccagtaccgtatgtcatctggtatcatggagctctcaaattcgttgatttacggtaataggttgtgctgtggttcattggaaattgcaaatgccaaactcaagttttctggtagagaaccaatgcagttgaagttaaaagagatcttgaatcccgatagggctgtgatctttgccaacacagatcaaatacctgcacttgaggcaaaggaacacagaactgtgaacaatcctacagaagcacacattatttcatggatcatcaaagaattactaagaaggggtgtagctcaagatgctattggtatcataaccccatataacgctcaagtgaatatcattcagcaatacactgattgtttggttgaggttcatacgatcgataaataccagggtagagataaggagtgtataatagtatctttcgtgcgctccactgcaaactcaagggctagtggttcttctctgcttggtgattggcacaggatcaatgttctgttgacacgtgcaaagaagaagctcatcatggtgggatcacgtggaacgctttcaacaatacctttgctcaggcttcttgtcgacaaagtagctgagattggtggcctgttggatttgacaaataaggatgcacattctttttcgagaacttgaagttcttgtttgaatgcacaataggatgcacggtagatgaatctggaaggtttttataaggccaagctgtaaataagaatatgctgtaaattttgtttttggaaatgtatagtaaacctagccaagagccacacagctagaggttaggttttgtatattccttccgttagttataacttatttcaatttcattaaagtaccataagtttactaatattatagaaaaactttcaaaaatttatgacatcaaatatacgtactataaaaatataattaatg

SEQ ID NO: 24237 - DNA, 4325 bp, Zea Mays
ccaggccattccgcaccgccaaaattgctccgcgcgggaattccaatttcctccccacctccgcccgcttcccagttcccagtgcacagccgattcgtctccattcctatcttctcccattccctccccagtccgacctccgaccccccatttcgtcgccgccgccgtactcgccgagaacccgccccaaatccataggcccatcccttacccattaacccccaatgcctccgaagaagcgcgccgccgccgccgcctcttcaaagaagccgcagccatcgcagccatcgcagcccgccaagttcggtatcctccacttcttcgagcgccagacccaggcctcccagaacgccaagcgccagaagcccgacccccctgcgcctccccctcctcctccgccgccgcccgagaaggagccctcggaggtctcgccggaggttaccaagacgctggcgccgaagcgtgtcagattttctcccggaatgttgattaagcagagccaggacgatggggtcgcggaggtggtgacttggaagatctcgccggtgaaccatcgccttggtacgacgaagtcgaagcaatttctggggatggcgccccatccgtactcaagcgagaaaaattcctcccttgatgctatgaagaagtggcattcatctccattgggcttgtcaaggtgtactactttgggaagtaattcaggagttcttggatctgctatagttggttgtgatggtgtgggggatactcagagtccatttcggaccccaccatcgctttcctatggctgcaacgagcagcaagtgagcagtggtgtaacttctgagggaggtgccgaaccatcgggagcagggcagcacaaaaaggcattacttgatcttctagaccaagtagaggatgcaatcatggaagaagaattgcctgctgatcctggaaataaaggagggcaaaccacgaatgaggatatcaccaacaatagccgttctcctgttgctgatactgacttaactatcccatccaagaaaactattcatgtcccacccttcaatagttttcttgtcttggaggtgtccgaaaaacataaagctgatgattcatcatgtgatcgctaccctgttaaggttctgcgtctgctgaatgaacactctggtacagaatgtgccgtgcatctgtgtgatgagtgtattgttgggcctggtgatactgtaaatgtcattggagaatttagtaaccatggaaaatgtattgttgaccatgacaataatcttgttattgtccatccagagcaactcatttccgggacacgggctgcttctagcttccaatgtttaagaaggtctgttctcgatgagaggctaaaaagcaatgaatattctaccagcgcgttgactggtactctgcttcaccaagtctttcaggctggattactcaatgatgctccttcatggcagtttttggaacaacaggcaaaggaagtacttctgaaaaatattgaaactttatatgcatgtggagtcaatgaaagcaacatgtactctacgctcattgaagctatccccaaaatgttgaattggttcaagtgtttcttaaagggttcaaaatgttctgatgttgattttggacataacgaagtgagaaagactgttggagtgactgaggtcatggatattgaggaaatggcatgggcaccaagatatggtatgaaaggggttatcgatgcttctgttagatcaagagttgagtcacacaatggtggttcatatgatagaataatgccactagagttcaaaactggcaaagcaactagtggccaggcagctatggaacactcagctcaggtgatgttatacacactgttgatgacagagagatacttgaatgaggatattgacttgggccttctgtattatcttcacacagaccagacattgggcattaaagtaaagaggactgatttaattgggctaataatgcgccgaaacgagcttgctactgagatcctgaaggcatcgatgtcacagagttttcctccaatgttacagagcccatcaacatgtaatagatgtcgacacctgatttcttgcaccatatatcacaaggcacacggaggcagtggtacaactagtgggcttggtgatctatttgacaaccttgtgaatcacttaacagtcacacatcataattttcttaaacattgggatagattgattgatcttgaagctagagcttctcaggtaaaaaagaacatcttgcagcctcataattcaaactatgggagtgggagttctgctgtaccttattttgttcttgacataaaaaatggacattcaatagattcttcaggaaaaagcaaaagatacatatataattttgttcagcaaaagatgcagcctgaaacagctgatcagttagatgctcaatttgacagcatagatttcagcctgaaagttggtgattttgtggtgcttagcactcagtctgggagaatagcagttgcaaatggatgtataagagaaataataagtcactctcacataacggtctctttgccacgccgtttgagaattccagatagcaattccttgtcagagcaagaggatctgacacgtgaaatttggcggatagacaaggatgaatttagttcttcatttggaataatgagactcaacattgtccaactatttgctcagaatccacaaaactctcacctgcgcaagttgattgttgatcttgaggcacccaggtttgatagcggaggtctgtttagccaagatcctgcactatcatacataaggtcactaccaaacttgaataatgaccaacaaaggtcactgcataaaattctaggagcaaaggattatgctcttattttaggaatgcctggaacaggcaaaacatacacaatggtgcatgctgtgaagtcattattgataagaggggaatctattttgctaacttcatatactaactcggctattgataccctgctcatgaagttgaagactgagggtgtagattttattcggattggaaggcctgaggctgtacatcctgatgtcagggcccactgcttgtcaacaactgaggcacaatcggttgatgccattaaagcaaggatggagcaagtacaggttgttggagttacttgcttgggaatgtatcatcctttattagcacataagaagtttgacacatgtatcatggatgaagctggacaaattacattgccggtttcactgggacctttgatgcttgcaacaaagtttgttctagtaggagaccattatcaacttcctccactggttcagagctctgaagcgcgagaaaatgggatgggcatcagcttattttggagattgtcagaagcacattcccaggcaatttcagcactgcgatgccagtaccgtatgtcatctggtatcatggagctctcaaattcgttgatttacggtaataggttgtgctgtggttcattggaaattgcaaatgccaaactcaagttttctggtagagaaccaatgcagttgaagttaaaagagatcttgaatcccgatagggctgtgatctttgccaacacagatcaaatacctgcacttgaggcaaaggaacacagaactgtgaacaatcctacagaagcacacattatttcatggatcatcaaagaattactaagaaggggtgtagctcaagatgctattggtatcataaccccatataacgctcaagtgaatatcattcagcaatacactgattgtttggttgaggttcatacgatcgataaataccagggtagagataaggagtgtataatagtatctttcgtgcgctccactgcaaactcaagggctagtggttcttctctgcttggtgattggcacaggatcaatgttctgttgacacgtgcaaagaagaagctcatcatggtgggatcacgtggaacgctttcaacaatacctttgctcaggcttcttgtcgacaaagtagctgagattggtggcctgttggatttgacaaataaggatgcacattctttttcgagaacttgaagttcttgtttgaatgcacaataggatgcacggtagatgaatctggaaggtttttataaggccaagctgtaaataagaatatgctgtaaattttgtttttggaaatgtatagtaaacctagccaagagccacacagctagaggttaggttttgtatattccttccgttagttataacttatttcaatttcattaaagtaccataagtttactaatattatagaaaaactttcaaaaatttatgacatcaaatatacgtactataaaaatataattaatg

SEQ ID NO: 24238 - DNA, 2145 bp, Zea Mays
attttttcttccaacacaattgttcagccactgcatcaaaagataaaacacaggtttgagtagtaacagaagggaaaaatcaacaaaaattagaaaagacgaagaaagccaaattagctatgttgcataatccagctcggtttcttgtttccttggctgattggttagttttctttcttagctaattgattgagccctttgtttgggcgtacctatagtgcgctagatgcatgcaccatacaatggctgtctttccttgttttctgttcctgtttttagacccaagtaacacgatatgacaagctattggctgtgggatagcatggtccagtagaagatattgatgcctgatttgtggctgtgagactttgtaattgtatttaatcagatcaatagaatataaaaaggtagagtatattttggcagcaccaaaaggtccaaaactcagtgttcatgttgagtttttttgtgagcatttgggttatccacggatcatctccaaaactcagtgttcatgttgagtttttttgtgagcatttgggttatccacggatcatcttctttgtctccaacaaggcatgccgacaagtagatgattagatttggtatcagagccactatgttgtcaaggccgtgctagcagtcatgcagcggaacgaactgcctcggcaccgcattgccgacaggagatgaggagtggctctagcaatgacgactacaacccggtgatctaccgggtcatgagagagtggcgacagtaggcagtactcgttgttgaccaagaccaactactattcatggcatgtggatggcagtgaacatcagcaccgtcaactacactgacaatcgcaatgctctagaagccatcacccttggtgactagttggtgtacctccgaagatgcaaggggtgatcgcgagcaaggcaaccgctaagattgctagtcgcactcaaaaaatgcacctcaccatggaccgaatgcgccaagtgaaggcgaacacgctacaacgcaagttcgactcgcataggttcaacaacggttcagacacctcgggttctaggggcttagggaaatgtcagagggtgacatggtgtgcaaactactatcgaacaacgacgtcgaccagatctaagagagctgctaggccagaaagcaacgacgatgtttgttcccatcgaccacctaacactactcgagacctcgacgccaaccacgacgttaagtcgcctctccggttcaggacgctagaaaatgtgctcaagtcggtggaaattcttggcttggcagaacgagttcatggtggatgaggacttgctccttaccaccgatgatgatgaaccgaacatgttcgtggaggctcaaggcaatgcccgctgactcaaggtgacgacagagccacagaggagatgacatcaattgaggagaacaagacgtgggctcatgtcgaccatcctccaagccatcacccaattgacatgaagtgggtttacaaactaaagcgtaatgagcaggcatcatcgtcaagcacaaggcccagattgtcagcttgtcgccaaggggtagatccagcagtcgggaatagaaaacgatgaggcatttgctctggtcgcacacacagtttatgtgtggatgatgcttgttgcggctcaaaggtagggctggaaaataagctggaggctcgcgagctggctcgagcttggagtggctcacgagcctcaagcgagctaaactgagcctattttttggcctcgttggtggagcgagctgagccgaactggctcgttcgactcgcgagctatgccatacatgctaaattaatcaatctatagaataatctatactaatctattaagaacctaatgtgggcacctgttgataccacggcttcaccttccccacgcccctagcgcccgcgcgtgcgcaggcgcaaaaaatagtgtgaatcgagtactcaaacccgcgcccctttatctttgccttatctaattaattgattaattaatataagatgcgtaccgtggaaccaaacaagcaccggttccaataaaaactgtgaagaaaccttggtatttgaaaaccatggtatttatgtcatgacaattataaaccacagtatttaaaaaccatagttttgaaatactttg

SEQ ID NO: 24239 - DNA, 1480 bp, Zea Mays
ctccagtttcttggagcagaaatacctgacgtgcatgacttatcatccggtgtgctttgtcaggggtggacaattgaaacaaagtattattcagctgatctttccatctggacagcaaatcttggtgaagaattttctcttgattccctccctcatttagaccgggtggctgccctcgttatggtcttcgatatgagtgatgaatccaccttgcttactctgcaaagctgggctgccagtgttgatatccagaggtttgagatcttgttatgcgttggaaataaagcagatcttgtacctggtcatagcgtgcatgtagaatataggaggcgtatgcaaaatcttggggagtcaagttctgatccacaccctgattatttcaattttgggataaatgaaagtgagggttgtagcttgttatctgaggaagaaccatgcataaagatcagaaactcgactgcacagtggtgcattgagcagaacatagaatatattgaggcctgtgcttccaatgctgactttgataagtgtctatcagtggatggtgatagccaaggcttagagcgactccttggagctctttctgcacatatgtggcctggaatgattctgaaatctggaaacagaataactgtcccatccttggttgaaaaacaagaatccacagatgatgaatccaactatgattttgagtacgaggtcttgtctcatggatccgatgaccagtgggaatttattggagagacaagtacatccagaagatttgagagaccaaatgagcctgatggtgcacaggatcacacacatcaagttgtgaatgccggtactgactcttcagcatccaactctcccccgactaacacacccacagaaactgctgaagagaatactgtaactcagagcaacaaaaccgacaatagtgatcatgtggacaaaaccacagcatatagcactgaggatcatcaaagtgatcttcgagaggctaaccatctttttgaggacgagcattatggtctggatgacctggagaaaataatgtcggagattggcaacatgcgatcaaacttaagactcatgcctgacttccaaaggagggagatggctgcaaagctagccatgaaaatggcagccatgtttggtgatgatgatgaagaggcatttgatgatatctaaggcaattcatgtaactccaccttgctgattcccagacagggttgcagatgattgaaagatggctttgtacaagccgacgagcctcttgccacctagggcctttctcatgataatgtcttttttcttagtgaaaatttttgtggctgttgagcgttctatatgccttgtaagatgtattattatgaactttaactccttcaatcatccaggtggaaattttgtggaccatggtgcaattgaacaaaacggtgatattgtagaaccaaagacaaaaaaaaaaagataacaagtttgcatattatagtcc

SEQ ID NO: 24240 - DNA, 1431 bp, Zea Mays
aaagttgacgttgacgtgtcgtactgtcttcctcgtctctcgttactcgcgccgtcgcgcgtggtctccggacgtctcattcggcagcgaggagaccaaggcgggggggacttccgatctggtgtagggtacactggtttggcgcgagaccatggagggatccctggaggcgcggcccggtgtcctactcgtcggcgccccgggcgtcggcaagcggaccatcctctcccagtttcttggagcagaaatacctgacgtgcatgacttatcatccggtgtgctttgtcaggggtggacaattgaaacaaagtattattcagctgatctttccatctggacagcaaatcttggtgaagaattttctcttgattccctccctcatttagaccgggtggctgccctcgttatggtcttcgatatgagtgatgaatccaccttgcttactctgcaaagctgggctgccagtgttgatatccagaggtctatcagtggatggtgatagccaaggcttagagcgactccttggagctctttctgcacatatgtggcctggaatgattctgaaatctggaaacagaataactgtcccatccttggttgaaaaacaagaatccacagatgatgaatccaactatgattttgagtacgaggtcttgtctcatggatccgatgaccagtgggaatttattggagagacaagtacatccagaagatttgagagaccaaatgagcctgatggtgcacaggatcacacacatcaagttgtgaatgccggtactgactcttcagcatccaactctcccccgactaacacacccacagaaactgctgaagagaatactgtaactcagagcaacaaaaccgacaatagtgatcatgtggacaaaaccacagcatatagcactgaggatcatcaaagtgatcttcgagaggctaaccatctttttgaggacgagcattatggtctggatgacctggagaaaataatgtcggagattggcaacatgcgatcaaacttaagactcatgcctgacttccaaaggagggagatggctgcaaagctagccatgaaaatggcagccatgtttggtgatgatgatgaagaggcatttgatgatatctaaggcaattcatgtaactccaccttgctgattcccagacagggttgcagatgattgaaagatggctttgtacaagccgacgagcctcttgccacctagggcctttctcatgataatgtcttttttcttagtgaaaatttttgtggctgttgagcgttctatatgccttgtaagatgtattattatgaactttaactccttcaatcatccaggtggaaattttgtggaccatggtgcaattgaacaaaacggtgatattgtagaaccaaagacaaaaaaaaaaagataacaagtttgcatattatagtcc

SEQ ID NO: 24241 - DNA, 2709 bp, Zea Mays
cccagccccacgccgcgattaattaagcgcgcaccggaccggacgcatccatcgaccaaaacggcagttcccttctcccgcggccgcacgcatcgctcgctcggcgctgccggtgtcgtcgtcgcgctcgccctcgcacgcactcactgaccgccaggccgaggccaatccagacaaacgcacggacggcatcagctgctgcgtgcgttcgctttccccgaaacgttacccaagctacagagagagaaaggacaagggaggagaagccgccatgaagcagcggcagcagcagcagcctcctagtcgtccccgttaaatccctgctcgcccccggtccgcgaccccgacccaacccgtttgtgtcgtaggcggtttgcactagcgtttccgtgaggtgggcgaaggcgtccgtgaccgaccgaccgaccggagcttcatgcgccaggggcggcggcttcaccccgtcgtttgatgggcaacgcatgcagcggcgcccttagatccaagtacctgcacagcttcaagcacgccgcgtcgcagcgccacgactccgagtacagcgccagcgccgacgactcgcccaggaagcccacaccgcccgccaccacggacgcccacgcgccggcgccgcccgccgccgccatgaggcgcggcgcggctggcgcgacgccggacctcgggtccgtgctcggccacccaacccccaacctccgcgacctctacgcgctcggcaggaagctcgggcaggggcagttcggcaccacctacctctgcaccgagctcgccacggggatcgactacgcctgcaagtccatctccaagcgcaagctcatcaccaaggaggacgtcgacgacgtgcgccgcgagatccagatcatgcaccacctatccggccacaagaacgtcgtcgctatcaagggcgcgtacgaggaccaggtctacgtccacatcgtcatggagctctgtgccgggggcgagctcttcgaccggatcatacagcgcggacactacagcgagcgcaaggccgccgcgctcacaaggatcatcgtcggggtcgtcgaggcctgccactcgctcggggtcatgcaccgggacctcaagcccgagaacttcctgctcgccaacagggacgatgacctctcgctcaaggccatcgatttcggtctctctgtcttcttcaagcctggtcaagttttcaccgatgtagttggtagcccatattatgtagctccagaagttctgttgaaaagttatggacccgcagctgatgtatggacagccggtgtcattctttacattctactgagtggtgtgcctccattttgggcagaaacacaacaaggaatatttgatgctgtattgaagggtgccattgattttgattctgatccgtggcctgtcatatctgatagtgcaaaagatcttatcagacgaatgctgaatcctcgctctgccgagcgcttaacagcacatgaagttctatgccatccatggattcgtgatcatggagtagctcctgaccgtccactggatccagctgtcttatctcgcattaagcaattctctgcaatgaataagttgaagaaaatggctttacgagtaatagctgagagcctatcagaagaggaaattgcggggttgaaggaaatgttccagatcatggacactgacaacagtggcgcaatcacttatgatgagctaaaagaaggattgagaaaatatggctccacactaaaggacactgagattcgtgatcttatggaagcagctgatattgacaacagtggaacaattgactacatagaattcattgctgcaactttgcatctcaataagctggagcgtgaggaacatctcgtggcagccttttcatatttcgacaaagatggtagtggctatatcacagtggacgaactacagcaagcttgcaaagagcataacatgccggatgcttttcttgatgatgtcatcaacgaagctgatcaggacaatgatggccgcattgactatggagaatttgttgccatgatgaccaagggcaatatgggagtcggtcgaagaacaatgagaaacagcttgaatatcagcatgagggacgcacctgagtttcttggagcagaaatacctgacgtgcatgacttatcatccggtgtgctttgtcaggggtggacaattgaaacaaagtattattcagctgatctttccatctggacagcaaatcttggtgaagaattttctcttgattccctccctcatttagaccgggtggctgccctcgttatggtcttcgatatgagtgatgaatccaccttgcttactctgcaaagctgggctgccagtgttgatatccagagtgagggttgtagcttgttatctgaggaagaaccatgcataaagatcagaaactcgactgcacagtggtgcattgagcagaacatagaatatattgaggcctgtgcttccaatgctgactttgataagtgtctatcagtggatggtgatagccaaggcttagagcgactccttggagctctttctgcacatatgtggcctggaatgattctgaaatctggaaacagaataactgtcccatccttggttgaaaaacaaggtggaaattttgtggaccatggtgcaattgaacaaaacggtgatattgtagaaccaaagacaaaaaaaaaaagataacaagtttgcatattatagtcc

SEQ ID NO: 24242 - DNA, 4205 bp, Zea Mays
gtcgtcgtcgcgctcgccctcgcacgcactcactgaccgccaggccgaggccaatccagacaaacgcacggacggcatcagctgctgcgtgcgttcgctttccccgaaacgttacccaagctacagagagagaaaggacaagggaggagaagccgccatgaagcagcggcagcagcagcagcctcctagtcgtccccgttaaatccctgctcgcccccggtccgcgaccccgacccaacccgtttgtgtcgtaggcggtttgcactagcgtttccgtgaggtgggcgaaggcgtccgtgaccgaccgaccgaccggagcttcatgcgccaggggcggcggcttcaccccgtcgtttgatgggcaacgcatgcagcggcgcccttagatccaagtacctgcacagcttcaagcacgccgcgtcgcagcgccacgactccgagtacagcgccagcgccgacgactcgcccaggaagcccacaccgcccgccaccacggacgcccacgcgccggcgccgcccgccgccgccatgaggcgcggcgcggctggcgcgacgccggacctcgggtccgtgctcggccacccaacccccaacctccgcgacctctacgcgctcggcaggaagctcgggcaggggcagttcggcaccacctacctctgcaccgagctcgccacggggatcgactacgcctgcaagtccatctccaagcgcaagctcatcaccaaggaggacgtcgacgacgtgcgccgcgagatccagatcatgcaccacctatccggccacaagaacgtcgtcgctatcaagggcgcgtacgaggaccaggtctacgtccacatcgtcatggagctctgtgccgggggcgagctcttcgaccggatcatacagcgcggacactacagcgagcgcaaggccgccgcgctcacaaggatcatcgtcggggtcgtcgaggcctgccactcgctcggggtcatgcaccgggacctcaagcccgagaacttcctgctcgccaacagggacgatgacctctcgctcaaggccatcgatttcggtctctctgtcttcttcaagcctggtcaagttttcaccgatgtagttggtagcccatattatgtagctccagaagttctgttgaaaagttatggacccgcagctgatgtatggacagccggtgtcattctttacattctactgagtggtgtgcctccattttgggcagaaacacaacaaggaatatttgatgctgtattgaagggtgccattgattttgattctgatccgtggcctgtcatatctgatagtgcaaaagatcttatcagacgaatgctgaatcctcgctctgccgagcgcttaacagcacatgaagttctatgccatccatggattcgtgatcatggagtagctcctgaccgtccactggatccagctgtcttatctcgcattaagcaattctctgcaatgaataagttgaagaaaatggctttacgagtaatagctgagagcctatcagaagaggaaattgcggggttgaaggaaatgttccagatcatggacactgacaacagtggcgcaatcacttatgatgagctaaaagaaggattgagaaaatatggctccacactaaaggacactgagattcgtgatcttatggaagcagctgatattgacaacagtggaacaattgactacatagaattcattgctgcaactttgcatctcaataagctggagcgtgaggaacatctcgtggcagccttttcatatttcgacaaagatggtagtggctatatcacagtggacgaactacagcaagcttgcaaagagcataacatgccggatgcttttcttgatgatgtcatcaacgaagctgatcaggacaatgatggccgcattgactatggagaatttgttgccatgatgaccaagggcaatatgggagtcggtcgaagaacaatgagaaacagcttgaatatcagcatgagggacgcacctgagtcatctgatttcccggcatcggcataaatcttcgccataagcatgtagctcccagaatcaggcgctaagaagagctccccaaacctcagcggttggtttcatgggcatatcgtcaatgagatccttggcttccgtcagatgcccggcacggccaagaaggtctaccatgcatgagaaatgctccaaacctggagatatgttatgggccctcttcatcatatcaaaataaaatttcccctcctgcacgagtccagagtggctgcagcctgacagaactgcaacatagcttatgtagtctggctttgcacctcttttaagtatgtcatcaaagatctctatggcttgttttcccattccgtgctgtgaataaccagtgatcatggcattccaagatacaatatccttcacgttcaggaagtcaaatacctttcgagcttctaaaatccttccgcacttggaatacattgttatgactgcattcgcaacagaggtgtctataatgagaccaacctttacagtgcgaccaataatctgatctccaagtttgtttgcacctaagtctgcacagcctttgaacaatgtgacataggtaacccagtcaggtctaacatactcctcacttagcatgaccttatacatcctgaggccatcttcctcagctccatgctgtatatatgctcccaacatagcattccatgtaatgacattcttttctgacatgccatcaaagaactcacgagcttttgcaacgtttcctacttgagaatatgcagttatcatgcttgtccatgatacaatgtccttttcattcataaatctgaatatagcttcagcactctggagattgtcgcactttgcatacatggagatgagagaattggagacgactacagcttgaatctgcccacttttcagacaaagtgaatgtagttgcctcccaaggcacaaatccatcctgctgcagcagccacttataagagtagccaaagcgaactgatcaagtgtcatcaactcagctctcatctggttgaacaattcaacagattcagtgaaacacccatactgcaagaatcctgagatgagaactgtccaagccacattgttacggtcatgtaaagagttgaagacccccttagcttccttgaaacagccagattttgcatacagttcaacaagagcacttgcaacatatggatcaatgtgcggtaggttccgaatcacctgagcatgaagttgcttaccccatcttaaagaagataatctagcacatgcagtaagcgaactagtgtatgttgttgaatcaagacgcacccctttgctttgcatgtctacaaccatatcaagggcttctctgactcggccactctgagacaatgctgataccatcatgttccacgaaacaacatcacgttcaggcatgctatcaaaaagctcaagagcatgatcgacaccatatgtcttgacatatcccgctagcatactgttccgacagaacatagtgggttctttaatgcgaacaaacaaccttgaagctaaatccacagctccacatctcacaaacatgtcgacaagggcagctgctacctcactatcatcctgagaatcgaacttctgaaccatcgcaagcagctgcagcgccaaactgtgccatccaagggcgccacaagacttcatggcacaagctaatgtgaatgcatttggccacgaatcaccacttcggtgcatggacagaaaggtttccaaagaaaccaagtactgtcggctctgaaagtatccggacatgagcgtgttccacgaagccacgtctcgcgcgggcattctaccgaacagctccacggcatcgctcagtcggccgagcttggcgtacccattcagcatgacgttgtgggtgatgacattaggatgggcgatgtccatcagaagcaagcgtcgggcgtcggagagggctccgcaggagaggtaggcatggaggagcgtgttctgtaggaagacggcggacgcgaggcccacggcgacgaggcgaccgtgcaacgcgcgggcgccggcgagcgcgccgcgcgcaccgcacgaacgcagcgcgtcggcaaacgcctgcgtcaccgccatgtgggaggcaaccgccggaggaggaggagacggcggtgacggccatggggacgccaccattcaaacggttgcagccttgcgctatgctatatgagtcctcccagaag

SEQ ID NO: 24243 - DNA, 2036 bp, Zea Mays
gcaccggaccggacgcatccatcgaccaaaacggcagttcccttctcccgcggccgcacgcatcgctcgctcggcgctgccggtgtcgtcgtcgcgctcgccctcgcacgcactcactgaccgccaggccgaggccaatccagacaaacgcacggacggcatcagctgctgcgtgcgttcgctttccccgaaacgttacccaagctacagagagagaaaggacaagggaggagaagccgccatgaagcagcggcagcagcagcagcctcctagtcgtccccgttaaatccctgctcgcccccggtccgcgaccccgacccaacccgtttgtgtcgtaggcggtttgcactagcgtttccgtgaggtgggcgaaggcgtccgtgaccgaccgaccgaccggagcttcatgcgccaggggcggcggcttcaccccgtcgtttgatgggcaacgcatgcagcggcgcccttagatccaagtacctgcacagcttcaagcacgccgcgtcgcagcgccacgactccgagtacagcgccagcgccgacgactcgcccaggaagcccacaccgcccgccaccacggacgcccacgcgccggcgccgcccgccgccgccatgaggcgcggcgcggctggcgcgacgccggacctcgggtccgtgctcggccacccaacccccaacctccgcgacctctacgcgctcggcaggaagctcgggcaggggcagttcggcaccacctacctctgcaccgagctcgccacggggatcgactacgcctgcaagtccatctccaagcgcaagctcatcaccaaggaggacgtcgacgacgtgcgccgcgagatccagatcatgcaccacctatccggccacaagaacgtcgtcgctatcaagggcgcgtacgaggaccaggtctacgtccacatcgtcatggagctctgtgccgggggcgagctcttcgaccggatcatacagcgcggacactacagcgagcgcaaggccgccgcgctcacaaggatcatcgtcggggtcgtcgaggcctgccactcgctcggggtcatgcaccgggacctcaagcccgagaacttcctgctcgccaacagggacgatgacctctcgctcaaggccatcgatttcggtctctctgtcttcttcaagcctggtcaagttttcaccgatgtagttggtagcccatattatgtagctccagaagttctgttgaaaagttatggacccgcagctgatgtatggacagccggtgtcattctttacattctactgagtggtgtgcctccattttgggcagaaacacaacaaggaatatttgatgctgtattgaagggtgccattgattttgattctgatccgtggcctgtcatatctgatagtgcaaaagatcttatcagacgaatgctgaatcctcgctctgccgagcgcttaacagcacatgaagttctatgccatccatggattcgtgatcatggagtagctcctgaccgtccactggatccagctgtcttatctcgcattaagcaattctctgcaatgaataagttgaagaaaatggctttacgagtaatagctgagagcctatcagaagaggaaattgcggggttgaaggaaatgttccagatcatggacactgacaacagtggcgcaatcacttatgatgagctaaaagaaggattgagaaaatatggctccacactaaaggacactgagattcgtgatcttatggaagcagctgatattgacaacagtggaacaattgactacatagaattcattgctgcaactttgcatctcaataagctggagcgtgaggaacatctcgtggcagccttttcatatttcgacaaagatggtagtggctatatcacagtggacgaactacagcaagcttgcaaagagcataacatgccggatgcttttcttgatgatgtcatcaacgaagctgatcaggacaatgtgagagcagccggccagggatcaaacaccagtggcacaaaaaaaaacgcccctctgtggtggccatgaaaaat

SEQ ID NO: 24244 - DNA, 3375 bp, Zea Mays
gtcacgtataccatgcaaataaccgagaattctgctctgccaccgcaaggcgtagcagagccaacttctcgtcgaatcggtcacgtcacccgccgcgtccacgccaatggcgccgccgccgccgtccttactccgagagctcctcacagctgacggcttcaagaaccgtcgcaagccgctcgacagctccgccccgccgacctccagagccgcgagcatgccactacagcaccggcgcccgggcaagccgccctcgcggtcacagtcggacgtgctcacccgcagccgcctgaggcaggcgaacgccgacgcggacgatggcagcagggacgccgccggtgccgagcggcggcgggccgcgaccgcgacgcgagggttgtcggcgtcgctaacgagcgtgaggaaggtccacagcaacaagggagaaggcgacagcggctcgggcgccggtgccaggaggggtgcctcggcgtctgacccttccgcggtgccggcgctcgatgagtcggcgctcaccgcgctcatctccctcgccgcggggcctctgaagcggttcgccttggacgaggcgttccgcgcctcgctgcgcgccggctgcgcgtcttgcctcggcgactccagccaccgcgccgtgctggacctccgcgtgcaatcgcaaaccgtcgagcgggccgcgagagagggcctggacccgcgcgaactgaagcgcgcgtccctcaggctccacgaggtggcgtctctccaaggcaaggacgcggacgcggtgaccgcggcgggcgttccccacacgcgcctcgccgcgtgcgcgcacctatacatgtccgccgtctccaagctgcagaagcgggaccactccgccgcggtgcacgcgctggaggccttctgcctggcgccgcgcgaggcgcggacggtcctgctgcccgcgctctgggacaggctcttccgaccgggcctctcgcacctcaggacgtggcgcgaccgcgagtcggcgtcggcgagcgcggacgaaagggtggaggaggtggagaaggtgttcctgggcgtactggacgacgggacgcgcgcgctcgcgtgctactacagggactggctgctggggcggacagatgccatggctctcccggacgttcccgctcctccgagcacggtccatcccagcacgccgaggtgctcggcgtcgacgtcgtatgacatcagctcggaagtcatgttcggctccgggagttcgagtctggcgaagttcgcgtacgacgacataatgcgggcatccgaggaaatcgaggaggaggaagaagcggtgtaccccgaggccgccgcagaagcggtgaccgtgctccaccaggaccaggagcgcgatggagctggaggtgaggaaaggagctacactcccactccgttggcagaagaaaacgagcccgtgcctaacaatgtagacagagagacgttcgatccacacgtcgagcaagaaccgaacaagcaatcagatgcgcgagcaagtcacccgccgatctctgacaactctgctattgaccttcttacactcgagttctgtgaagcgccactccagagtgacacaaatggcaacgagctctccattttctccacggttcccagcgacttcctgtgtccactgacgcgccagatattcagcaatcccgtgacgatcgagacaggccagacgttcgagcggcacgccatagttcagtggctagacagaggcttcaggacgtgcccggtcacaggccaagatctctcgagctcgacggtgccggacacgaaccgtgtgctcaaacgcttggtcgatagctggaggtctgaacacttcaagcatctgacatccggaggcgctgggctcgatgtgaagctaaccgtatcagcaatagacaaggctcttggttcagctcgggacgtgtctgaaaaatttgacagggcaagacacctgatggcgatcggggggatagacttccttctgtgcaagtttcaggagggagggggagacgagcagccgcgggtggctgagcacttgctgtcttgcatcagggctgaaggcagctgcagggattacgtggctataaagatggatggctcgagtattctgcggctccttcagagtaaagtgctttcgacaaggagaactgcagtggatttgctcatggaactggtctgcttaagaaggagagaaatggttgaattgctcctccatggatcgagagcagagtcgatcgtggaggcaatggatgtgctgctggagtacctccggagcttgcccgcagaagaacaagccccgatcgctgctctactgatgcgtttggatgcattggtggagccgaacagaaacaacacgtacagagaagaggcgatcaaggccatcacacgttctctgagatgctgcctgtcagaggacactgtcgtgcccagcactcggagagctctgctgctgctgggagggcagttcaccttctcaggcgaccttcacgcagaggactggatgctggaacatgctggcttcgtcgacccctcacgggccaccactgccacttctgatgctgttgtacacgacaagaaagcggccgaaaacgatgcgtggctgagacacgtagcagcggcgctcctcggcagccgcagcgggatcaggagaccgttcctggaggcgctgtccaggtgcctgggctcccccaacgccggcctggtgggtgcgtgcctgacgacggcagcgtggctgagccgctcgctggcgtcgctggacgaggacggcgccacggacacgtccctcgccgcgttctcggcgctcgtcccgcggctgaagcagtgcctggcacccggcaggccggtccggcacagggttcttgcggccgtgtcgctgcacaactttagcagaatcccagactgcagggagctgctgatgctgctggctgacggcatgcgcgaccacctcgcggagctagcgcagctgacctggacggccggtcagctatccgccgaactccatagcaacgactgatatttggcttccgcgcgctcgccgggtgccgtcggtcgtcggatgacggatggctgccggcgacggggcctctcgtcatcgcggcgggagattcagcggaagcgtgtgaagagtacccgctgccttttcttgacccgttcgtcagaactaagaagccttcccaacagtttcgccgagagagacaaaggttgtacagtctatctactatacactaaactttatatctttcttttcctttttttctcaaaaagctttgtgatcgctgatcgatgaggctccggctgtgaataccacatgatggttttcagttttgacagagttttttttttcgtgcttgtgagttgtgaccatgaatattcagcgttggaatgatc

SEQ ID NO: 24245 - DNA, 702 bp, Zea Mays
tccaacgctccaggctcacagtcccacggatcgaggccgaaatcacctcccgctcggcactgctcaaaacttccgcgttccctcccaaaccccaccgataaatactcctccaaccccgaatcttaaccatcgcacaaatcctcttcctcgagttctcctcaaccaaattcaaagtcacagcggcgaaactctcggcgatgtctggccgcggcaagggcgggaagggtctgggcaagggcggcccggcgatccgcaggttggcgaggaggggcggcgtcaagcgcatctccgggctcatctacgaggagacccgcggcgtgctcaagatcttcctcgagaacactgtgaccgccatggacgttgtctacgctctcaagcgccagggccgcaccctctacggtttcggcggttaggtcgcccctctcccggtggcgaattacgtggtggcggtggcggtcgtgttgtgttcttggtctagttagtctgtgttgtctttatcggtgctgttttctgtggtggttgtactgcatcgttctagtttctagtccatgtgctgtaatatctcgctgctgtaatcaatggaatgtcctcgtttcaagcctcatgacatatcgctcttttgtaaacctgcaagaattccgtgcactacgcatctgtttcgttgtgcaagagctcagatctgcttttgagacaactaatgac

SEQ ID NO: 24246 - DNA, 1617 bp, Zea Mays
aacaattagccatgtctcatcgagtttttgtttatacagttcaacctgaagagctttctgatggtattgctccatgagaagtgtcatctattgaaacagcagcaataatatctgttagaatagagcttgcattgagaagtgctttaacccaatatgtacatgtacagggaggattgcgaaaactcagtgcagatgctgagctctcgtttatgcctttgtgaagaagtcagacaactgaagctcaaaggacacgtagccaagagcaatgacatcaccctgcacttgggcccgagtccaagacacatcaacaccaatatgtttagtgagcccatgcttcgccagaccacaagctatgctgatagcaccagtcagacaagagaggagttggcacacaaactgaaacaccaaaatcctcaagtaccatcacagtgacacagtcacagccaagtaacctttgctgtcgcaagagccatagtttgcaactcagcatctgcacttgaatgagaaatcacggtctgtttcttaatcttccgagcaatgagagaaccaccaagaaaaccataataggcagaaagagagcgacaatcagcatcgctaacccaagtagcatcaaagtaggcttggagttgaatagagctagagcgcggaaagaacaaacatcgagtaatggtccacaaaggtaacacaagacatgaagaagatggttatagtggaggtgagtagtagcgaaaacaaattgacgaagaatgtgcacagcaactgaaataccaggatgagtcacacccaaatagacaagcctcccaacaatatggcgataccatgtgggatcagtgaagggttcatcatcagtggcacgaatttggagattaagcacgatgtgagtctcaacagtgtgatggccggtgagggaagaacaattaaatgcacctttcttaggacaaataaatgccatgagaggtgaaagaaatctcaatcccaataaaataatgaagaccaagatcggacatgagaaattgctcactaagacgtgccttgacaaaggcaatacactcagaatcatcggtgatgatcatatcatcaacataaaaatgaagagtgtgaccacgtgatgaagtatgaacaaacaaggtctgtcatgagctctcaaagcaaaactagcaccagcgattacagaggcaaagcgctcaaacaatacgagaagcttgttttagatcatagagagcaacaaagacaacaaactatgccatcaggaacaagatacccaagagctggtccagggccggctctaggcatagagccactagggcggccgccctagggccccaactcctgcagtttgttatatagctaatattaagagttttaaagttaagcttgtcagaaccacctatgtcttctatggagatttattagtatgccaattttatgaattcatatcgtaatgtttctatagcttatcgaatcttatttactatatctgtcatggtgacatcaactacttgagatctacaatctctcaagaacgatcgaatggtttggccaccttatgtatcgagaaaaaaatattagatatgactgatatcaacgtaatcattgatgaccacctcaaaaaatgtt

SEQ ID NO: 24247 - DNA, 669 bp, Zea Mays
ttacctcaaacaagcagcggagccggccatggacggagtcgatcgaaacctccagcagcgtgcccgttccaggttcaaggaaatgcgcgggcgcaattccagcctgccgtcgaggttttgtaccgtacaagaagtgcacagctcggagcaaggtgctgcagccggtggcacctggcgaggaggcagatagagagctgacaaggctgtgcctgtagaattctgggcccttgccacccacctctactctgtggataatttttgctgctactcgaacacatatgactagtacagtacagcagtgcagtactgatgttttgcaggaagaccattctggttctctgctgctacttatgagaggcggattggaactgaagcagccttccacaaatggaggcgactgtgggttcctgtctgccattgtatagttcgggactagtgtttccattttcatctcgagtgttgtaattttcccctagctgtgcaggttcagaggtcaatggttgtcatgtgctgtagcaagtaatgtaatagttgtagtagaagaccaccttgtatgagctatatataattatatatgtaaattatgaatgttgttttgtgaaacagtgaaatggcagctatacgaccgaatgctgctaaggtttcttcgggtttttttttacaaaggaa

SEQ ID NO: 24248 - DNA, 2536 bp, Zea Mays
cgtcgatctaacatgctagccgcgtctctagtctcgacacgacggcaccatatccacgagcaaccgcagggccggcacaccaaaggcgacgacgacgacgggaaggcaagccggctcgccgggccggacagataggaacaccccccaccctgtcgtgcgaccccacgacagcccatggttttactcgcgcccagacaggagcggcagcccccagcataattgaggtgagcagctggaggcgaggcgaggcgagggaacccgacccgcggaggagcgacggccacaagaatcgagcggcgcccagtcgtcctccgctccgggcccccgccgttgccggtaaagacggatagattatttcatccggtcccggtggcggcgtgagggcggacggaaaagcgcgcacggaaaagctcctccagcggaaaaatcccgtccgacgtggcgccctgccctcgccgccccttttcttctccgccctccctctcccaaccgctgcaccatacatacagcctttccttccatttcgccccttgcctccctcctctcctctcctctcttctcttctcccctgcgaaaccggcagcactcgcaagggtgttcaggagctggtggcttcgtctcggtggcgcacgctctcgcctcctcctgctgctgctgctgcttgattcgtgctcgtggtgaagagccgctatcagactcggtggctgtggttctgctggttcagaaatcctgagatggctcgtttccaggcgaggagcaatcaaaggccggctgcagatcacgtcggccacagagacttcatggatcatctgaagaacaccctgagctccggcgacatggacttgccaggaggagcacgggcccctaaggcacgcaagccatacacgatatccaagcagagggagaaatggaccgaggacgagcacaagctcttcttggaggccctgcagcagcacggccgtgcctggcgccgtatacaagagcacataggcagcaagactgccgtgcagatcaggagccacgcccagaagttcttctccaaggtctcgttgcctgcctttcgcacagaacgaaaaaaaaaaacacatcaaaacccccttctgcctgaaattccatggattgtgttgcttgcaaggtgatgtcatccgagaatcctctggggacaacagcaacaacagcgtaggtgctccaccgcaacttcagattccgccgccgaggccgaagaggaggccgacgcacccgtacccgcgcaagctgggtaattcagtaggcaaggatgcctctgctgcaatcaagcagcttcggaagccccagttgcaggcgcagtccctgtctgagcaggagaactgctccccaaaatctgtgttgaccacagcacagatgtgctctgaggccctgccagctgaaggcagtggatcaccggcttcctccgttcacatggaggacaaatgcctcacaccaaacacgtcagtcggggagtcaagtgtgcaagtggcactctccacggattccaacgacgcggcctgtgagatacccgaagccgaaggtccggttcttaggctatttggcaagagggttgtggttagtaatttagaccagcagccaagctccaatactgggagcctacaacacgcggcggacatggaactggatgatgcttcagccgagacaccaaccagtggaactgggaagctgtcttcccatgccgcagaagaagcggagacatggtgcccgtggctggtcggtagtacacagcagtttctgtactatctccctcggggagaggtgttctctatgcatcctggttgccagttcctaaactacggtaacggaagcatatcctacacagcgttggacgcacagacagttacctcaaacaagcagcggagccggccatggacggagtcgatcgaaacctccagcagcgtgcccgttccaggttcaaggaaatgcgcgggcgcaattccagcctgccgtcgaggttttgtaccgtacaagaagtgcacagctcggagcaaggtgctgcagccggtggcacctggcgaggaggcagatagagagctgacaaggctgtgcctgtagaattctgggcccttgccacccacctctactctgtggataatttttgctgctactcgaacacatatgactagtacagtacagcagtgcagtactgatgttttgcaggaagaccattctggttctctgctgctacttatgagaggcggattggaactgaagcagccttccacaaatggaggcgactgtgggttcctgtctgccattgtatagttcgggactagtgtttccattttcatctcgagtgttgtaattttcccctagctgtgcaggttcagaggtcaatggttgtcatgtgctgtagcaagtaatgtaatagttgtagtagaagaccaccttgtatgagctatatataattatatatgtaaattatgaatgttgttttgtgaaacagtgaaatggcagctatacgaccgaatgctgctaaggtttcttcgggtttttttttacaaaggaa

SEQ ID NO: 24249 - DNA, 2261 bp, Zea Mays
ccacactctgcccatgcataacagaagtttcgaaccatgggatgtagagtggaatctcttccctcgcaggataaggtgcctcggccgtaaacagagtggttgttccgcttcgtcccagcctctagttcttcctttcctccagagtgatggccaaatgctactcagattggcccccgattccgcctttccatccatcgcgaagaacgccgccgcaatcccacgcctccccgatcacgatcaggcggcagctcgcgtccttcgtgctccactgctccagatcctgcgctcccctcctcgagcccaagaacctgcccgatgagttcgaggccgtaccggcgacgccgccgccgccgctgccggacgccgccccgaagctggggatttctaacaagttcatccgaggcctctgcggtgacccgcagaccgagcagctggccttcgagggctacaggagggcgctgctgcagcccgagttccggctggagaagaagacggccaacgcgctgaccctgcagctgatcagggagaagcagtggggctccctggagctgctggtcgaggacttcagggcccacggcgtgctcccggagaagcggacgtgcgcgcggctcgtcgcctgctgcatcagggcggggaggttcggcctcgccgacgcggtgctcggggtcgtcgaggcgaagaagggagcccccgctgccatggccttcagcgcggccatgcaggcgtacaacaggctgcacatgtaccggagaacggtgcttctgtacgggcaggcgagggtggcccgcctgccgctgaacgccgacgcctaccgtgccgcgatggcggcgtgcggcgcgctgggcgagccggacatggtggcttcgctgttcaagctgtacaggtcccacaagtggtacccctccgacagctgcgtggagacgtacggcgtcgtctgcgacgcgctgggaaaggctggcagagccctggacgctctgcggtccctgcgcgagatggaagcggatgggctctcgcccgacgccgccatctactcctccgtcatcggcgctctggcagacgctcgagagaaggcggcggccgaggacctgtaccacgaggcgtgggacaggaagatgcttggagaccccgacatgttcttgaagctgaccatcatgcacgccgaggctggtctggttgagtcaacgatagaggttgccaaggacatgaggcagatcggcctgagggtcacggactgcatcctctctaccatcgtcaacggcttcgtgaagagaagaggcctgaaaccggccatcagagcgtatgacaagctggtcctcatagggtgcgagcctggccaggtcacctacgcatcagtcatcaacgtgtactgccggctcgggcgcagcgacagagcagaggccatcttctccgagatgatcgagcgaggcttcgacagcagaaggggtgcgagcccaacgtgctggtgtacaactccctgctcgacatgcacggcaggctggggaactcgaagcaggccgagaagatctggaaggagatggtgcggcgcaaggtccggcccgaccggatcagctacacggccatcatcctggcgaacaaccgggcgggggagctggaccgctgcatggagctctaccaggagttcagggagaccggaaggaaggtggacatggtcatggctggcctcatggttggggtgctctccaagaccagccgcttcaacgagctcatcgagctgctcaaggaaatgaacgggacaaagctggaccggaggctgtacatgagtgtcctgagaagcctccgcgatgccgggctggaggttcatgtgaagtggctccagagtaacttcaccttcatggaagagaaaacttgatgccaggtgcaggtacttgttcctgtgcacgcatattcagcacccaagtatatcgggcgcctgaagaaaaccttgctctgtacatggaaaccgaaaaaaaaggtaaatatttgcttgcctcagtgctccattccgaagcttgtacgctattgctgcacaattccggcattcattggctcaagtgaatagcgatgtaaatgtattttaagggaagccaactttgtaccagtaacgatctgattccgaaattatcgaacagattgccaagttcagtaactctgcatgtaagatttgctgaaactgttgtaccatagccactaggggcaattgtaactttgtatctataatgaaaaaaaatcatattattttggtaccactcatatacaacatt

SEQ ID NO: 24250 - DNA, 4192 bp, Zea Mays
cctgtccccgcctctgccaacgctcctgccccgcacacccacccgccgctcccgcgttgtccgcccccgtcatgaattgccctcttccatgtgcaccacagaaatctcggcgcaagatccccccgaaacctcgccataccctactgcgaggcgtaccattcgacagcgaggccctccttggcgggaacggcgtggtagtcgtggaggctaagacgctccacctcgacgtgtgcgttgaaccacacgctgtgcttgtccttgcataacctggtgaggatttggccgcatcatcccgctgagcatcgcgtgcgacggcaggccctgctgctcccaggtgtcagtgcgagataggagagcgcgaacctggccgagctccatgtgaggcagtcccaaggcacacgggcctcgcggtggcccaaggacgtcgggcggaagtcgtgccgagctacttccctgcctacgccaaagacgcccaacgcagagaagaggatgcccaccagcgacgtcccgtgctgcgaccgccacgcgaagaaggctgacggcatgccccgctccgatatgcccaacagctgggaccgggaaaaagacatgggacaaatagaagacatctaaagctttccaaggcagatgcctccagaggatatctactctctggtcatatgatcaatgcatagatcacttcagacaatcaaataacagtagtatacatagaaatgcaacatagaacactcaagtctcccaactgcccgcctgccgaggtgagctccgaatgcctgccctccacctctgatccgtgttgcggcttcgctcctgtgtggagcaagttaattttttttaacatgcatcaacatagatgtcgtccaattacgactgaagcaaaaaaatattgcaaggctaaacactcgggtcaattgctatgtctaggtaattagttttttgtttaagtttcatttagtctatatgtttgatttttccccttgcctacagaccagcctaggtattcatcacttgtgaaaaaaagaatatcagtgttgatggtaaaaaaagtatggatgcttaaaagtcttgctcatttcttggtaggttggatgtggctccaccagcactgcctccctacttcctctactgctgcggctactgctacatgatctatcgtgcctgtttttctaggaatcttaatggcatcaggctggcattttgtttaactcattaggtgcgtcaacactgaaattcactcttacggtcatgttttgttattgcattagagtttgcagcatgaatcagggacatccaatgttgttagatctattaatgcgatgttctctgtcttatttttatcctacaagtcatttcgagatatgtggttgctatcagatgcgggcaatgtcaactttattattggaattgttaacttgacactcattcaccttctggactgaaaaccaagacagtactacatctatttagttaaacatatattacttggctgctaacacaactaagagaaatactgaaaatcaatccttcagtactcttgcctatgctagcatatttgttcatatagtactcttgctgacatttccactatcacagcagcatctctactactatttgtgtttttttatataaatgtattttatcatattgatttcgtccatgcaagaggatctctatcgtgtttcgcaagttaggagccgtcaagcacctgttcggttttgtgtagaacttcacgctccttcctatcccggatacttatatctttactcaaatgatggtgtctagtaacaacgatagcctatcattgacttggacgagtagccataaatctctttcaacaacttatgtcacgtcgcaacgcacgggcacttacctagtaaacacccataagtttgactagatttgctcaattctaaaatatatgctcatatattgcacacggcgctttatgaagcctagtcgaaacaggcctgaaaaatagaggtattatgtgacctgagtttttttttttttttttgatatcgtgtggtcaaaacagagttaaattccgtctgcttttggacatctttttggttagtaggtagccacaatattgccggacctactgacctgtggttctcaaaagaagttgcttttccttgaacaaaaatgcagcagccagcagcaccacggcccacgggtgatagctcggtacgagtacgaagacaaagctgttggttgctttctaacagtttagatattttgcccctgcttgctgtgtggcgtcaaaactcaaaaggtttatcattcatgctcaagctacgcggagtcgcggacaaaacgagcgtctccagaatccaaatgaggcaggcgatttttcaccgcatttcgcccaaaaacctttgctccttccacttgcagggtaactgcgactccacgtaacaatggcttattccaatacccatgtgcccacacctgtccatgcatttgttacaaatatttttctaataaggtgtgattttatccttttatttagaatggttaggagtaatatcccactagccaattattccatacaattctcgtgtatgggagttctacacctccctcgtatacctatacttgtcgtggaatcgtagggagtcatggggcgtaatttctatatataaatatgtatcgataatgaacaaaaagtcacaaaagttcatttacactcttctccctctttactagtacggtgtccgtgcgttacaacagaaaacaaattattcgttaaatactcattacctatgaatatctatgttttttaagcggtgtggtagactgaataccttatttaaacaatatctatatatgtgaggtaattgttagaaacagacttattaatctctgcaacaccaattacattttgaacaacgctaattcgtcgccaaaatgtcctggctacattttgaaccgttgtattttacttttcttttcatattgagcacttgattattctggttggttattaccatccttttcacggttgacattcttgctcaatgttggatgtagacctaaccaagctcattcaaaataataaagtagaggtcaggccactagttgtctcagttatcaaaactttgcatgcaactttcaatcttctcatttttttataattgatgacaaccatacaaagatagaaattaaagtgtttaattccaaacttacacttcacgaagtatgaattaataacttggtttggatttgtgttgcttgccaagcactttgcacactattaaagttttggacaaatttcataaaccctattttgatagtatttgctcccctacatatgtgctaggtgtttggatttgaatcttgcacatatgctaatttaaaattatggaagaagcaaagctaccaaatgttgctaaggtgcctaagataaaactttgaagtgtgtataccatttgtaataccacttgtaatattgattcattatttggtttcgacccttaacacttgagatagctagacctcaaagagactagaaacatttgtgagaccaaaattactagaaagatttctagataccaattaaaaaagcaaataatattaagtctagctatcgcttaacatatgcatgctagttcatcaaattatcaatcaaaaaatattaaaatacatatcataaacaagaatgttgggggccttcgtcttccgaaggtcctcaaaaacacgactaacatatttcccaagtataatatatgtacaggaaccttcggacatgaaatgaagttatacaataatatggagagcgcggttcgggagaaggatgaatcaatgctgaagctacccgtgaagaagcttcggcttaacgatggaaaatgaaaccgacttaaaggggaaaaggttgtctagtcctcgatagatttctctaagtcaatagtaagtgtcgagggcatgaatgtaattctacacaggttgcgccctgtgcctataaatagataaatagtgacactgcactgttcacgctgactgatattcactcacacgtcacacttggacttttaccttccgttaagccgaaggtataaatgtaattcaatactgtccatgtttattcatgataatataataaaaatgttctgataatgccatatgattattcatgtcaatacccgtgtttcatatgcctctacttgacttattatatactgaaattatgaag

SEQ ID NO: 24251 - DNA, 1308 bp, Zea Mays
cctgtccccgcctctgccaacgctcctgccccgcacacccacccgccgctcccgcgttgtccgcccccgtcatgaattgccctcttccatgtgcaccacagaaatctcggcgcaagatccccccgaaacctcgccataccctactgcgaggcgtaccattcgacagcgaggccctccttggcgggaacggcgtggtagtcgtggaggctaagacgctccacctcgacgtgtgcgttgaaccacacgctgtgcttgtccttgcataacctggtgaggatttggccgcatcatcccgctgagcatcgcgtgcgacggcaggccctgctgctcccaggtgtcagtgcgagataggagagcgcgaacctggccgagctccatgtgaggcagtcccaaggcacacgggcctcgcggtggcccaaggacgtcgggcggaagtcgtgccgagctacttccctgcctacgccaaagacgcccaacgcagagaagaggatgcccaccagcgacgtcccgtgctgcgaccgccacgcgaagaaggctgacggcatgccccgctccgatatgcccaacagctgggaccgggaaaaagacatgggacaaatagaagacatctaaagctttccaaggcagatgcctccagaggatatctactctctggtcatatgatcaatgcatagatcacttcagacaatcaaataacagtagtatacatagaaatgcaacatgttggatgtggctccaccagcactgcctccctacttcctctactgctgcggctactgctacatgatctatcgtgcctgtttttctaggaatcttaatggcatcaggctggcattttgtttaactcattaggaaccttcggacatgaaatgaagttatacaataatatggagagcgcggttcgggagaaggatgaatcaatgctgaagctacccgtgaagaagcttcggcttaacgatggaaaatgaaaccgacttaaaggggaaaaggttgtctagtcctcgatagatttctctaagtcaatagtaagtgtcgagggcatgaatgtaattctacacaggttgcgccctgtgcctataaatagataaatagtgacactgcactgttcacgctgactgatattcactcacacgtcacacttggacttttaccttccgttaagccgaaggtataaatgtaattcaatactgtccatgtttattcatgataatataataaaaatgttctgataatgccatatgattattcatgtcaatacccgtgtttcatatgcctctacttgacttattatatactgaaattatgaag

SEQ ID NO: 24252 - DNA, 2780 bp, Zea Mays
atacaaaaatccaacaaaataaagtgaaaacacatacatgcttagaaaacttcatgatcttccagtatacttgattttgaattaaatgtgcacacctaatttaatccagcacagcacacacattctccatcttgaaagggatgccatggtaaatcatttagttgtgcaactacatggtatgttctataaagtacctgatcagttgaagctcttgaggtacagactattgaggtcatgcatgtaacagtatgatttgatttctttacaaataagatgttgacacagactaaggccacacatatatatgtttttagcttgcacagattatatatgcagcttccagctttgttaaaatctacaagttgactttaagaattcccagattgtaaccaatataagttttgacaatccacgggctagattgttactccctccgttcttttttatttgtcgctgtttaattcaaaaataatagcgggtgacaattatttaaaacgaaggtagtacattccaacaattgcttccccaacatgtaaacggtaacaatacgcaaaaaaaagaccataaagtgtaatacaaaataaacacaagtactgtgatgatatacttaaaatctttagcccttctgtatgcgcattgttaatccattagacctagctaataagtttcttcagaaatgtagtgcatgaaatgatttccatagcgatggagatgtcaatgaaactgtcaaaagcaataaatatcaatatacctcagcatttcaagctatacagatacatgatatccacctcatcttttttgtatgtgtaacatatcttgcatgtacgtacaaagagtaatataacagagatgtggttatgttctttatatgagcgccaaaattcagccctttctctctaggaatatgaaggaggataataaccgcagaaaaatcaatacggaactagtatacgcattatgcaataattagcctgatcattcagtcatcacatcattatttgagataatggtcattggctatagtaggtctaacatatcacagtgacagcgtgattaaccaaggtatggtatgcgccaacatgtgttctacaaaaaatggcaatggagtgcaacttatgcttggacaattaacgaacttggctattcatctcaatgcatcttccttgctaaacgacagaatatgttagttaattagcatttacatatttcgcctgtaagagtctaaattacacatgattttcaattttttgtttccacaaatgtagtttatatggaggacttcctatattctttgtgagatcgaggtcacaagacgctgttcttgagataataccccgactcagggctgtatgatcagaaaagaaagatgaattgaacaaccatatgcaaagggtagaaagaacgtataacaagcaaaaacatgcatgcagacactgctcctggctctttttttttccctcccccataactccccattgccttttccagcttacaacgtaccaaaggtacttttgtcagtagacacagcatctatacatgtctattctagcctcagcagtgcaaaaagatccccctcctacaccttactagttaaggatacctattgctgagccggtacgtggcatttgcctccattgctcccagcaaggagctagcacacacgccgtacctactcaatgcagtgaaaggagagagagagaaaaaaaaaagaggagagacggtaatgtacagtctctctcctcactgtctctcgcacacaaaggacaagaacacagaacgcaaccaaggctctccatctccatgagagagagatgcatatcgacgcagcactgttcctactactacagaaacagtagtgttagtactgaggctggccctcttcggctcttccccaataaatcgtccatcagacgtacaaagaagttaaggccagtagcaatgccttcccctctggctcaccctctcctttacagactgccagagggccataaagaactattggagtctataccactcaaggcccagacaaatcaaacgtactacacatgacatgatttagcccacggtagggttaattttcagttgaccttgcgtaaaagcacaagagaagtcttccagtttgcttgtgtggtggtgcgcgcgtagcaactaactgcctaccatacgatctactacattatggcatgatgcaccatggtatacatatgtagtatggacaaagagtgagcaacagtacagaaaagtggcaaccggcaaaagcacgaaaatgaaaacaagagtgccagcaccaggactcataatataaacaagagagatggtgagcagtaccgatgaaagaagatgagacgattcagaagttaaacaactgacctgcaaatgcttctagctagctccataggctttgccggctgtaagttgagtgctgctgatggacatggactgtcaatgttcttgtcttgccatgctttctgagaacactgcggttgcaactccaatctaggacgagaacagatcacacatatgatgcaagaaaggcacgatgtatattgcaccgcattcatggtgctagggattcagatcttagcagtgatggtgtggagagcgcgaatttggagttgtgttatcatatgtagggagtaggaacatacgacaatcggaattgtgcaaccaaactacataagagtgaaatggtaccttaaggagtccaatcataccagcaaaaaaaggataaagcaatagtagcgaagcaaaaaccgagtcagatttcaagccatatgaaa

SEQ ID NO: 24253 - DNA, 2416 bp, Zea Mays
gctctgtctgtctccacgactccacgcatgcttcagcttcacggagacacggttcacgccgcgatccgggatcgctctctctttgggctaccggctccgccgccgctccgccgccctaagccaggtgctgaaggccttcgtcggtcttttcaccggcgacgacgacccactaggaaaagaattttcctggcatatttttgtttccagaaatattcgtgtcaagttggtatgtcagggatcacagcaatttggcgtcggtcatgtccattagctgctagtcagattctaatggagacatattttggcccatctgtatcttctggtgttctgaggtggttcagcagcggcactaagcactcaagaaaacctgaattttctgttgctaaccatatcagggtggtggatttgcattctgcttctgcagttaattatgtgtcaacgatcagaaggttgcccctttcatgccgtatggacactaattggttgattacttcaaagtccagacatggtgcattgccaggattcttaggtgtttcaagcttctatcgtggatactcctcagatactggaatcaagccagaagcttcgcagagtggtgtctctaatcttccttctacagaaagctctgaggttggcactgcaggtgctggtgggggttcatggattgaaatcttggacaatgctcgcaagtctactatagatgctaccactgatgcaggcaagaaagttaaggagctgactgatgcagttgcacctcatgtccagcagctatttgatacatatccaaatcttgaaaaggtagttgttccacttggcggaacaatatttggtacaatgatggcatggttggtcatgcctatcattctaaggaggcttcacaagtacgcatcacaaagtcctatatcagcacttctggggaactccaccaagaatgatgttttgtaccaaactagtctctggtgtgcattagaggatcctgcaaaatatctgatcacgttcatggcattttcagaaatggcaacacttattgcaccaagcgtatcaacttaccttccacaggcatggagaggtgcatttgttctgtcttttgtatggttccttcagaggtggaaaaccaacttcattgctaaagctatgaccaaactagatgcctcaagtgttgatcgcgacaggatatcggcatttgataaggtttcttcattgggactgattggactaggagtaatgggtcttgctgaagcttgtggtatagctgttcaatcaatattaactgttggtggtgtgggaggtgttgctactgcttttgctgctagagatgttcttggtaacattcttagtgggttctccttgcaattttctaagccattctcagttaacgactacataaaggcggggtcaatagaaggcaaggtggttgaaataggactcacttctacttcattgatcaatccagaaaagctccctgtcatagtacccaactctttgttctccagtcagatgatagttaacagatcacgagctaattggcgagctagtgtgacaaagattcctattcgaattgaggatattgagaaggttccttctgcatcagaggagataaagactatgttaaggtctaatcaaaatgtgtcctttgatagtgatgttccttactgctatctctcgagattggaaagttcatatggagagctcatcattggatgcaacctaaaaaacatgaggaaagatgagtggctatctgcccaacaagaaattcttttgggagctgctaggattatcaaatcacatggcattgaactgggaagcaccatgcagtgctgttaattcacgcttccggcacttttaagtaaataccgttagcctgcagaagtgcagaacttcatacagacgctacctagccgttttgttcttcaacgttttatgtcttcagaccatggacacccactaccaatactattctgttactgccgttttctttggaactaaggtcttgtttccttttgtggtcgtcccttttggttggtgcttggatccgtttctgggagcttctttgtctatgtatactggtgaacgtttgcaccgcgcccacgcctgccctgtggatgaaccctgagcgttttattggtcaattctgtgaaatattgggttttatcctcgaaattctagtgttttacgtagtactcgattaactagactaataggtgaccatcttgaagcaattcgtgtttgacactgaacattcctgaggacttggacttgcatgccccaggatagattccaccgctgttttaccatgctgaacctacagtatcgtcttgaatacaaaaccattgtggcgtggttgcagtactcctcaaaagtttgcgtgtcgtaggcaatgtgggacacgcgctggagaaggttttggtgctcgaag

SEQ ID NO: 24254 - DNA, 1138 bp, Zea Mays
cagaccctcgtctctttgcgttctttgaaggtgttgctactgcttttgctgctagagatgttcttggtaacattcttagtgggttctccttgcaattttctaagccattctcagttaacgactacataaaggcggggtcaatagaaggcaaggtggttgaaataggactcacttctacttcattgatcaatccagaaaagctccctgtcatagtacccaactctttgttctccagtcagatgatagttaacagatcacgagctaattggcgagctagtgtgacaaagattcctattcgaattgaggatattgagaaggttccttctgcatcagaggagataaagactatgttaaggtctaatcaaaatgtgtcctttgatagtgatgttccttactgctatctctcgagattggaaagttcatatggagagctcatcattggatgcaacctaaaaaacatgaggaaagatgagtggctatctgcccaacaagaaattcttttgggagctgctaggattatcaaatcacatggcattgaactgggaagcaccatgcagtgctgttaattcacgcttccggcacttttaagtaaataccgttagcctgcagaagtgcagaacttcatacagacgctacctagccgttttgttcttcaacgttttatgtcttcagaccatggacacccactaccaatactattctgttactgccgttttctttggaactaaggtcttgtttccttttgtggtcgtcccttttggttggtgcttggatccgtttctgggagcttctttgtctatgtatactggtgaacgtttgcaccgcgcccacgcctgccctgtggatgaaccctgagcgttttattggtcaattctgtgaaatattgggttttatcctcgaaattctagtgttttacgtagtactcgattaactagactaataggtgaccatcttgaagcaattcgtgtttgacactgaacattcctgaggacttggacttgcatgccccaggatagattccaccgctgttttaccatgctgaacgtaagagtactgacaggctgccatgatcagcatgtttctacaattctactgatctactttcaccttttctttaatcctcggtactccttttttt

SEQ ID NO: 24255 - DNA, 1149 bp, Zea Mays
cagcaatacctcatcaacagtatcccacaggagaaggtgttgctactgcttttgctgctagagatgttcttggtaacattcttagtgggttctccttgcaattttctaagccattctcagttaacgactacataaaggcggggtcaatagaaggcaaggtggttgaaataggactcacttctacttcattgatcaatccagaaaagctccctgtcatagtacccaactctttgttctccagtcagatgatagttaacagatcacgagctaattggcgagctagtgtgacaaagattcctattcgaattgaggatattgagaaggttccttctgcatcagaggagataaagactatgttaaggtctaatcaaaatgtgtcctttgatagtgatgttccttactgctatctctcgagattggaaagttcatatggagagctcatcattggatgcaacctaaaaaacatgaggaaagatgagtggctatctgcccaacaagaaattcttttgggagctgctaggattatcaaatcacatggcattgaactgggaagcaccatgcagtgctgttaattcacgcttccggcacttttaagtagggtaaataccgttagcctgcagaagtgcagaacttcatacagacgctacctagccgttttgttcttcaacgttttatgtcttcagaccatggacacccactaccaatactattctgttactgccgttttctttggaactaaggtcttgtttccttttgtggtcgtcccttttggttggtgcttggatccgtttctgggagcttctttgtctatgtatactggtgaacgtttgcaccgcgcccacgcctgccctgtggatgaaccctgagcgttttattggtcaattctgtgaaatattgggttttatcctcgaaattctagtgttttacgtagtactcgattaactagactaataggtgaccatcttgaagcaattcgtgtttgacactgaacattcctgaggacttggacttgcatgccccaggatagattccaccgctgttttaccatgctgaacgtaagagtactgacaggctgccatgatcagcatgtttctacaattctactgatctactttcaccttttctttaatcctcggtactccttttttt

SEQ ID NO: 24256 - DNA, 1234 bp, Zea Mays
ctcgtcattcagcaatacctcatcaacagtatcccacaggagaagaagctgcaacctttatgtctaccttctgaaacacttctggtgccaggacagcaatggagcagccattcagccaaaggtgttgctactgcttttgctgctagagatgttcttggtaacattcttagtgggttctccttgcaattttctaagccattctcagttaacgactacataaaggcggggtcaatagaaggcaaggtggttgaaataggactcacttctacttcattgatcaatccagaaaagctccctgtcatagtacccaactctttgttctccagtcagatgatagttaacagatcacgagctaattggcgagctagtgtgacaaagattcctattcgaattgaggatattgagaaggttccttctgcatcagaggagataaagactatgttaaggtctaatcaaaatgtgtcctttgatagtgatgttccttactgctatctctcgagattggaaagttcatatggagagctcatcattggatgcaacctaaaaaacatgaggaaagatgagtggctatctgcccaacaagaaattcttttgggagctgctaggattatcaaatcacatggcattgaactgggaagcaccatgcagtgctgttaattcacgcttccggcacttttaagtagggtaaataccgttagcctgcagaagtgcagaacttcatacagacgctacctagccgttttgttcttcaacgttttatgtcttcagaccatggacacccactaccaatactattctgttactgccgttttctttggaactaaggtcttgtttccttttgtggtcgtcccttttggttggtgcttggatccgtttctgggagcttctttgtctatgtatactggtgaacgtttgcaccgcgcccacgcctgccctgtggatgaaccctgagcgttttattggtcaattctgtgaaatattgggttttatcctcgaaattctagtgttttacgtagtactcgattaactagactaataggtgaccatcttgaagcaattcgtgtttgacactgaacattcctgaggacttggacttgcatgccccaggatagattccaccgctgttttaccatgctgaacgtaagagtactgacaggctgccatgatcagcatgtttctacaattctactgatctactttcaccttttctttaatcctcggtactccttttttt

SEQ ID NO: 24257 - DNA, 1258 bp, Zea Mays
gtctccactcttcatatgtgttgatcgtcctcgtcattcagcaatacctcatcaacagtatcccacaggagaagaagctgcaacctttatgtctaccttctgaaacacttctggtgccaggacagcaatggagcagccattcagccaaaggtgttgctactgcttttgctgctagagatgttcttggtaacattcttagtgggttctccttgcaattttctaagccattctcagttaacgactacataaaggcggggtcaatagaaggcaaggtggttgaaataggactcacttctacttcattgatcaatccagaaaagctccctgtcatagtacccaactctttgttctccagtcagatgatagttaacagatcacgagctaattggcgagctagtgtgacaaagattcctattcgaattgaggatattgagaaggttccttctgcatcagaggagataaagactatgttaaggtctaatcaaaatgtgtcctttgatagtgatgttccttactgctatctctcgagattggaaagttcatatggagagctcatcattggatgcaacctaaaaaacatgaggaaagatgagtggctatctgcccaacaagaaattcttttgggagctgctaggattatcaaatcacatggcattgaactgggaagcaccatgcagtgctgttaattcacgcttccggcacttttaagtaaataccgttagcctgcagaagtgcagaacttcatacagacgctacctagccgttttgttcttcaacgttttatgtcttcagaccatggacacccactaccaatactattctgttactgccgttttctttggaactaaggtcttgtttccttttgtggtcgtcccttttggttggtgcttggatccgtttctgggagcttctttgtctatgtatactggtgaacgtttgcaccgcgcccacgcctgccctgtggatgaaccctgagcgttttattggtcaattctgtgaaatattgggttttatcctcgaaattctagtgttttacgtagtactcgattaactagactaataggtgaccatcttgaagcaattcgtgtttgacactgaacattcctgaggacttggacttgcatgccccaggatagattccaccgctgttttaccatgctgaacgtaagagtactgacaggctgccatgatcagcatgtttctacaattctactgatctactttcaccttttctttaatcctcggtactccttttttt

SEQ ID NO: 24258 - DNA, 2175 bp, Zea Mays
gcggtcgtatgctgggcgtgatggaaatattcgtgtcaagttggtatgtcagggatcacagcaatttggcgtcggtcatgtccattagctgctagtcagattctaatggagacatattttggcccatctgtatcttctggtgttctgaggtggttcagcagcggcactaagcactcaagaaaacctgaattttctgttgctaaccatatcagggtggtggatttgcattctgcttctgcagttaattatgtgtcaacgatcagaaggttgcccctttcatgccgtatggacactaattggttgattacttcaaagtccagacatggtgcattgccaggattcttaggtgtttcaagcttctatcgtggatactcctcagatactggaatcaagccagaagcttcgcagagtggtgtctctaatcttccttctacagaaagctctgaggttggcactgcaggtgctggtgggggttcatggattgaaatcttggacaatgctcgcaagtctactatagatgctaccactgatgcaggcaagaaagttaaggagctgactgatgcagttgcacctcatgtccagcagctatttgatacatatccaaatcttgaaaaggtagttgttccacttggcggaacaatatttggtacaatgatggcatggttggtcatgcctatcattctaaggaggcttcacaagtacgcatcacaaagtcctatatcagcacttctggggaactccaccaagaatgatgttttgtaccaaactagtctctggtgtgcattagaggatcctgcaaaatatctgatcacgttcatggcattttcagaaatgcatggagaggtgcatttgttctgtcttttgtatggttccttcagaggtggaaaaccaacttcattgctaaagctatgaccaaactagatgcctcaagtgttgatcgcgacaggatatcggcatttgataaggtttcttcattgggactgattggactaggagtaatgggtcttgctgaagcttgtggtatagctgttcaatcaatattaactgttggtggtgtgggaggtgttgctactgcttttgctgctagagatgttcttggtaacattcttagtgggttctccttgcaattttctaagccattctcagttaacgactacataaaggcggggtcaatagaaggcaaggtggttgaaataggactcacttctacttcattgatcaatccagaaaagctccctgtcatagtacccaactctttgttctccagtcagatgatagttaacagatcacgagctaattggcgagctagtgtgacaaagattcctattcgaattgaggatattgagaaggttccttctgcatcagaggagataaagactatgttaaggtctaatcaaaatgtgtcctttgatagtgatgttccttactgctatctctcgagattggaaagttcatatggagagctcatcattggatgcaacctaaaaaacatgaggaaagatgagtggctatctgcccaacaagaaattcttttgggagctgctaggattatcaaatcacatggcattgaactgggaagcaccatgcagtgctgttaattcacgcttccggcacttttaagtagggtaaataccgttagcctgcagaagtgcagaacttcatacagacgctacctagccgttttgttcttcaacgttttatgtcttcagaccatggacacccactaccaatactattctgttactgccgttttctttggaactaaggtcttgtttccttttgtggtcgtcccttttggttggtgcttggatccgtttctgggagcttctttgtctatgtatactggtgaacgtttgcaccgcgcccacgcctgccctgtggatgaaccctgagcgttttattggtcaattctgtgaaatattgggttttatcctcgaaattctagtgttttacgtagtactcgattaactagactaataggtgaccatcttgaagcaattcgtgtttgacactgaacattcctgaggacttggacttgcatgccccaggatagattccaccgctgttttaccatgctgaacgtaagagtactgacaggctgccatgatcagcatgtttctacaattctactgatctactttcaccttttctttaatcctcggtactccttttttt

SEQ ID NO: 24259 - DNA, 2347 bp, Zea Mays
atgctgccacgtcactcctccctctccatcgccgccctcccccacctcgtcctcatcgcgtgtcatgcttccgggctccggccctccgcgaccctactccacctcccccggccggctttcgccgccgctgcagacgcttcgccaccaccgtcacacgctccgcctctcttccatgcacgtctccctcctgcttccactcctccggctacacccccgccttatggccttgctgctcgccgtagccccgcacctcaacctcgggaagatacggaccagagcgacgacattgaggaggaaaagtaggagcgtcggcggcggcagtgcagcacggcgcaagccctaataattaccgtcgtgacgccgtgattggaccatgtttcgcggccaaatggcgtgcctcagcgaagctgcaagttggcaccgcggcgacgacgctggtgaggtggtccgtcgtagggatcgaaacaagagtatggcgtgttggaggtgaaggcaaccgcgtcagccatggcagatgaggagcatccagagatgatagaggaggcctccgagtggatcatgattcaactcttgatgagcttggagatggagaggacactcaaggtgcatttcatttgctctgaaactaagccttgctcttattgagtacttttgcaatatctaactccctgctttttagatgatcaagctgtagaggaacaagggaaagacattgtgcttggaagtgcccttacatacccttgtgagggcactgaccgagattataaatatggatatagatacttaaaatattttttctgtcaaatctttagtccacgtaatcacacatccctatgcattttttggttagaaaacatgcgactatttgatggcctgttggctgatatgtgacatgtcacagttgccttaaagctttacatctttgtggttctaatgttctatgacattacaaccacatttttttcgttattatgatttgcatgctatctacacctgtttctttgggagcactcaaatatgcagcattctttatcattaattttggttacttcttttgaggtggttcttcaatatataactaccttggaggaaccaaatcaccacaacgttgtgttacgtttttgtgaaatttgaccttgacctttttttgttgcacctactgcacagggtgtccaaatttcttcacgaaaacaacttttcttttttctttcagctactccacaagctgtccaaattcttcacaaaaacaagatagttccagtttttttctctattacaggtatggtgatgcttgcagaagccctaattccatttgaactactatacaacacttcagaaagggagtcatttcagtgaagcatgggttttttatcatcaacattttgttcagtgttagtacttagttgaaattatgaacacagacctgacgcagtaatggcatccaggggtgacaaaatgcctgatctattttagaatttagaatctaaaacctgctaccaaaataaccaagtcaaggttgggtaagtacaactactatgccttctatcttccagtcaatagtgaaacgatcaatcatctacatgtttgacataacctttctggagattactctgccttttaggagacttcactttaatagcgccagcgccatctttggacttgcagtatccactcttctgacctctttgccgaccacctttctttttgtgctcatcgtcagcaacttcatcattggacttgcgacattgaccgtgttggatggattgcttccttcactgcttcgtgcagtcaggcaggcaaaggctgttaatgtgggcgacgccatgcaggaggaagccacatgtacatgttagcatgttaagcagcctgccgaggcctgagacggtgattactggctccacgagtgtgccatcgtcatttcgctttgtggtgagcagctacaggcgattcgaaagacaaaatcgacctgttggttttccgtgttcgacgcatttttaacaagcaggaggaacgactttcttctgtgagattatacacttctcattcttctaaaatgtcacatgacctaaaatttcaatcaaatatatataaaactttgaatatttattttaccaagtaagcatgtaaaaaatataataatctacgcttccagcaatgtctatgctggtatttttttccctttgtatgatcgagtccaatgtcgcacgactactctgttttttctctcgaacacagctagcaggagagctatgtattatttcataaatagaagaaaacataaatagaagaaaagacaggaaaacaacccacacactctaacgcacgccaccacaaaactcacccataa

SEQ ID NO: 24260 - DNA, 1286 bp, Zea Mays
gtttaattgatgtatatctaaaatactaatattagaagaatagaaatctcttaaaaaataggttcccaaactatcccttaacacttaaatccttccaccaccagcttagttatatttatagaaaattcctaacaaaccacgtattgtgggattcgagatgacaatgacatgctagtgctagcaagctaaaatcgaattggcccctctaggggcaacggcccacggacttccggtgctcgtcccgagagatttccagagcgctcgctagcaatattccaaatctctcgtggagtcgtggctgcttgcccatcccatcgactacaactcaacgacccgagaactttccagagcactcgccactcgcacatcgactacaactcaacgatccaagccaagcgacgcgtgtgttctcttcttctccgaggccatcatccttcgcgcgaattagccgctcagcgaccgggattcaagggttgcgatcagatgaggggcgcagcaaggcgtctggtgcagagcgcaaccaaaaccaggcaaatcaatcctgtcaatggactagcaaggatgccggcgatcactactcctcagaggcatgggaacgagaatacttccagtgaatctgtcgtcacgaaagacgaaaacgttgagccccttgtcgccttcagcaggccacctcctttgccgcctgttctgggtccgctcgtcgtgctctcggttttcgagatgtcgtccggtggcggcgacgaagacaccgaatgaggcagcaaatgggcacccatggaaattagcttttgtgttgtctgttaagtttgctccgttctacccctgtggacatgaggttcgcacgagggggctgatcttccctgagcagctccgaattaggccttgtagaactacagactacagactaagatgtactgttagctatcaactaggtggcgtttggataatgtgatgtgcaaggtgggatagggaagtggagggtggtagtacaaatgatttaccacgttgtggttggcggaatagataaggagatgagctggagtgaggaaagggaaccgtctgtctcactcgagaggtggatgcattatggcgtcggcgacgtactaatcgtgagtaaccaaggtagccgcagccgccaactcgcgcgtcgccactgcgcaccgggggtgcgagcctgggctgcattcgttgcttacctctcgcctaggcctccgctggaccgaattttttgtattttagcccttaaacagaagtaaatttacgtttagacctaaaaaaattttaaa

SEQ ID NO: 24261 - DNA, 547 bp, Zea Mays
ggtgaccaaggaaggttgttgttaacagtgaaatgattgagtactatgacatctctggttgttatatattgaggccatgggcaatggaaatctgggagctaatgaaagaattctttgatgcagaaattaaaaagctgaagctcaaaccatattatttccctttgtttgttaccgagaatgttctacagaaggaaaaggaccacattgagggctttgcacctgaggtagcttgggttactaagtcagggaaatctgacctggaagcacctattgcaatccgccccacaagtgagactgtcatgtatccatacttctccaaatggataagaagccacagagacttacccttgaggtgtaatcaatggtgtaatgttgttagatgggagtttagcaatcctactccattcataaggagccgtgaatttctgtggcaagaggggcatactgcttttgcgaataaagaagaggcagatgaagaggtagaagtagaactacatatttttgcacagttttgacctctgttcttaaggcgtcgactaggcgtcga

SEQ ID NO: 24262 - DNA, 1823 bp, Zea Mays
cctggtctcctcttccttcccctcctgttctgtccatctctaccgttccattccaattccatccccggaaagcgcaagccgcgggagagcggccggcgtacgtaccacgaggaccgccagccgagggccatggccgccggtctgtccggcgccgcgatgaccagcttcgtcgccaagaacccgctgctggcggccgcggcgcgccgcagggcgctgcctcccctcgccgggcgcgccctgccgttctcgccgctcaccaccgccagggccccgcgccgccgcgggctcgggaccgtcacgtgcttcgtgccgcaggacacggagcacccggcggcggcggcaccggccccggtcgctcccgtgccggagacggcgctggacgaggaggccagggccgcggcggcgcggcgcgtcgcggagaggaaggcgcggaagcggtccgagcggcgtacctacctggtggccgccgtgatgtccagcctcggggtcacgtccatggccgtcgccgccgtgtactatcgcttcagctggcaaatggagggcggcgcggtcccggtgagcgagatgttcggcacgtttgcgctctccgtcggcgcggcggtcgggatggagttctgggcgcggtgggcgcaccgggcgctgtggcacgcctccctgtggcacatgcacgagtcgcaccaccggccgcgcgagggcccattcgagctcaacgacgtgttcgccatcgtcaacgccgtgccggccatctccctcctcgcctacggcttcttccaccgcggcctcgtgcccggcctatgcttcggcgcgggcctcgggattacgctgttcggcatggcctacatgttcgtccacgacggcctggtccaccgccgctttccggtcggccccatcgccaacgtgccctacttccgccgagtggctgccgctcacaaggtacgcacggacgacggcgacgagaggccagctagcgacccctcgctcaccacctcctcatccttctcgaagcttctatacaccacatggacaagtttgagggcgtcccgtatgggctgttcctgggaccaaaggagctggaggaggtcggtggcctggacgagctggaaaaggagctcgcgcgaatcggccggaccatctgatggattcgtccggattccggcgcggcgatctccgctccgctccgtgattccggcgcagcctcatggttggggagccgacgaccagaacctccagaagggatttggtttggatgcgcgagcctagatcttgacctgcatttcggatggtctgtggaggcacagctcgtacctggagatgtctagtgccatggaattacttttcttttctttttttcctgacattttcacgccggcgtctttatttgtgaagacgtcgcacgttcgggcccctgtattactgttcttatggctaggattctgtatataacttgtagggacatgttatgaaccaccagctcaatgaagctaaaaattcggtggttggaaacagcgctgaaaaatcagaagctcctcctttcacattcagaggcgctggcgcaacgagggcacgacgaccaacgttacacaatagttccattagccttaacttaaagttgtagccacgtagagggagaagaaggcgatgcaaacagtccttaaaaaaaacaacgatgatgcaaacagtctcgcggtgcaagtagtagaagaggatatcttatgttaacccaaatgcatgtaatttgctaatttctccctttaccttgctgcttttctgctcattacttgatcagctatatggaggaataaaatattttctttcaatacata

SEQ ID NO: 24263 - DNA, 2718 bp, Zea Mays
gctccggtcactccttgtccctgagtcctgttcaagaatcaagacaaactggcaacgagaaactagcggatttcctgaatcctgagttcctcaccggcgaggcgagcacggaaaaaatcgcatggccttgcagcacgcaggtccagctagctctacgctgaccaccggccgtcatggcaggagcgccgcagccgtcctccgtaggccaccgacgggttctagcagccgtttgagggcgcatgcgcagaaacccgtcgccggatcccgttcccgtggcgcgggagccgagaccgcgacgtccccctcatcctcccgctcggagaacgccgtcctcaaggccgcctggtacggctccgagctcctcggcatcgccgcgtcgcttctccggcccgcgccgtcgtcgcctcaggagggggatgctggcggtggcggtgacgcagagggcgaagcggcggcggtggcgggggccctggacctggaccacgcgggagtggccgaggccattaaggcggacttcgcgcggtcgtacttcgtcacagggaatctcacgctgagagcttacgaggaggactgcgagttcgccgacccggcgggctcgttcagaggcctgcggcggttcaaacggaactgcactaattttgggtctctgctcgagaaatcgaacatgaagctcactaaatgggaggacctggaggacaagtcgatcgggcactggcgtttcagctgtgtcatgtcgttcccctggaggcctattctgtcagcaaccgggtacacggaatactatttcgatgctgaatcggggaaggtgtgcaggcacgtcgaaaattggaacgttccaaagatggcgctccttcggcagattttcaggccgagccgatgggtctgggagaagcgttaaagcctgcagtggccgttgttttatgttccaaaccaaaatgcatgtgcgtgtacgtactagatatgtaaaagtacactcagaagaataactcgtatatatactagcagtatataaaatgtggatttacaaaaaaacaaaaaataagagttatcgtatacatatgtttctggcatcaatgagaagatcattcatataactgagcaatgcagacgtaactcgcaaaaaactaaaacagaaccaagttttttttggtgacggatatttacatgccttttgaatttaaatatttctagtttgcagtaaacaaacgaatgggtgtgctatccgttaaacgagcaatgctttatctgattgagctcgattgggttattgctgtatcttcacacccgctggttggcggcagcaggttggcattttggagttggagttctcatgtaggcggctaccaataactccgtgttgaatctgaatgtgtctgactcaatccatctgttgctctcgtttttcgtttatgttttctttttgttgtctgcatctgcgctggatgtgatgaaggaaagattggtccgtgtttctgattttaagtgactgacaaccatctctattttccttctgatcccaagcagtagttctcgtcttcagttgatttgtttcctcctcttcgattgccatgtgaggttttttcttcgccttcgttcagactgaatttgaatatttatatgctgtgcaatgcagatgtaactcgcaaaaaaaacgaaaacggatatttacatgttttagactgaatatgaatatttctagctagcactaaacaaacgaatggatgtgcaatcagttaacgagcaatgctttatctgattgagctcgatgaggtaattgcttgatcttcatacccgctggcataccgagtaaggttgcgtatgcgagttctcatgtgggcggctatcaatgtcaccgtggtgattggtgcggacaccgttgaacgataggctgtctgaaatcgtgcattctcaaatcaaagcagtctgatgtttgaaccagaccatcgacacatgacggtgggtcatccgcgcgagctttttgcgattatgatacgcccaacgcgtgacttcgccagtctggtatgccgaatcgcgtcctcaccagaatggtactgacatcgtcgttcgccttctgttttggtctccgtagcttcatcctcggattaaggcctagtaataactcgttgcggacacttgtgcccttgccgttgtgcctcgttctcctctcgagccttctcagcctgtagttcttagcgctgtcgccgtcgccgccatgactccgccaccgcatcccactttccacgtgacgagctcggcctgccatccggtccctggcgtcgcctcctccggtctgtattcatctgcatcaggctctgttccggcgatgtggtgcccggattcgtcgtcgccgcatcagctcttgagctccctgcttttggcctgaggtccatgtaagtagtagagttggaggatgaattagcggcggagtggccagaatctccacgtgaaccttgtccagaggacttcatttcccttgcagagcacatagaaaccttttggggcatcgagtacgactcagataatatgcctagtttctctgattagggggtagttcaggttatgtgatgagttatgtcatgaaccatgtttatgtatcagctatgaaccaagttatgtcatgaaccatgtttatgtctagtgtattagctgtgactagtttgtatcagcaaaactgagttcatgtatgtgcttgtgacatgagtaaaactgagtttgtat

SEQ ID NO: 24264 - DNA, 1450 bp, Zea Mays
aaacaacaaggctgtttgaggtggttggcaacatgggctacagaatcttctaacctatcttttattttgggtgtaagcgtatttggggtttcacctacctctctgcaatgttcatatgatccaagaggaaacagtgtgcccacaatattgctaatgatgcagaggaagttatatgatcgcggaggacttaaggttgaagggatctttaggattaatgcagaaaatagccaggaagtctatgtgagggaccaattaaacagtggagtggttccaaatgaagttgacttgcactgccttgccgggttgataaaggcatggtttcgggagcttccttcaggtgtattggatgcactgacaccagaacaagtgatgcactgcaacacggaagggggagcaagaaaactacaacaagatgaacgcccggaacatcgcgatggtttttgcgcccaatatgactcagatggccgatccgttaactgccctgatacatgcggttcaggtgatgaatttcctcaagaccttaatcttgaagactctaaaggaacgaaacaaaaaggatgaggcacttgaggcgttgcaaccatgctccagctctccaaatgaccaagacgaacatcaggtgtccgagcatttggagaaaccttcagttctgccaaatcaaaaaggcttcggtttccacatgaatgatagtgccactcctgttcaagtccttggagctgagaaaactctccatcatcactcacaaatccgttctcacgagccaaaaaagtttggaaccgatatggaccacaagaaaagacagagtgatgcctcctctctcctcggcagcgattcgagcaaccgattcaacagttctgggagagaattcggtagcagaaatggcgcgtccgacagatttagttttaggaaaggggtggagaggctttgcaggcatcccgtgtttcagttgaataggtccatgaagaagtctacagatgccgtggtcttcgatgccccccgagaaacaagacaggcttgggtgtgatacaataacgacattgtatgtattatgtagttctgtttccacctgtgtttcagctgataagccgttcccactagtctgtgtgagtagaatcggttagcctcttaggtgttacaaaatcgaggttatttggagtgtacattatcgcagtttactcttccgacgaaagtgtcaggagaagtagtacacactgtacactagcacttggcttctgcggaacgaacgaaagcgagagtgaactcaggctccatggctgcgcgctgcgtacctcgagcgttagtgaccccttgatattataaccttgcaccttgctgatattttgtaacagtatcggcttgtacaacaactatgtacgctggtgttcccaacttgtatagatgcctgagactgctaggcgtggtcctcggtacccagctgcatctgaagtcc

SEQ ID NO: 24265 - DNA, 1490 bp, Zea Mays
gcggacgctcctaagcaagctgacgaaatgtaagcgtatttggggtttcacctacctctctgcaatgttcatatgatccaagaggaaacagtgtgcccacaatattgctaatgatgcagaggaagttatatgatcgcggaggacttaaggttgaagggatctttaggattaatgcagaaaatagccaggaagtctatgtgagggaccaattaaacagtggagtggttccaaatgaagttgacttgcactgccttgccgggttgataaaggcatggtttcgggagcttccttcaggtgtattggatgcactgacaccagaacaagtgatgcactgcaacacggaaggggggtgcgctctccttgcttctatgctaccaccagtggaagcagcattacttgactgggcaattaatctgatggccgatgttgtagagcaagaaaactacaacaagatgaacgcccggaacatcgcgatggtttttgcgcccaatatgactcagatggccgatccgttaactgccctgatacatgcggttcaggtgatgaatttcctcaagaccttaatcttgaagactctaaaggaacgaaacaaaaaggatgaggcacttgaggcgttgcaaccatgctccagctctccaaatgaccaagacgaacatcaggtgtccgagcatttggagaaaccttcagttctgccaaatcaaaaaggcttcggtttccacatgaatgatagtgccactcctgttcaagtccttggagctgagaaaactctccatcatcactcacaaatccgttctcacgagccaaaaaagtttggaaccgatatggaccacaagaaaagacagagtgatgcctcctctctcctcggcagcgattcgagcaaccgattcaacagttctgggagagaattcggtagcagaaatggcgcgtccgacagatttagttttaggaaaggggtggagaggctttgcaggcatcccgtgtttcagttgaataggtccatgaagaagtctacagatgccgtggtcttcgatgccccccgagaaacaagacaggcttgggtgtgatacaataacgacattgtatgtattatgtagttctgtttccacctgtgtttcagctgataagccgttcccactagtctgtgtgagtagaatcggttagcctcttaggtgttacaaaatcgaggttatttggagtgtacattatcgcagtttactcttccgacgaaagtgtcaggagaagtagtacacactgtacactagcacttggcttctgcggaacgaacgaaagcgagagtgaactcaggctccatggctgcgcgctgcgtacctcgagcgttagtgaccccttgatattataaccttgcaccttgctgatattttgtaacagtatcggcttgtacaacaactatgtacgctggtgttcccaacttgtatagatgcctgagactgctaggcgtggtcctcggtacccagctgcatctgaagtcc

SEQ ID NO: 24266 - DNA, 2101 bp, Zea Mays
catcaatcaaccaggcaggtactcgtaagctgatgggggtaaagcagggggattagtgaggacctcgtttgaagccgggtataaaagccgcgaggctagcaaaggcgacctcgcgaggaaaaactacctgggccgccaccgccacagccccgccccgccccgcccccgcctcccgagctgagcgagcgactcagcaagcgcgcaacggaaccagccgccgcggcgcgccatggcgccgttccagatgcgtttcgggctccagatctctcccgcgcgctccgacgacgacgaggaggaggacgacgacgacgacaacgaggaggagtatgacgagatggcgagcgaggggacggcctcgccgccgatgatgctccggccagggaggggagggggagggctggtgagcgccgtcgtgggcgcgctgcggaggtcgctggtgatgtgcagcgctggcgccgtggatatcgacgacgacgacgacgaggaggagggcgggatcgagatcgggcggcccacggacgtgcaccacgtctcgcacgtcaccttcgaccgctttggtggcttcctcggcctccccgcggacctcgaacccgaagtgccgcggcgcacgccgagtgccaggtcaaattctacatgcagtgtaagcgtatttggggtttcacctacctctctgcaatgttcatatgatccaagaggaaacagtgtgcccacaatattgctaatgatgcagaggaagttatatgatcgcggaggacttaaggttgaagggatctttaggattaatgcagaaaatagccaggaagtctatgtgagggaccaattaaacagtggagtggttccaaatgaagttgacttgcactgccttgccgggttgataaaggcatggtttcgggagcttccttcaggtgtattggatgcactgacaccagaacaagtgatgcactgcaacacggaaggggggtgcgctctccttgcttctatgctaccaccagtggaagcagcattacttgactgggcaattaatctgatggccgatgttgtagagcaagaaaactacaacaagatgaacgcccggaacatcgcgatggtttttgcgcccaatatgactcagatggccgatccgttaactgccctgatacatgcggttcaggtgatgaatttcctcaagaccttaatcttgaagactctaaaggaacgaaacaaaaaggatgaggcacttgaggcgttgcaaccatgctccagctctccaaatgaccaagacgaacatcaggtgtccgagcatttggagaaaccttcagttctgccaaatcaaaaaggcttcggtttccacatgaatgatagtgccactcctgttcaagtccttggagctgagaaaactctccatcatcactcacaaatccgttctcacgagccaaaaaagtttggaaccgatatggaccacaagaaaagacagagtgatgcctcctctctcctcggcagcgattcgagcaaccgattcaacagttctgggagagaattcggtagcagaaatggcgcgtccgacagatttagttttaggaaaggggtggagaggctttgcaggcatcccgtgtttcagttgaataggtccatgaagaagtctacagatgccgtggtcttcgatgccccccgagaaacaagacaggcttgggtgtgatacaataacgacattgtatgtattatgtagttctgtttccacctgtgtttcagctgataagccgttcccactagtctgtgtgagtagaatcggttagcctcttaggtgttacaaaatcgaggttatttggagtgtacattatcgcagtttactcttccgacgaaagtgtcaggagaagtagtacacactgtacactagcacttggcttctgcggaacgaacgaaagcgagagtgaactcaggctccatggctgcgcgctgcgtacctcgagcgttagtgaccccttgatattataaccttgcaccttgctgatattttgtaacagtatcggcttgtacaacaactatgtacgctggtgttcccaacttgtatagatgcctgagactgctaggcgtggtcctcggtacccagctgcatctgaagtcc

SEQ ID NO: 24267 - DNA, 1248 bp, Zea Mays
gtggccttttgtagtcacgcacctcgcggattgaatcaaacatcacgaactagctatcactgccaaaaaatgcagatattctgaacggcacccgtcatatatgttctggcttgactaggttgagggaagttgaagcaaaagtctaagcaaaaatgttttacgggggatatgcttaccatggcaactcgtttgagcaaacataccgttgttatccagcatcgttttttgataagccacacctggaaggcggtgataaagtaataatgccaccttctgcccttgatcgtcttgcttccttgcacatcgagtaccctatgctatttgagctgcacaatgatgcaacccagcggatttcacactgtggtgttttggagtttgttgcagaagaaggcatgatcatcatgccctattggatgatgcaaaacatgctgcttcaagagggtgacactgtccatgtaaaaaatgcgactcttcccaagggcacatatgtgaaattgcaacctcacacaactgattttctggatatttcaaacccgaaagccatcttggaaaaaactttaagaaatttctcctgcttaaccacgggagacagcatcatggtagcctacaacaacaaacaatattatattgatattgttgaaacaaagcctgcttctgcggttagcattattgagacagactgtgaagtggactttgcgcctcctcttgattataaagaacctgagaaaccacgacaaccaacagttcctgcaagcaaggcacctgctgaagatggcaacactgcagtggaggatgaaccaaaattcaaaccatttactggttttggaaagcggttggatggaaaagcctcaaaactgcaagcatcagaggttccttccactgcactttctgcaccttcagattcaaacaaaagagcaaatcagcaaatctcagcacccgcagcttcaggagctagcaattacagtcgacagaaaactgggaaacttgtttttggttcaagtgcaagcaacaataaggaaccacaaaaggctcctgctaaagaggagcaacccgcaaagaaggacgacgagctgaggttccaagcgttcagcgggaagagctactcattgaaacgttagctgcttcagttaaccttcaaattcgccgctactctttcgtttcgtgcatggtgggtgttctggcacctggtcaccaccatgtagatatgaattgaagtcatgcgaagatctggtgtaagcagtggcggac

SEQ ID NO: 24268 - DNA, 1724 bp, Zea Mays
caaaaaatgcagatattctgaacggcacccgtcatatatgttctggcttgactagcaggttgagggaagttgaagcaaaagtctaagcaaaaatgttttacgggggatatgcttaccatggcaactcgtttgagcaaacataccgttgttatccagcatcgttttttgataagccacacctggaaggcggtgataaagtaataatgccaccttctgcccttgatcgtcttgcttccttgcacatcgagtaccctatgctatttgagctgcacaatgatgcaacccagcggatttcacactgtggtgttttggagtttgttgcagaagaaggcatgatcatcatgccctattggatgatgcaaaacatgctgcttcaagagggtgacactgtccatgtaaaaaatgcgactcttcccaagggcacatatgtgaaattgcaacctcacacaactgattttctggatatttcaaacccgaaagccatcttggaaaaaactttaagaaatttctcctgcttaaccacgggagacagcatcatggtagcctacaacaacaaacaatattatattgatattgttgaaacaaagcctgcttctgcggttagcattattgagacagactgtgaagtggactttgcgcctcctcttgattataaagaacctgagaaaccacgacaaccaacagttcctgcaagcaaggcacctgctgaagatggcaacactgcagtggaggatgaaccaaaattcaaaccatttactggttttggaaagcggttggatggaaaagcctcaaaactgcaagcatcagaggttccttccactgcactttctgcaccttcagattcaaacaaaagagcaaatcagcaaatctcagcacccgcagcttcaggagctagcaattacagtcgacagaaaactgggaaacttgtttttggttcaagtgcaagcaacaataaggaaccacaaaaggctcctgctaaagaggagcaacccgcaaagaaggacgacgagctgaggttccaagcgttcagcgggaagagctactcattgaaacgttagctgcttcagttaaccttcaaattcgccgctactctttcgtttcgtgcatggtgggtgttctggcacctggtcaccaccatgtagatatgaattgaagtatgtatatgcttatcttgatggaaacatgacagtctgtttatttaagcccaaaagtttaaaacagcgctattgttcttacccagtgtgtgttttggaatctgctcctgttaattttcgggccatggtttcggattagtagaccaaagcaggatactgaacgtgtcagcaatcattattagcggcagacgagatgtgatgatcgttgggccctgggagtttggtcatgtaccaatattatagaccgtactccaagtctccaatactgattgctgaatattgaacgaggagcaagtaaacaagctccttcaggtctcagttgccattcaaaaaagttgcaccggctttacaacgcagcataggtgactcgttcataagcagcagccttgttcgctcatccgtttcagcatctaaactaaccgcgaatgggctgggcacaaagcagagcagctggtaccagatagtgagttctttgactctgactgtaactatagaagcactaacaaagtgataaccaagtcttagggacaatattcagtacaagaaattgtatcgtgcttatcctataag

SEQ ID NO: 24269 - DNA, 1809 bp, Zea Mays
ctagtcatttgctagtgattccttcgctatcccatccatccatgtttgcggttccgtgcgattagtggtttgctcttccgtgcacgaaagattgatcccggggcccaagtggttgctccacgcacgcaacgccactacgccaggttgagggaagttgaagcaaaagtctaagcaaaaatgttttacgggggatatgcttaccatggcaactcgtttgagcaaacataccgttgttatccagcatcgttttttgataagccacacctggaaggcggtgataaagtaataatgccaccttctgcccttgatcgtcttgcttccttgcacatcgagtaccctatgctatttgagctgcacaatgatgcaacccagcggatttcacactgtggtgttttggagtttgttgcagaagaaggcatgatcatcatgccctattggatgatgcaaaacatgctgcttcaagagggtgacactgtccatgtaaaaaatgcgactcttcccaagggcacatatgtgaaattgcaacctcacacaactgattttctggatatttcaaacccgaaagccatcttggaaaaaactttaagaaatttctcctgcttaaccacgggagacagcatcatggtagcctacaacaacaaacaatattatattgatattgttgaaacaaagcctgcttctgcggttagcattattgagacagactgtgaagtggactttgcgcctcctcttgattataaagaacctgagaaaccacgacaaccaacagttcctgcaagcaaggcacctgctgaagatggcaacactgcagtggaggatgaaccaaaattcaaaccatttactggttttggaaagcggttggatggaaaagcctcaaaactgcaagcatcagaggttccttccactgcactttctgcaccttcagattcaaacaaaagagcaaatcagcaaatctcagcacccgcagcttcaggagctagcaattacagtcgacagaaaactgggaaacttgtttttggttcaagtgcaagcaacaataaggaaccacaaaaggctcctgctaaagaggagcaacccgcaaagaaggacgacgagctgaggttccaagcgttcagcgggaagagctactcattgaaacgttagctgcttcagttaaccttcaaattcgccgctactctttcgtttcgtgcatggtgggtgttctggcacctggtcaccaccatgtagatatgaattgaagtatgtatatgcttatcttgatggaaacatgacagtctgtttatttaagcccaaaagtttaaaacagcgctattgttcttacccagtgtgtgttttggaatctgctcctgttaattttcgggccatggtttcggattagtagaccaaagcaggatactgaacgtgtcagcaatcattattagcggcagacgagatgtgatgatcgttgggccctgggagtttggtcatgtaccaatattatagaccgtactccaagtctccaatactgattgctgaatattgaacgaggagcaagtaaacaagctccttcaggtctcagttgccattcaaaaaagttgcaccggctttacaacgcagcataggtgactcgttcataagcagcagccttgttcgctcatccgtttcagcatctaaactaaccgcgaatgggctgggcacaaagcagagcagctggtaccagatagtgagttctttgactctgactgtaactatagaagcactaacaaagtgataaccaagtcttagggacaatattcagtacaagaaattgtatcgtgcttatcctataag

SEQ ID NO: 24270 - DNA, 1979 bp, Zea Mays
gccctaggcaagatcattttagacccaagaatactgatcctggcctcatgggcccatggatgctccgtgcgatcgtgcattcgtgctcgtgtcgagaacccaatccggtccactgagcccaaccataccggcggctctctgtttctcgaatacccgatcctatcgcatcgaatcgaaactgttccgctcccactccgatcggattcggtgggacggtggcatctatgcgcccgtcgcaccgtcgctcaaactgtataaacctgcgcccgaacacttcgagctcacccgcaacctcctccgggaagcgcgatcgccgtctcgaaggagctgaaatccaagattccaagctcttctgtcacaggttgagggaagttgaagcaaaagtctaagcaaaaatgttttacgggggatatgcttaccatggcaactcgtttgagcaaacataccgttgttatccagcatcgttttttgataagccacacctggaaggcggtgataaagtaataatgccaccttctgcccttgatcgtcttgcttccttgcacatcgagtaccctatgctatttgagctgcacaatgatgcaacccagcggatttcacactgtggtgttttggagtttgttgcagaagaaggcatgatcatcatgccctattggatgatgcaaaacatgctgcttcaagagggtgacactgtccatgtaaaaaatgcgactcttcccaagggcacatatgtgaaattgcaacctcacacaactgattttctggatatttcaaacccgaaagccatcatcatggtagcctacaacaacaaacaatattatattgatattgttgaaacaaagcctgcttctgcggttagcattattgagacagactgtgaagtggactttgcgcctcctcttgattataaagaacctgagaaaccacgacaaccaacagttcctgcaagcaaggcacctgctgaagatggcaacactgcagtggaggatgaaccaaaattcaaaccatttactggttttggaaagcggttggatggaaaagcctcaaaactgcaagcatcagaggttccttccactgcactttctgcaccttcagattcaaacaaaagagcaaatcagcaaatctcagcacccgcagcttcaggagctagcaattacagtcgacagaaaactgggaaacttgtttttggttcaagtgcaagcaacaataaggaaccacaaaaggctcctgctaaagaggagcaacccgcaaagaaggacgacgagctgaggttccaagcgttcagcgggaagagctactcattgaaacgttagctgcttcagttaaccttcaaattcgccgctactctttcgtttcgtgcatggtgggtgttctggcacctggtcaccaccatgtagatatgaattgaagtatgtatatgcttatcttgatggaaacatgacagtctgtttatttaagcccaaaagtttaaaacagcgctattgttcttacccagtgtgtgttttggaatctgctcctgttaattttcgggccatggtttcggattagtagaccaaagcaggatactgaacgtgtcagcaatcattattagcggcagacgagatgtgatgatcgttgggccctgggagtttggtcatgtaccaatattatagaccgtactccaagtctccaatactgattgctgaatattgaacgaggagcaagtaaacaagctccttcaggtctcagttgccattcaaaaaagttgcaccggctttacaacgcagcataggtgactcgttcataagcagcagccttgttcgctcatccgtttcagcatctaaactaaccgcgaatgggctgggcacaaagcagagcagctggtaccagatagtgagttctttgactctgactgtaactatagaagcactaacaaagtgataaccaagtcttagggacaatattcagtacaagaaattgtatcgtgcttatcctataag

SEQ ID NO: 24271 - DNA, 2020 bp, Zea Mays
gccctaggcaagatcattttagacccaagaatactgatcctggcctcatgggcccatggatgctccgtgcgatcgtgcattcgtgctcgtgtcgagaacccaatccggtccactgagcccaaccataccggcggctctctgtttctcgaatacccgatcctatcgcatcgaatcgaaactgttccgctcccactccgatcggattcggtgggacggtggcatctatgcgcccgtcgcaccgtcgctcaaactgtataaacctgcgcccgaacacttcgagctcacccgcaacctcctccgggaagcgcgatcgccgtctcgaaggagctgaaatccaagattccaagctcttctgttgagggaagttgaagcaaaagtctaagcaaaaatgttttacgggggatatgcttaccatggcaactcgtttgagcaaacataccgttgttatccagcatcgttttttgataagccacacctggaaggcggtgataaagtaataatgccaccttctgcccttgatcgtcttgcttccttgcacatcgagtaccctatgctatttgagctgcacaatgatgcaacccagcggatttcacactgtggtgttttggagtttgttgcagaagaaggcatgatcatcatgccctattggatgatgcaaaacatgctgcttcaagagggtgacactgtccatgtaaaaaatgcgactcttcccaagggcacatatgtgaaattgcaacctcacacaactgattttctggatatttcaaacccgaaagccatcttggaaaaaactttaagaaatttctcctgcttaaccacgggagacagcatcatggtagcctacaacaacaaacaatattatattgatattgttgaaacaaagcctgcttctgcggttagcattattgagacagactgtgaagtggactttgcgcctcctcttgattataaagaacctgagaaaccacgacaaccaacagttcctgcaagcaaggcacctgctgaagatggcaacactgcagtggaggatgaaccaaaattcaaaccatttactggttttggaaagcggttggatggaaaagcctcaaaactgcaagcatcagaggttccttccactgcactttctgcaccttcagattcaaacaaaagagcaaatcagcaaatctcagcacccgcagcttcaggagctagcaattacagtcgacagaaaactgggaaacttgtttttggttcaagtgcaagcaacaataaggaaccacaaaaggctcctgctaaagaggagcaacccgcaaagaaggacgacgagctgaggttccaagcgttcagcgggaagagctactcattgaaacgttagctgcttcagttaaccttcaaattcgccgctactctttcgtttcgtgcatggtgggtgttctggcacctggtcaccaccatgtagatatgaattgaagtatgtatatgcttatcttgatggaaacatgacagtctgtttatttaagcccaaaagtttaaaacagcgctattgttcttacccagtgtgtgttttggaatctgctcctgttaattttcgggccatggtttcggattagtagaccaaagcaggatactgaacgtgtcagcaatcattattagcggcagacgagatgtgatgatcgttgggccctgggagtttggtcatgtaccaatattatagaccgtactccaagtctccaatactgattgctgaatattgaacgaggagcaagtaaacaagctccttcaggtctcagttgccattcaaaaaagttgcaccggctttacaacgcagcataggtgactcgttcataagcagcagccttgttcgctcatccgtttcagcatctaaactaaccgcgaatgggctgggcacaaagcagagcagctggtaccagatagtgagttctttgactctgactgtaactatagaagcactaacaaagtgataaccaagtcttagggacaatattcagtacaagaaattgtatcgtgcttatcctataag

SEQ ID NO: 24272 - DNA, 1808 bp, Zea Mays
aatttcttcgccctccaccagtgagcacgccagccaccgcccctttcctgttgcccagcgcccccctgcagcgcgcccgcccgcccgcctccctaccctggccgcggcggccttcgctccatgcacctgctttaggttgcgccgccgtgcgccctcgctgtgccggccgacctcgccgcggcctgacccagtcatcgtccctgcttcatctccccgtcatgctcctccatgggcgtggtgatcacctatgccgtcgtagccatgccttgggcgccacaccggccgtcagcctcatctctctgctcgcctgtctccttgcctccctgtgctcaccacgccggacgccgctcccaaccctccacacttccctccccaggccgcggcggccttcgctccagctctgcctcgccatcgactgagtccccacgtccctgcgcggcgacgtgctcgcccaggccctgccaaggactcctgcgaactccaacctcatcgcctagccccgccaccgtttctaaagtgatgatccattcagcatgtcctcgtgctcatcgcatggatcatatctgggctcacactggggctcgtcgctcggcctcgtcgagctagagatcctccaacatagcagcacagacgccaagaaggcttagctgtcatccttctagttgttcaaaagcagcactagcttcatgtcaccctattgttgtgtaatgttgctgccatggaggtagaatatttggattgtaatcatatcaattatcacactattttgtactctagaactgaattcatttgctaaaagaatgtatggtaatatcagaattattttgaagcttctaatgaattatcctagcatcaacacttagaccttttaactcattattgggagagagggacaaggttctgaagttgtatgtgttcaacttttttggcaccatgtcaccatgattttttgtaatcctatttatgtttatcttacattttggaactagttgatgaagtttaaataagattgagaatacaacctattgcatccactatataagcttatttctcccggttgctactagtttctttcatcatccaacttcaacacattcaatttgtgttagtccaaatacatcgtatggtgtatgtatatctgatcaatattattttccgagtcctaaatctactatcaaacttctcatacgagtgttctttcactagttgatactcttacaccttattcctttttatttttgtattctaaagtcattgataggtagggcataggtcacatattgtttttttctgatatcttttgcactacattctattttaaccattgaattttatgttaacctcattgcagcctttgcaggcacttcctatatttcttgataggatgtttcatcatgttcttgctgtaatattgtcagtgacatttgttcttgcctttggagagggatcatatctgagctcagactggggctcatgtcgctcggcctaatgtagcagcacagtcatttcaggagaccattgatagtatgatgaggtcgatgcaaaaaaaaataacaaccaccttcatcaactattaagcttcagtcgaggtcaagcgtgtccatctttaagtctgcttgaccactataggatctgtaaccttatggatgttatagtagctagtaacaatatgcttaatatttagtacttgagttgaagttataggattttctttggaattgaagttaaaggatttgtagatatatgttttgacgttatatgattctctaatggatgaaatattcgtgttcaacatattaatatgatat

SEQ ID NO: 24273 - DNA, 1181 bp, Zea Mays
aatttcttcgccctccaccagtgagcacgccagccaccgcccctttcctgttgcccagcgcccccctgcagcgcgcccgcccgcccgcctccctaccctggccgcggcggccttcgctccatgcacctgctttaggttgcgccgccgtgcgccctcgctgtgccggccgacctcgccgcggcctgacccagtcatcgtccctgcttcatctccccgtcatgctcctccatgggcgtggtgatcacctatgccgtcgtagccatgccttgggcgccacaccggccgtcagcctcatctctctgctcgcctgtctccttgcctccctgtgctcaccacgccggacgccgctcccaaccctccacacttccctccccaggccgcggcggccttcgctccagctctgcctcgccatcgactgagtccccacgtccctgcgcggcgacgtgctcgcccaggccctgccaaggactcctgcgaactccaacctcatcgcctagccccgccaccgtttctaaagtgatgatccattcagcatgtcctcgtgctcatcgcatggatcatatctgggctcacactggggctcgtcgctcggcctcgtcgagctagagatcctccaacatagcagcacagacgccaagaaggcttagctgtcatccttctagttgttcaaaagcagcactagcttcatgtcaccctattgttgtgtaatgttgctgccatggagcctttgcaggcacttcctatatttcttgataggatgtttcatcatgttcttgctgtaatattgtcagtgacatttgttcttgcctttggagagggatcatatctgagctcagactggggctcatgtcgctcggcctaatgtagcagcacagtcatttcaggagaccattgatagtatgatgaggtcgatgcaaaaaaaaataacaaccaccttcatcaactattaagcttcagtcgaggtcaagcgtgtccatctttaagtctgcttgaccactataggatctgtaaccttatggatgttatagtagctagtaacaatatgcttaatatttagtacttgagttgaagttataggattttctttggaattgaagttaaaggatttgtagatatatgttttgacgttatatgattctctaatggatgaaatattcgtgttcaacatattaatatgatat

SEQ ID NO: 24274 - DNA, 980 bp, Zea Mays
aatttcttcgccctccaccagtgagcacgccagccaccgcccctttcctgttgcccagcgcccccctgcagcgcgcccgcccgcccgcctccctaccctggccgcggcggccttcgctccatgcacctgctttaggttgcgccgccgtgcgccctcgctgtgccggccgacctcgccgcggcctgacccagtcatcgtccctgcttcatctccccgtcatgctcctccatgggcgtggtgatcacctatgccgtcgtagccatgccttgggcgccacaccggccgtcagcctcatctctctgctcgcctgtctccttgcctccctgtgctcaccacgccggacgccgctcccaaccctccacacttccctccccaggccgcggcggccttcgctccagctctgcctcgccatcgactgagtccccacgtccctgcgcggcgacgtgctcgcccaggccctgccaaggactcctgcgaactccaacctcatcgcctagccccgccaccgtttctaaagtgatgatccattcagcatgtcctcgtgctcatcgcatggatcatatctgggctcacactggggctcgtcgctcggcctcgtcgagctagagatcctccaacatagcagcacagacgccaagaaggcttaggttggtccaatctgaacccctacatattccctgttgttacctcgttgtgctcgatctggttactgccctatgtgtgggtttgttatattggtagtggagatctcactgtcgtggcttgttacattaggtaatagggatgagagcatcatatactctattggattctcaaattcctctgcaattttgaacattagagcgtctttagtgtatgtggtgaatttttttctcgcccctattagaagtctgctagattttgtaggtggtggtaatgatagtgaggatataatctgatggtaacaccaacattgacatattatttacatgtagaagtgt

SEQ ID NO: 24275 - DNA, 1415 bp, Zea Mays
cattcctgtcacgatggatcagatcagaggacgaggtgtggccgttcctgctgcggttcccgatcggctgcttcggtgtgtgcctgggcctcggcagccaggccatcctgtggggcgcgctggcggcgagcccggcgatgcgcttcctccacgtcacgcccatgatcaacgtcgcgctgtggctgctggcggtcgccgtgctcgtcgcgacgtccgtcacctacgcgctcaagtgcatcttctacttcgaggccatccgacgcgagtacttccacccggtccgcgtcaatttcttcttcgcgccgtggatcgcggccatgttcgtgaccatcggcctaccccgctcctacgcgcccgagcggccgcacccggccgtgtggtgcgccttcgtcctgccgctcttcgcgctcgagctcaagatatacgggcagtggctgtccggcggcaagcggcggctgtgcaaggtggccaacccgtcgtcccacctctcggtggtgggcaacttcgtcggggccatactggcggcgagggtcgggtggacggaggccggcaagctcctgtgggccatcggggtcgcgcactacatcgtcgtgttcgtcacgctgtaccagcggctgcccaccaacgaggcgctgcccaaggagctgcacccggtgtactccatgttcatcgccacgccgtcggccgccagcctcgcctgggccgcgatctacggcagcttcgacgccgtggcgcgcaccttcttcttcatggccatcttcttgtacctgtccctcgtcgtgcgcatcaacttcttccgggggttccggttctccctcgcgtggtggtcgtacacgttccccatgaccacggcgtcgctggccaccgtcaagtatgccgaggctgtgccgtgcttcgcgagcagggccctcgcgctgagcctctccctcatgtcgtcgaccatggtgtcgatgctgctcgtgtcgacgctcctgcacgcgctcgtctggcgatcgctctttcccaacgacctggccatcgccatcaccaaggaccggcaaaacggcgcggtgaagccgaatgacagggggaagagggccagcaagagagtgcacgacatcaagcgatgggccaagcaggcgcccctctccctcgtgtcctcaatcaccaagagccactcggcggacaaggaggaagaagagagaactgaataagaatggctcatatagatggattaggatatattattattattatatacattagccagaagaaatgtatttttcccataagtataggaagaacataataataataagtgatgctatacatctcttactttattccctaatgatatagggcagttccgcatatgaaatggccacctagatctacaggaaactgtaagcaaaatcaggattagctgttttatttct

SEQ ID NO: 24276 - DNA, 1656 bp, Zea Mays
cttttatgcataagaacttgtgagtcatattgcattattacttgtaacttgattaacctttgaatctcaggtgacagcagcgttctattatgtgctagcagtacgcagccagtaaaaatgagtcttttgagtgccgcaaaaagcttctactttcctgtgtcaatgtatgtcgtaagagcaaaggctggtaaaaggcaatctggaaaagatgctactggaaaagttgcacactcagcaggttcttctctacggcgctataatgaagcagcactgaaaaaggtgtctttcgtttttgtttgccttattgcaggaagttcaagaattaattgtttcatggaagtcatactttgagacatgtgtttgtgccttcatttatgctccatctaggaaccgccagatgctcttcgacggggagaagactcagtcagtaattcagtcttgtgatgttcgtccagttccattgactgttcatcgccccaccatgaaggaagcgaaacgggtatattgtaacctaacacaactctactatgagatggaatgttcaaccacagatgaaacactacctgatgctggaagtgtgaaaaatgttgaacaaggtcaaggaaaaaagaatgaagtgactgcagaccctggggaatctatttctgacttgtctgcccgtttggaattgttgaataagaatgaagcagcaaccataccatcatcaaagaacgaaacaacacctcttcatgaggcagcaaagtgtggcaatgctcagctgaccctggagttacttgagcagggtttggatccttgcgtaaaagatgcaagaggaaagacatcttattcgctggcttcagataaggaagttaggaatacattcagaagatttatggcgctcaatcttgacaaatgggactggcatgctgcagatgtgcctagtgcactaacaaaagaaatggaagaatcacaagctgcaaaacaagcagacaaggacgccaaaaggaaagcacgtgcaaaggaattgaagaaattaaaaaaagaaagagaaaaggaagaaaaggagaaggagaaggagaaggctaaggctcaagcatcacaatcacaatctgatgttaaaggcacttcgagcggccaaatggccaacagaactgcaactgcgccaggccttgtaccaaagcatcagacgccacagcaaatacttatagcaaaggaggaggaacgacagagaaaacaagctgaagaaagagagaagagagcagctgcagcagagagaagacttgcggctctcgctgtccaatctgccggaacgagcgcatcaggtgcagcagcaacaaactgctccgcgaagagggcggcaccagatgacaattcgtgttcgtgctgtttcggttccttggtcggcaaggtgccattccaccgatacaactacaaatactgcagcactacatgtatgcatcttcattcagaaatgctgcaggatgattaaggaaaccgcatgatgcgtgattttgatgcaattttacctcatatacaatcaataacaggctttcttccttcccttgtgcctgctttccgtaattttgtcgtgcacatcttcataactttaaaggttcgaaatcacattcgttctggttcgtgctaatgtttttgcttcattttggaacacattttatt

SEQ ID NO: 24277 - DNA, 1644 bp, Zea Mays
acggcattaccagtttcaacttttatgcataagaacttgtgagtcatattgcattattacttgtaacttgattaacctttgaatctcaggtgacagcagcgttctattatgtgctagcagtacgcagccagtaaaaatgagtcttttgagtgccgcaaaaagcttctactttcctgtgtcaatgtatgtcgtaagagcaaaggctggtaaaaggcaatctggaaaagatgctactggaaaagttgcacactcagcaggttcttctctacggcgctataatgaagcagcactgaaaaaggaagttcaagaattaattgtttcatggaagtcatactttgagacatgtgtttgtgccttcatttatgctccatctaggaaccgccagatgctcttcgacggggagaagactcagtcagtaattcagtcttgtgatgttcgtccagttccattgactgttcatcgccccaccatgaaggaagcgaaacgggtatattgtaacctaacacaactctactatgagatggaatgttcaaccacagatgaaacactacctgatgctggaagtgtgaaaaatgttgaacaaggtcaaggaaaaaagaatgaagtgactgcagaccctggggaatctatttctgacttgtctgcccgtttggaattgttgaataagaatgaagcagcaaccataccatcatcaaagaacgaaacaacacctcttcatgaggcagcaaagtgtggcaatgctcagctgaccctggagttacttgagcagggtttggatccttgcgtaaaagatgcaagaggaaagacatcttattcgctggcttcagataaggaagttaggaatacattcagaagatttatggcgctcaatcttgacaaatgggactggcatgctgcagatgtgcctagtgcactaacaaaagaaatggaagaatcacaagctgcaaaacaagcagacaaggacgccaaaaggaaagcacgtgcaaaggaattgaagaaattaaaaaaagaaagagaaaaggaagaaaaggagaaggagaaggagaaggctaaggctcaagcatcacaatcacaatctgatgttaaaggcacttcgagcggccaaatggccaacagaactgcaactgcgccaggccttgtaccaaagcatcagacgccacagcaaatacttatagcaaaggaggaggaacgacagagaaaacaagctgaagaaagagagaagagagcagctgcagcagagagaagacttgcggctctcgctgtccaatctgccggaacgagcgcatcaggtgcagcagcaacaaactgctccgcgaagagggcggcaccagatgacaattcgtgttcgtgctgtttcggttccttggtcggcaaggtgccattccaccgatacaactacaaatactgcagcactacatgtatgcatcttcattcagaaatgctgcaggatgattaaggaaaccgcatgatgcgtgattttgatgcaattttacctcatatacaatcaataacaggctttcttccttcccttgtgcctgctttccgtaattttgtcgtgcacatcttcataactttaaaggttcgaaatcacattcgttctggttcgtgctaatgtttttgcttcattttggaacacattttatt

SEQ ID NO: 24278 - DNA, 1890 bp, Zea Mays
cgagcacagtggaaaatggaaaagtgtgtgtgaatatcaatggagagagaagttaagttgagcatggctggtaaaactattataaaggaagaggacctagataaagcagattctgattctctgtttgatgatttggagatatctagtgtctctggttcagaggacgaacaagaaaatggacctgcatcagaacgtgtactctcggttaaaggcaaggaagaattcaggaagaaactttactttcgttgtgcatcgggtgaaatgatttctatctatagatgcatgctgttgaaagaacatgaagaaccattaattgattgtaagtctggtcagatggagaatgcatcttgtgtacaggaggaggagatgataaatagggtgaagtgtttggcttgtgaaccccgtgacacgtcacatttgagaattgttctactaacaagcggtgggcattttgctggatgtgtgtttgatggaaattctatcatagctcataaaacatttcataggtatgtcgtaagagcaaaggctggtaaaaggcaatctggaaaagatgctactggaaaagttgcacactcagcaggttcttctctacggcgctataatgaagcagcactgaaaaaggaaccgccagatgctcttcgacggggagaagactcagtcagtaattcagtcttgtgatgttcgtccagttccattgactgttcatcgccccaccatgaaggaagcgaaacgggtatattgtaacctaacacaactctactatgagatggaatgttcaaccacagatgaaacactacctgatgctggaagtgtgaaaaatgttgaacaaggtcaaggaaaaaagaatgaagtgactgcagaccctggggaatctatttctgacttgtctgcccgtttggaattgttgaataagaatgaagcagcaaccataccatcatcaaagaacgaaacaacacctcttcatgaggcagcaaagtgtggcaatgctcagctgaccctggagttacttgagcagggtttggatccttgcgtaaaagatgcaagaggaaagacatcttattcgctggcttcagataaggaagttaggaatacattcagaagatttatggcgctcaatcttgacaaatgggactggcatgctgcagatgtgcctagtgcactaacaaaagaaatggaagaatcacaagctgcaaaacaagcagacaaggacgccaaaaggaaagcacgtgcaaaggaattgaagaaattaaaaaaagaaagagaaaaggaagaaaaggagaaggagaaggagaaggctaaggctcaagcatcacaatcacaatctgatgttaaaggcacttcgagcggccaaatggccaacagaactgcaactgcgccaggccttgtaccaaagcatcagacgccacagcaaatacttatagcaaaggaggaggaacgacagagaaaacaagctgaagaaagagagaagagagcagctgcagcagagagaagacttgcggctctcgctgtccaatctgccggaacgagcgcatcaggtgcagcagcaacaaactgctccgcgaagagggcggcaccagatgacaattcgtgttcgtgctgtttcggttccttggtcggcaaggtgccattccaccgatacaactacaaatactgcagcactacatgtatgcatcttcattcagaaatgctgcaggatgattaaggaaaccgcatgatgcgtgattttgatgcaattttacctcatatacaatcaataacaggctttcttccttcccttgtgcctgctttccgtaattttgtcgtgcacatcttcataactttaaaggttcgaaatcacattcgttctggttcgtgctaatgtttttgcttcattttggaacacattttatt

SEQ ID NO: 24279 - DNA, 2002 bp, Zea Mays
acaaaactcacgaaccgcacgccacccggaaggccggaacatcggatccacgctcccctttcgccgccaggttcctcctcctcctagatggcgccgctgccgctgccgctgccgccaccgtcagagaagaggccccctcgctcgctctttgaactcccctctgacttcttcgattcatccgttcttctccgggctcacccctccacggccccctccgcggtggaaccgtccgaaccctcccggccgccgccgactcagcagcagcaccaacaactttcagaggctgcggggtccaggtggacgtgcaacacatgtgcctccgagttcgagtcgctacaggagcagcgcgagcactttaagtctgacctgcaccgcctcaacgttaagttgagcatggctggtaaaactattataaaggaagaggacctagataaagcagattctgattctctgtttgatgatttggagatatctagtgtctctggttcagaggacgaacaagaaaatggacctgcatcagaacgtgtactctcggttaaaggtatgtcgtaagagcaaaggctggtaaaaggcaatctggaaaagatgctactggaaaagttgcacactcagcaggttcttctctacggcgctataatgaagcagcactgaaaaaggaagttcaagaattaattgtttcatggaagtcatactttgagacatgtgtttgtgccttcatttatgctccatctaggaaccgccagatgctcttcgacggggagaagactcagtcagtaattcagtcttgtgatgttcgtccagttccattgactgttcatcgccccaccatgaaggaagcgaaacgggtatattgtaacctaacacaactctactatgagatggaatgttcaaccacagatgaaacactacctgatgctggaagtgtgaaaaatgttgaacaaggtcaaggaaaaaagaatgaagtgactgcagaccctggggaatctatttctgacttgtctgcccgtttggaattgttgaataagaatgaagcagcaaccataccatcatcaaagaacgaaacaacacctcttcatgaggcagcaaagtgtggcaatgctcagctgaccctggagttacttgagcagggtttggatccttgcgtaaaagatgcaagaggaaagacatcttattcgctggcttcagataaggaagttaggaatacattcagaagatttatggcgctcaatcttgacaaatgggactggcatgctgcagatgtgcctagtgcactaacaaaagaaatggaagaatcacaagctgcaaaacaagcagacaaggacgccaaaaggaaagcacgtgcaaaggaattgaagaaattaaaaaaagaaagagaaaaggaagaaaaggagaaggagaaggagaaggctaaggctcaagcatcacaatcacaatctgatgttaaaggcacttcgagcggccaaatggccaacagaactgcaactgcgccaggccttgtaccaaagcatcagacgccacagcaaatacttatagcaaaggaggaggaacgacagagaaaacaagctgaagaaagagagaagagagcagctgcagcagagagaagacttgcggctctcgctgtccaatctgccggaacgagcgcatcaggtgcagcagcaacaaactgctccgcgaagagggcggcaccagatgacaattcgtgttcgtgctgtttcggttccttggtcggcaaggtgccattccaccgatacaactacaaatactgcagcactacatgtatgcatcttcattcagaaatgctgcaggatgattaaggaaaccgcatgatgcgtgattttgatgcaattttacctcatatacaatcaataacaggctttcttccttcccttgtgcctgctttccgtaattttgtcgtgcacatcttcataactttaaaggttcgaaatcacattcgttctggttcgtgctaatgtttttgcttcattttggaacacattttatt

SEQ ID NO: 24280 - DNA, 2293 bp, Zea Mays
acaaaactcacgaaccgcacgccacccggaaggccggaacatcggatccacgctcccctttcgccgccaggttcctcctcctcctagatggcgccgctgccgctgccgctgccgccaccgtcagagaagaggccccctcgctcgctctttgaactcccctctgacttcttcgattcatccgttcttctccgggctcacccctccacggccccctccgcggtggaaccgtccgaaccctcccggccgccgccgactcagcagcagcaccaacaactttcagaggctgcggggtccaggtggacgtgcaacacatgtgcctccgagttcgagtcgctacaggagcagcgcgagcactttaagtctgacctgcaccgcctcaacgttaagttgagcatggctggtaaaactattataaaggaagaggacctagataaagcagattctgattctctgtttgatgatttggagatatctagtgtctctggttcagaggacgaacaagaaaatggacctgcatcagaacgtgtactctcggttaaaggcaaggaagaattcaggaagaaactttactttcgttgtgcatcgggtgaaatgatttctatctatagatgcatgctgttgaaagaacatgaagaaccattaattgattgtaagtctggtcagatggagaatgcatcttgtgtacaggaggaggagatgataaatagggtgaagtgtttggcttgtgaaccccgtgacacgtcacatttgagaattgttctactaacaagcggtgggcattttgctggatgtgtgtttgatggaaattctatcatagctcataaaacatttcataggtatgtcgtaagagcaaaggctggtaaaaggcaatctggaaaagatgctactggaaaagttgcacactcagcaggttcttctctacggcgctataatgaagcagcactgaaaaaggaagttcaagaattaattgtttcatggaagtcatactttgagacatgtgtttgtgccttcatttatgctccatctaggaaccgccagatgctcttcgacggggagaagactcagtcagtaattcagtcttgtgatgttcgtccagttccattgactgttcatcgccccaccatgaaggaagcgaaacgggtatattgtaacctaacacaactctactatgagatggaatgttcaaccacagatgaaacactacctgatgctggaagtgtgaaaaatgttgaacaaggtcaaggaaaaaagaatgaagtgactgcagaccctggggaatctatttctgacttgtctgcccgtttggaattgttgaataagaatgaagcagcaaccataccatcatcaaagaacgaaacaacacctcttcatgaggcagcaaagtgtggcaatgctcagctgaccctggagttacttgagcagggtttggatccttgcgtaaaagatgcaagaggaaagacatcttattcgctggcttcagataaggaagttaggaatacattcagaagatttatggcgctcaatcttgacaaatgggactggcatgctgcagatgtgcctagtgcactaacaaaagaaatggaagaatcacaagctgcaaaacaaacaaggacgccaaaaggaaagcacgtgcaaaggaattgaagaaattaaaaaaagaaagagaaaaggaagaaaaggagaaggagaaggagaaggctaaggctcaagcatcacaatcacaatctgatgttaaaggcacttcgagcggccaaatggccaacagaactgcaactgcgccaggccttgtaccaaagcatcagacgccacagcaaatacttatagcaaaggaggaggaacgacagagaaaacaagctgaagaaagagagaagagagcagctgcagcagagagaagacttgcggctctcgctgtccaatctgccggaacgagcgcatcaggtgcagcagcaacaaactgctccgcgaagagggcggcaccagatgacaattcgtgttcgtgctgtttcggttccttggtcggcaaggtgccattccaccgatacaactacaaatactgcagcactacatgtatgcatcttcattcagaaatgctgcaggatgattaaggaaaccgcatgatgcgtgattttgatgcaattttacctcatatacaatcaataacaggctttcttccttcccttgtgcctgctttccgtaattttgtcgtgcacatcttcataactttaaaggttcgaaatcacattcgttctggttcgtgctaatgtttttgcttcattttggaacacattttatt

SEQ ID NO: 24281 - DNA, 2210 bp, Zea Mays
acaaaactcacgaaccgcacgccacccggaaggccggaacatcggatccacgctcccctttcgccgccaggttcctcctcctcctagatggcgccgctgccgctgccgctgccgccaccgtcagagaagaggccccctcgctcgctctttgaactcccctctgacttcttcgattcatccgttcttctccgggctcacccctccacggccccctccgcggtggaaccgtccgaaccctcccggccgccgccgactcagcagcagcaccaacaactttcagaggctgcggggtccaggtggacgtgcaacacatgtgcctccgagttcgagtcgctacaggagcagcgcgagcactttaagtctgacctgcaccgcctcaacgttaagttgagcatggctggtaaaactattataaaggaagaggacctagataaagcagattctgattctctgtttgatgatttggagatatctagtgtctctggttcagaggacgaacaagaaaatggacctgcatcagaacgtgtactctcggttaaaggcaaggaagaattcaggaagaaactttactttcgttgtgcatcgggtgaaatgatttctatctatagatgcatgctgttgaaagaacatgaagaaccattaattgattgtaagtctggtcagatggagaatgcatcttgtgtacaggaggaggagatgataaatagggtgaagtgtttggcttgtgaaccccgtgacacgtcacatttgagaattgttctactaacaagcggtgggcattttgctggatgtgtgtttgatggaaattctatcatagctcataaaacatttcataggtatgtcgtaagagcaaaggctggtaaaaggcaatctggaaaagatgctactggaaaagttgcacactcagcaggttcttctctacggcgctataatgaagcagcactgaaaaagatgctcttcgacggggagaagactcagtcagtaattcagtcttgtgatgttcgtccagttccattgactgttcatcgccccaccatgaaggaagcgaaacgggtatattgtaacctaacacaactctactatgagatggaatgttcaaccacagatgaaacactacctgatgctggaagtgtgaaaaatgttgaacaaggtcaaggaaaaaagaatgaagtgactgcagaccctggggaatctatttctgacttgtctgcccgtttggaattgttgaataagaatgaagcagcaaccataccatcatcaaagaacgaaacaacacctcttcatgaggcagcaaagtgtggcaatgctcagctgaccctggagttacttgagcagggtttggatccttgcgtaaaagatgcaagaggaaagacatcttattcgctggcttcagataaggaagttaggaatacattcagaagatttatggcgctcaatcttgacaaatgggactggcatgctgcagatgtgcctagtgcactaacaaaagaaatggaagaatcacaagctgcaaaacaagcagacaaggacgccaaaaggaaagcacgtgcaaaggaattgaagaaattaaaaaaagaaagagaaaaggaagaaaaggagaaggagaaggagaaggctaaggctcaagcatcacaatcacaatctgatgttaaaggcacttcgagcggccaaatggccaacagaactgcaactgcgccaggccttgtaccaaagcatcagacgccacagcaaatacttatagcaaaggaggaggaacgacagagaaaacaagctgaagaaagagagaagagagcagctgcagcagagagaagacttgcggctctcgctgtccaatctgccggaacgagcgcatcaggtgcagcagcaacaaactgctccgcgaagagggcggcaccagatgacaattcgtgttcgtgctgtttcggttccttggtcggcaaggtgccattccaccgatacaactacaaatactgcagcactacatgtatgcatcttcattcagaaatgctgcaggatgattaaggaaaccgcatgatgcgtgattttgatgcaattttacctcatatacaatcaataacaggctttcttccttcccttgtgcctgctttccgtaattttgtcgtgcacatcttcataactttaaaggttcgaaatcacattcgttctggttcgtgctaatgtttttgcttcattttggaacacattttatt

SEQ ID NO: 24282 - DNA, 2293 bp, Zea Mays
acaaaactcacgaaccgcacgccacccggaaggccggaacatcggatccacgctcccctttcgccgccaggttcctcctcctcctagatggcgccgctgccgctgccgctgccgccaccgtcagagaagaggccccctcgctcgctctttgaactcccctctgacttcttcgattcatccgttcttctccgggctcacccctccacggccccctccgcggtggaaccgtccgaaccctcccggccgccgccgactcagcagcagcaccaacaactttcagaggctgcggggtccaggtggacgtgcaacacatgtgcctccgagttcgagtcgctacaggagcagcgcgagcactttaagtctgacctgcaccgcctcaacgttaagttgagcatggctggtaaaactattataaaggaagaggacctagataaagcagattctgattctctgtttgatgatttggagatatctagtgtctctggttcagaggacgaacaagaaaatggacctgcatcagaacgtgtactctcggttaaaggcaaggaagaattcaggaagaaactttactttcgttgtgcatcgggtgaaatgatttctatctatagatgcatgctgttgaaagaacatgaagaaccattaattgattgtaagtctggtcagatggagaatgcatcttgtgtacaggaggaggagatgataaatagggtgaagtgtttggcttgtgaaccccgtgacacgtcacatttgagaattgttctactaacaagcggtgggcattttgctggatgtgtgtttgatggaaattctatcatagctcataaaacatttcataggtatgtcgtaagagcaaaggctggtaaaaggcaatctggaaaagatgctactggaaaagttgcacactcagcaggttcttctctacggcgctataatgaagcagcactgaaaaagttcaagaattaattgtttcatggaagtcatactttgagacatgtgtttgtgccttcatttatgctccatctaggaaccgccagatgctcttcgacggggagaagactcagtcagtaattcagtcttgtgatgttcgtccagttccattgactgttcatcgccccaccatgaaggaagcgaaacgggtatattgtaacctaacacaactctactatgagatggaatgttcaaccacagatgaaacactacctgatgctggaagtgtgaaaaatgttgaacaaggtcaaggaaaaaagaatgaagtgactgcagaccctggggaatctatttctgacttgtctgcccgtttggaattgttgaataagaatgaagcagcaaccataccatcatcaaagaacgaaacaacacctcttcatgaggcagcaaagtgtggcaatgctcagctgaccctggagttacttgagcagggtttggatccttgcgtaaaagatgcaagaggaaagacatcttattcgctggcttcagataaggaagttaggaatacattcagaagatttatggcgctcaatcttgacaaatgggactggcatgctgcagatgtgcctagtgcactaacaaaagaaatggaagaatcacaagctgcaaaacaagcagacaaggacgccaaaaggaaagcacgtgcaaaggaattgaagaaattaaaaaaagaaagagaaaaggaagaaaaggagaaggagaaggagaaggctaaggctcaagcatcacaatcacaatctgatgttaaaggcacttcgagcggccaaatggccaacagaactgcaactgcgccaggccttgtaccaaagcatcagacgccacagcaaatacttatagcaaaggaggaggaacgacagagaaaacaagctgaagaaagagagaagagagcagctgcagcagagagaagacttgcggctctcgctgtccaatctgccggaacgagcgcatcaggtgcagcagcaacaaactgctccgcgaagagggcggcaccagatgacaattcgtgttcgtgctgtttcggttccttggtcggcaaggtgccattccaccgatacaactacaaatactgcagcactacatgtatgcatcttcattcagaaatgctgcaggatgattaaggaaaccgcatgatgcgtgattttgatgcaattttacctcatatacaatcaataacaggctttcttccttcccttgtgcctgctttccgtaattttgtcgtgcacatcttcataactttaaaggttcgaaatcacattcgttctggttcgtgctaatgtttttgcttcattttggaacacattttatt

SEQ ID NO: 24283 - DNA, 2176 bp, Zea Mays
cacaaaactcacgaaccgcacgccacccggaaggccggaacatcggatccacgctcccctttcgccgccaggttcctcctcctcctagatggcgccgctgccgctgccgctgccgccaccgtcagagaagaggccccctcgctcgctctttgaactcccctctgacttcttcgattcatccgttcttctccgggctcacccctccacggccccctccgcggtggaaccgtccgaaccctcccggccgccgccgactcagcagcagcaccaacaactttcagaggctgcggggtccaggtggacgtgcaacacatgtgcctccgagttcgagtcgctacaggagcagcgcgagcactttaagtctgacctgcaccgcctcaacgttaagttgagcatggctggtaaaactattataaaggaagaggacctagataaagcagattctgattctctgtttgatgatttggagatatctagtgtctctggttcagaggacgaacaagaaaatggacctgcatcagaacgtgtactctcggttaaagatggagaatgcatcttgtgtacaggaggaggagatgataaatagggtgaagtgtttggcttgtgaaccccgtgacacgtcacatttgagaattgttctactaacaagcggtgggcattttgctggatgtgtgtttgatggaaattctatcatagctcataaaacatttcataggtatgtcgtaagagcaaaggctggtaaaaggcaatctggaaaagatgctactggaaaagttgcacactcagcaggttcttctctacggcgctataatgaagcagcactgaaaaaggaagttcaagaattaattgtttcatggaagtcatactttgagacatgtgtttgtgccttcatttatgctccatctaggaaccgccagatgctcttcgacggggagaagactcagtcagtaattcagtcttgtgatgttcgtccagttccattgactgttcatcgccccaccatgaaggaagcgaaacgggtatattgtaacctaacacaactctactatgagatggaatgttcaaccacagatgaaacactacctgatgctggaagtgtgaaaaatgttgaacaaggtcaaggaaaaaagaatgaagtgactgcagaccctggggaatctatttctgacttgtctgcccgtttggaattgttgaataagaatgaagcagcaaccataccatcatcaaagaacgaaacaacacctcttcatgaggcagcaaagtgtggcaatgctcagctgaccctggagttacttgagcagggtttggatccttgcgtaaaagatgcaagaggaaagacatcttattcgctggcttcagataaggaagttaggaatacattcagaagatttatggcgctcaatcttgacaaatgggactggcatgctgcagatgtgcctagtgcactaacaaaagaaatggaagaatcacaagctgcaaaacaagcagacaaggacgccaaaaggaaagcacgtgcaaaggaattgaagaaattaaaaaaagaaagagaaaaggaagaaaaggagaaggagaaggagaaggctaaggctcaagcatcacaatcacaatctgatgttaaaggcacttcgagcggccaaatggccaacagaactgcaactgcgccaggccttgtaccaaagcatcagacgccacagcaaatacttatagcaaaggaggaggaacgacagagaaaacaagctgaagaaagagagaagagagcagctgcagcagagagaagacttgcggctctcgctgtccaatctgccggaacgagcgcatcaggtgcagcagcaacaaactgctccgcgaagagggcggcaccagatgacaattcgtgttcgtgctgtttcggttccttggtcggcaaggtgccattccaccgatacaactacaaatactgcagcactacatgtatgcatcttcattcagaaatgctgcaggatgattaaggaaaccgcatgatgcgtgattttgatgcaattttacctcatatacaatcaataacaggctttcttccttcccttgtgcctgctttccgtaattttgtcgtgcacatcttcataactttaaaggttcgaaatcacattcgttctggttcgtgctaatgtttttgcttcattttggaacacattttatt

SEQ ID NO: 24284 - DNA, 1847 bp, Zea Mays
agctcacaaaactcacgaaccgcacgccacccggaaggccggaacatcggatccacgctcccctttcgccgccaggttcctcctcctcctagatggcgccgctgccgctgccgctgccgccaccgtcagagaagaggccccctcgctcgctctttgaactcccctctgacttcttcgattcatccgttcttctccgggctcacccctccacggccccctccgcggtggaaccgtccgaaccctcccggccgccgccgactcagcagcagcaccaacaactttcagaggctgcggggtccaggtggacgtgcaacacatgtgcctccgagttcgagtcgctacaggagcagcgcgagcactttaagtctgacctgcaccgcctcaacgtatgtcgtaagagcaaaggctggtaaaaggcaatctggaaaagatgctactggaaaagttgcacactcagcaggttcttctctacggcgctataatgaagcagcactgaaaaaggaagttcaagaattaattgtttcatggaagtcatactttgagacatgtgtttgtgccttcatttatgctccatctaggaaccgccagatgctcttcgacggggagaagactcagtcagtaattcagtcttgtgatgttcgtccagttccattgactgttcatcgccccaccatgaaggaagcgaaacgggtatattgtaacctaacacaactctactatgagatggaatgttcaaccacagatgaaacactacctgatgctggaagtgtgaaaaatgttgaacaaggtcaaggaaaaaagaatgaagtgactgcagaccctggggaatctatttctgacttgtctgcccgtttggaattgttgaataagaatgaagcagcaaccataccatcatcaaagaacgaaacaacacctcttcatgaggcagcaaagtgtggcaatgctcagctgaccctggagttacttgagcagggtttggatccttgcgtaaaagatgcaagaggaaagacatcttattcgctggcttcagataaggaagttaggaatacattcagaagatttatggcgctcaatcttgacaaatgggactggcatgctgcagatgtgcctagtgcactaacaaaagaaatggaagaatcacaagctgcaaaacaagcagacaaggacgccaaaaggaaagcacgtgcaaaggaattgaagaaattaaaaaaagaaagagaaaaggaagaaaaggagaaggagaaggagaaggctaaggctcaagcatcacaatcacaatctgatgttaaaggcacttcgagcggccaaatggccaacagaactgcaactgcgccaggccttgtaccaaagcatcagacgccacagcaaatacttatagcaaaggaggaggaacgacagagaaaacaagctgaagaaagagagaagagagcagctgcagcagagagaagacttgcggctctcgctgtccaatctgccggaacgagcgcatcaggtgcagcagcaacaaactgctccgcgaagagggcggcaccagatgacaattcgtgttcgtgctgtttcggttccttggtcggcaaggtgccattccaccgatacaactacaaatactgcagcactacatgtatgcatcttcattcagaaatgctgcaggatgattaaggaaaccgcatgatgcgtgattttgatgcaattttacctcatatacaatcaataacaggctttcttccttcccttgtgcctgctttccgtaattttgtcgtgcacatcttcataactttaaaggttcgaaatcacattcgttctggttcgtgctaatgtttttgcttcattttggaacacattttatt

SEQ ID NO: 24285 - DNA, 2333 bp, Zea Mays
agctcacaaaactcacgaaccgcacgccacccggaaggccggaacatcggatccacgctcccctttcgccgccaggttcctcctcctcctagatggcgccgctgccgctgccgctgccgccaccgtcagagaagaggccccctcgctcgctctttgaactcccctctgacttcttcgattcatccgttcttctccgggctcacccctccacggccccctccgcggtggaaccgtccgaaccctcccggccgccgccgactcagcagcagcaccaacaactttcagaggctgcggggtccaggtggacgtgcaacacatgtgcctccgagttcgagtcgctacaggagcagcgcgagcactttaagtctgacctgcaccgcctcaacgttaagttgagcatggctggtaaaactattataaaggaagaggacctagataaagcagattctgattctctgtttgatgatttggagatatctagtgtctctggttcagaggacgaacaagaaaatggacctgcatcagaacgtgtactctcggttaaaggcaaggaagaattcaggaagaaactttactttcgttgtgcatcgggtgaaatgatttctatctatagatgcatgctgttgaaagaacatgaagaaccattaattgattgtaagtctggtcagatggagaatgcatcttgtgtacaggaggaggagatgataaatagggtgaagtgtttggcttgtgaaccccgtgacacgtcacatttgagaattgttctactaacaagcggtgggcattttgctggatgtgtgtttgatggaaattctatcatagctcataaaacatttcataggtatgtcgtaagagcaaaggctggtaaaaggcaatctggaaaagatgctactggaaaagttgcacactcagcaggttcttctctacggcgctataatgaagcagcactgaaaaaggtgtctttcgtttttgtttgccttattgcaggaagttcaagaattaattgtttcatggaagtcatactttgagacatgtgtttgtgccttcatttatgctccatctaggaaccgccagatgctcttcgacggggagaagactcagtcagtaattcagtcttgtgatgttcgtccagttccattgactgttcatcgccccaccatgaaggaagcgaaacgggtatattgtaacctaacacaactctactatgagatggaatgttcaaccacagatgaaacactacctgatgctggaagtgtgaaaaatgttgaacaaggtcaaggaaaaaagaatgaagtgactgcagaccctggggaatctatttctgacttgtctgcccgtttggaattgttgaataagaatgaagcagcaaccataccatcatcaaagaacgaaacaacacctcttcatgaggcagcaaagtgtggcaatgctcagctgaccctggagttacttgagcagggtttggatccttgcgtaaaagatgcaagaggaaagacatcttattcgctggcttcagataaggaagttaggaatacattcagaagatttatggcgctcaatcttgacaaatgggactggcatgctgcagatgtgcctagtgcactaacaaaagaaatggaagaatcacaagctgcaaaacaagcagacaaggacgccaaaaggaaagcacgtgcaaaggaattgaagaaattaaaaaaagaaagagaaaaggaagaaaaggagaaggagaaggagaaggctaaggctcaagcatcacaatcacaatctgatgttaaaggcacttcgagcggccaaatggccaacagaactgcaactgcgccaggccttgtaccaaagcatcagacgccacagcaaatacttatagcaaaggaggaggaacgacagagaaaacaagctgaagaaagagagaagagagcagctgcagcagagagaagacttgcggctctcgctgtccaatctgccggaacgagcgcatcaggtgcagcagcaacaaactgctccgcgaagagggcggcaccagatgacaattcgtgttcgtgctgtttcggttccttggtcggcaaggtgccattccaccgatacaactacaaatactgcagcactacatgtatgcatcttcattcagaaatgctgcaggatgattaaggaaaccgcatgatgcgtgattttgatgcaattttacctcatatacaatcaataacaggctttcttccttcccttgtgcctgctttccgtaattttgtcgtgcacatcttcataactttaaaggttcgaaatcacattcgttctggttcgtgctaatgtttttgcttcattttggaacacattttatt

SEQ ID NO: 24286 - DNA, 2706 bp, Zea Mays
cagactcacagctcacaaaactcacgaaccgcacgccacccggaaggccggaacatcggatccacgctcccctttcgccgccaggttcctcctcctcctagatggcgccgctgccgctgccgctgccgccaccgtcagagaagaggccccctcgctcgctctttgaactcccctctgacttcttcgattcatccgttcttctccgggctcacccctccacggccccctccgcggtggaaccgtccgaaccctcccggccgccgccgactcagcagcagcaccaacaactttcagaggctgcggggtccaggtggacgtgcaacacatgtgcctccgagttcgagtcgctacaggagcagcgcgagcactttaagtctgacctgcaccgcctcaacgttaagttgagcatggctggtaaaactattataaaggaagaggacctagataaagcagattctgattctctgtttgatgatttggagatatctagtgtctctggttcagaggacgaacaagaaaatggacctgcatcagaacgtgtactctcggttaaaggcaaggaagaattcaggaagaaactttactttcgttgtgcatcgggtgaaatgatttctatctatagatgcatgctgttgaaagaacatgaagaaccattaattgattgtaagtctggtcagatggagaatgcatcttgtgtacaggaggaggagatgataaatagggtgaagtgtttggcttgtgaaccccgtgacacgtcacatttgagaattgttctactaacaagcggtgggcattttgctggatgtgtgtttgatggaaattctatcatagctcataaaacatttcataggtaacggcattaccagtttcaacttttatgcataagaacttgtgagtcatattgcattattacttgtaacttgattaacctttgaatctcaggtgacagcagcgttctattatgtgctagcagtacgcagccagtaaaaatgagtcttttgagtgccgcaaaaagcttctactttcctgtgtcaatgtaaatataattgtgaatcttgctatcaacaaaattgacttcctacttccacttttgtgtttagtaacatttttttttggcttatggacaatagttttagctttgtggctagctagattgactgctttgttgcccgtaccttttactgtagatactttgttttcgatgttagtggcaatttgttcttatttggccatacatttctttaggtatgtcgtaagagcaaaggctggtaaaaggcaatctggaaaagatgctactggaaaagttgcacactcagcaggttcttctctacggcgctataatgaagcagcactgaaaaaggaagttcaagaattaattgtttcatggaagtcatactttgagacatgtgtttgtgccttcatttatgctccatctaggaaccgccagatgctcttcgacggggagaagactcagtcagtaattcagtcttgtgatgttcgtccagttccattgactgttcatcgccccaccatgaaggaagcgaaacgggtatattgtaacctaacacaactctactatgagatggaatgttcaaccacagatgaaacactacctgatgctggaagtgtgaaaaatgttgaacaaggtcaaggaaaaaagaatgaagtgactgcagaccctggggaatctatttctgacttgtctgcccgtttggaattgttgaataagaatgaagcagcaaccataccatcatcaaagaacgaaacaacacctcttcatgaggcagcaaagtgtggcaatgctcagctgaccctggagttacttgagcagggtttggatccttgcgtaaaagatgcaagaggaaagacatcttattcgctggcttcagataaggaagttaggaatacattcagaagatttatggcgctcaatcttgacaaatgggactggcatgctgcagatgtgcctagtgcactaacaaaagaaatggaagaatcacaagctgcaaaacaagcagacaaggacgccaaaaggaaagcacgtgcaaaggaattgaagaaattaaaaaaagaaagagaaaaggaagaaaaggagaaggagaaggagaaggctaaggctcaagcatcacaatcacaatctgatgttaaaggcacttcgagcggccaaatggccaacagaactgcaactgcgccaggccttgtaccaaagcatcagacgccacagcaaatacttatagcaaaggaggaggaacgacagagaaaacaagctgaagaaagagagaagagagcagctgcagcagagagaagacttgcggctctcgctgtccaatctgccggaacgagcgcatcaggtgcagcagcaacaaactgctccgcgaagagggcggcaccagatgacaattcgtgttcgtgctgtttcggttccttggtcggcaaggtgccattccaccgatacaactacaaatactgcagcactacatgtatgcatcttcattcagaaatgctgcaggatgattaaggaaaccgcatgatgcgtgattttgatgcaattttacctcatatacaatcaataacaggctttcttccttcccttgtgcctgctttccgtaattttgtcgtgcacatcttcataactttaaaggttcgaaatcacattcgttctggttcgtgctaatgtttttgcttcattttggaacacattttatt

SEQ ID NO: 24287 - DNA, 2270 bp, Zea Mays
cagactcacagctcacaaaactcacgaaccgcacgccacccggaaggccggaacatcggatccacgctcccctttcgccgccaggttcctcctcctcctagatggcgccgctgccgctgccgctgccgccaccgtcagagaagaggccccctcgctcgctctttgaactcccctctgacttcttcgattcatccgttcttctccgggctcacccctccacggccccctccgcggtggaaccgtccgaaccctcccggccgccgccgactcagcagcagcaccaacaactttcagaggctgcggggtccaggtggacgtgcaacacatgtgcctccgagttcgagtcgctacaggagcagcgcgagcactttaagtctgacctgcaccgcctcaacgttaagttgagcatggctggtaaaactattataaaggaagaggacctagataaagcagattctgattctctgtttgatgatttggagatatctagtgtctctggttcagaggacgaacaagaaaatggacctgcatcagaacgtgtactctcggttaaaggcaaggaagaattcaggaagaaactttactttcgttgtgcatcgggtgaaatgatttctatctatagatgcatgctgttgaaagaacatgaagaaccattaattgattgtaagtctggtcagatggagaatgcatcttgtgtacaggaggaggagatgataaatagggtgaagtgtttggcttgtgaaccccgtgacacgtcacatttgagaattgttctactaacaagcggtgggcattttgctggatgtgtgtttgatggaaattctatcatagctcataaaacatttcataggtatgtcgtaagagcaaaggctggtaaaaggcaatctggaaaagatgctactggaaaagttgcacactcagcaggaagttcaagaattaattgtttcatggaagtcatactttgagacatgtgtttgtgccttcatttatgctccatctaggaaccgccagatgctcttcgacggggagaagactcagtcagtaattcagtcttgtgatgttcgtccagttccattgactgttcatcgccccaccatgaaggaagcgaaacgggtatattgtaacctaacacaactctactatgagatggaatgttcaaccacagatgaaacactacctgatgctggaagtgtgaaaaatgttgaacaaggtcaaggaaaaaagaatgaagtgactgcagaccctggggaatctatttctgacttgtctgcccgtttggaattgttgaataagaatgaagcagcaaccataccatcatcaaagaacgaaacaacacctcttcatgaggcagcaaagtgtggcaatgctcagctgaccctggagttacttgagcagggtttggatccttgcgtaaaagatgcaagaggaaagacatcttattcgctggcttcagataaggaagttaggaatacattcagaagatttatggcgctcaatcttgacaaatgggactggcatgctgcagatgtgcctagtgcactaacaaaagaaatggaagaatcacaagctgcaaaacaagcagacaaggacgccaaaaggaaagcacgtgcaaaggaattgaagaaattaaaaaaagaaagagaaaaggaagaaaaggagaaggagaaggagaaggctaaggctcaagcatcacaatcacaatctgatgttaaaggcacttcgagcggccaaatggccaacagaactgcaactgcgccaggccttgtaccaaagcatcagacgccacagcaaatacttatagcaaaggaggaggaacgacagagaaaacaagctgaagaaagagagaagagagcagctgcagcagagagaagacttgcggctctcgctgtccaatctgccggaacgagcgcatcaggtgcagcagcaacaaactgctccgcgaagagggcggcaccagatgacaattcgtgttcgtgctgtttcggttccttggtcggcaaggtgccattccaccgatacaactacaaatactgcagcactacatgtatgcatcttcattcagaaatgctgcaggatgattaaggaaaccgcatgatgcgtgattttgatgcaattttacctcatatacaatcaataacaggctttcttccttcccttgtgcctgctttccgtaattttgtcgtgcacatcttcataactttaaaggttcgaaatcacattcgttctggttcgtgctaatgtttttgcttcattttggaacacattttatt

SEQ ID NO: 24288 - DNA, 2179 bp, Zea Mays
ctagtaagtagtcacagactcacagctcacaaaactcacgaaccgcacgccacccggaaggccggaacatcggatccacgctcccctttcgccgccaggttcctcctcctcctagatggcgccgctgccgctgccgctgccgccaccgtcagagaagaggccccctcgctcgctctttgaactcccctctgacttcttcgattcatccgttcttctccgggctcacccctccacggccccctccgcggtggaaccgtccgaaccctcccggccgccgccgactcagcagcagcaccaacaactttcagaggctgcggggtccaggtggacgtgcaacacatgtgcctccgagttcgagtcgctacaggagcagcgcgagcactttaagtctgacctgcaccgcctcaacgttaagttgagcatggctggtaaaactattataaaggaagaggacctagataaagcagattctgattctctgtttgatgatttggagatatctagtgtctctggttcagaggacgaacaagaaaatggacctgcatcagaacgtgtactctcggttaaaggaggaggagatgataaatagggtgaagtgtttggcttgtgaaccccgtgacacgtcacatttgagaattgttctactaacaagcggtgggcattttgctggatgtgtgtttgatggaaattctatcatagctcataaaacatttcataggtatgtcgtaagagcaaaggctggtaaaaggcaatctggaaaagatgctactggaaaagttgcacactcagcaggttcttctctacggcgctataatgaagcagcactgaaaaaggaagttcaagaattaattgtttcatggaagtcatactttgagacatgtgtttgtgccttcatttatgctccatctaggaaccgccagatgctcttcgacggggagaagactcagtcagtaattcagtcttgtgatgttcgtccagttccattgactgttcatcgccccaccatgaaggaagcgaaacgggtatattgtaacctaacacaactctactatgagatggaatgttcaaccacagatgaaacactacctgatgctggaagtgtgaaaaatgttgaacaaggtcaaggaaaaaagaatgaagtgactgcagaccctggggaatctatttctgacttgtctgcccgtttggaattgttgaataagaatgaagcagcaaccataccatcatcaaagaacgaaacaacacctcttcatgaggcagcaaagtgtggcaatgctcagctgaccctggagttacttgagcagggtttggatccttgcgtaaaagatgcaagaggaaagacatcttattcgctggcttcagataaggaagttaggaatacattcagaagatttatggcgctcaatcttgacaaatgggactggcatgctgcagatgtgcctagtgcactaacaaaagaaatggaagaatcacaagctgcaaaacaagcagacaaggacgccaaaaggaaagcacgtgcaaaggaattgaagaaattaaaaaaagaaagagaaaaggaagaaaaggagaaggagaaggagaaggctaaggctcaagcatcacaatcacaatctgatgttaaaggcacttcgagcggccaaatggccaacagaactgcaactgcgccaggccttgtaccaaagcatcagacgccacagcaaatacttatagcaaaggaggaggaacgacagagaaaacaagctgaagaaagagagaagagagcagctgcagcagagagaagacttgcggctctcgctgtccaatctgccggaacgagcgcatcaggtgcagcagcaacaaactgctccgcgaagagggcggcaccagatgacaattcgtgttcgtgctgtttcggttccttggtcggcaaggtgccattccaccgatacaactacaaatactgcagcactacatgtatgcatcttcattcagaaatgctgcaggatgattaaggaaaccgcatgatgcgtgattttgatgcaattttacctcatatacaatcaataacaggctttcttccttcccttgtgcctgctttccgtaattttgtcgtgcacatcttcataactttaaaggttcgaaatcacattcgttctggttcgtgctaatgtttttgcttcattttggaacacattttatt

SEQ ID NO: 24289 - DNA, 2483 bp, Zea Mays
cttcggtgccactgcagtgtgcagtgcagagcgcgaggcagacgcaggacacgttcctctcatgtctcatcatcccgtccatggcatcgccgaacaaaccgtgacggaaagccgccgctgttctttcccgtttcttcactagtttactggcaaaagacaacagtccgtcccccagcgcagcaccacgatctccatcccccaatcctgcgcctccgccttaccacgccgcacgttctggtccccgtaccgccggtgcgctcctgggccctggcacgcggatcgcctcaaccaaatcgacactcgcgctgacgcgcgatcccgctccctctagttaaactctggatcgactcgcccccgtcgccgccctcatggcactggttcgccccgagcatccaaatccggcagcccgtcgcccgcggctcgtcgtgctcctcctgctcgccttcttcgcccttcagctcctcgtcttcgtcgccttccgcgcagtgcgcccccctcccgccccaccctccgcctccgccgccgccgtgccggtgctggcgtcggtgccgacgcaccgagacgagaacgattcgcgctgcggtggcggcctcgtgtacgtttacgacctccccgaggccttcaacgaggacctgctcgggatgtgcgacgcgctggcgccgatgtactcgctgtgcccctatctcgccaacgacgggctcgggttccctgcgggcgggaccaacctgtcgtcgctcctgccgcggcagctgctcgggtcgtggtacgcgtccgaccagttcgcgctggagcacatcgtgcaccgccgcctgctctcccaccgctgccgcacgacggacccggggcgcgccgcggcgttcttcgtgccattctacgcggggctcgccgtgggccgccacctgtgggcggccaacgccaccggcgctgacagggacagggactgcgtcgcgctgctgtcgtggctacacgcgcagccgtggtaccggcggtcccacggctgggaccacttcatcgcgctcggccgcatcacgtgggacttccgccgcacgacggacgccgggtggggcggcagcttcctcaccatgcccggggtggccaacatcacccgcctcgtcatcgagcgcgacccctgggacggcatggatgtcggcattccgtacccgaccgggttccacccgcgcaccgccgccgacgtgcgcgcgtggcagcggtacgtcgcgcggcgcccgcgccccaggctcttcgccttcgccggcgcgccgcggtcggccatcaagggcgacttccgcgcgctgctgctggaggagtgccaggcggctggggcctgcggcgcgctggactgcgccgagggcaggtgcatcaagaacaacgcgctcgtcatggagctcttcatgggcgccaggttctgcctgcagccgcgcggggacagcttcacgcggcggtcgctgttcgactgcctggtggcgggcgccgtccccgtgctgttctggcggcggagcgcgtacctgcagtacgggtggtacctgcccgtggacgggcgcgagggggagtggtccgtgttcatcgaccgcgaccagctccgcgcggggaacctcacggtgcgcggcgtgctggcggatatcccggagtcgcgggtgcggctgatgcggaagcgcgtggtgaagatgatcccggggcttgtgtactccgcggcgggcgtggagggcatcggtggcggcatgaaggacgccgtggacgtcatggtcgatggcatgctgcggcgggtcgctgagcagcgcccgagatggcggacgacgtgattttagcttctgcaacagagcaaattgatcattcattttttactggggtttttccacaaaaaaaaaactacactttactcgagtgttccaacactcgatttttttttctttctcttctcttcttcctatctctcttttctccatcttaagcgagtttagaagaaattatgtgctatccctctctttcctccatcttgagtaagtttagaagaaattctgggaagacgagcagatcagacgatgggagaaaaggcggcgaggcggaatcgacgatgacgccatcaaagcggacggaggaggcggccagctctaaaacgacgacaaggaagcagaaaagggaggtcaccgctgataccataggatttcatcggagttccgtcctccgtgtcaaaagaaggaagatgagaagaagaaaaaaaatcaaacgtgaaaagagctcaaaacaaactctcggaatgagatatagagatatattcttttttttccttccaaattctttgtgggatgctgcggctctagctgtaaatttgaactcattacaacagaatcagagagtgtgaatccgtgtacgatgaactgcatgctcgtgagtcgtgactcagctgcagattgggcgccgtgagtgttgaagtttgtaccagttgacgggctacatacaattaattttggtactataatcttttc

SEQ ID NO: 24290 - DNA, 1458 bp, Zea Mays
aggtgctctgactttactagaggcatagaatcttctgttttccacgatgagatgctcttgcgctgctaggtgattgcgacggaattcatggtggacatgaaatgtgagggatgtgtaacagctgtgaaaaacaagctgcaaactcttgaaggaataaaaaacattgaggtggacttgtctaaccaagtcgttagagttttggggtctcttccagtgaagacaatgttagatgcccttcatcaaacaggtcgagatgcacgactgattggccaagggaacccaaatgatttcttagtttctgctgctgtagctgagtttaaagggcctgttgtatttggtgttgttcgtctggcccaagtaaacatggagttggctagagttgaagccacgtttagtggtctatcacctggtaaacatggatggtcaataaatcagtttggggatttgacaagaggtgcagaaagcactggcaatgtctataatccgccagatcatttatctgataagccacttggtgacctgggaacactagaagctggagagaacggggaagcccatttctcaggaccgaaggagaaattgagagtggttgacttgatcggccgctctattgctttgtatgcaaccgaggacagatcagaccctggcattgccgcagccgtgattgcaagaagcgccggggtaggagagaactacaagaaactctgcacttgtgatggtgtcaccatttgggaatcaagctaaacctgctaccagcgaattttccatactatttacttccgtatgttgtacacacacattaacgtagaaacaatcaaagtggcaactgaacatttggaataagcttgaatacattgaggaataaaggctgttctcatgtggagcttggacagtattttttttgcgtcggttagtggacctgttctgcttctgccgctgcgacacaacagatctctggtttgattacccaaaggttcctgctccattgcttgcttggctaaacgcacagtacacaaacgaagttcacattggtggcagccatgtgaggacgagggggctccggacgacgtggacgccagccaggacgccgtggctccacctttgaactctgtaacctaaccttgacacggtaatggtagtatggtacgtcgaggacgacggacccgacgttcgtcacggtgcgacgcaccgtcagcgcagcagatggccggataattcaagtcaccaggcgagctgaaggtgtgcttgcatgtcttgctcgagttcttggtgaaggacctgagctgcaacggcgtcaggttctccacgcagaggaactgcaggtagtcgtcctggaccatatcgtagaccaggccagacttgagaacacgcagctagcgggcgtatgtggccagctccgtgatcgaacggcgtggacgccttgcagttgcaggtggccgcgtcgttcagcgcagccac

SEQ ID NO: 24291 - DNA, 3233 bp, Zea Mays
cagaatcagaagttcagaaccaaaactggtagtatcaatagcagtatcaatagcaatctagcacttgtcaacctaaccgattcccatccaaccaaccccgcacaccgccgcgggaagcagaagagactggaagagcctacaaaagcttgggggcgcggcagcacaacgcaggatggtgggcttcctccgggccttcgccgccgcttccgctgtgcccgcagcagctgccgcagcctatgctctcttttcatcctccgccccttcctcctccaagctccgcttccctcttcctgactccttcctctccgccgccgcctcctcgacctccgggcgcgctcccaacgccgtgcccccgatggccaccgccgctgccacggctgatctctcggctgccgatgataagcagcgggactcggcgcttccggagctcacggtaggtgctctgactttactagaggcatagaatcttctgttttccacgatgagatgctcttgcgctgctaggtgattgcggtaagctgaattagttttgaaggactagtttgaattggtggttgagaggtggaaaatcgaatatatcaattctgtatctaggtttaaatagcttgagatcttggtccgagtgtggtggtatgttcaattcaatggtgctgtaggtggtataattgattggctagattgtttcttcttttctgcagttagtggatgtttttccaatttgtagagctagtaatccactagtgtgcgttagcggtatcctatcatctcatctagctatttagaagaaagaggagttgcatcagtgaattttggttgcatctgcagatgttgtgctaaagatcatgtctgtcttcatgacacattaagatatttgatttataaaaggtatcagcaccagtaatgaatctatcctttgatttgatttctccctgctgccagaagatggctacaagggattaagtaaattgtggatatgggaggtctttgaggagccactatctgatcttcagatcgtgcctttgacaggggcattcaattttactgtgaactaatgacaaaatttcagtatggaagtcagatggtaggtagcataaatcatccaaacacttatatttttcttggacatgtgttacaccatttggatggtatgaggtatcagctccaaattgtctggcttgctatgtcatattaataaagggccataacttagcaccaataactaaagggcattataattttctccaagcaagataagatcttgtgtgcagaagtgatgtattagattcggtaactcgggaactaagttatgtacttcgggagcatatcgtaaactgtgattgttctattttgaaaataattttctggcatgtgggtacttggtgaactcctaaataaattgggttctattgtactgtagaattcctttgaaatatggtctagaaaggcaaggcaacatattcgttttgtaaagggggtagacgtagacctagtgccggaggctcccacatgagtggggtctgagagggataaaccgaggcatgccttctccctgcaagtgtggagaggcttctttgaacccttgatctggtgactcagtgagacaactctcaccgttgcatcgggtctgcctttcaatatattcattttgtatttttttaaaaaaaatatatgaactaggcaatatgtagtctttgtggctcaacattctatgtggcttgttttgttgcacactatgttgatagaaacatcacgtgctggttcacttcatgattctttgtgcattttctttagaaattgtttatgtcccaatgaaacgagttagttaataatcttgtgcttgatatgatctgaagacggaattcatggtggacatgaaatgtgagggatgtgtaacagctgtgaaaaacaagctgcaaactcttgaaggaataaaaaacattgaggtggacttgtctaaccaagtcgttagagttttggggtctcttccagtgaagacaatgttagatgcccttcatcaaacaggtcgagatgcacgactgattggccaagggaacccaaatgatttcttagtttctgctgctgtagctgagtttaaagggcctgttgtatttggtgttgttcgtctggcccaagtaaacatggagttggctagagttgaagccacgtttagtggtctatcacctggtaaacatggatggtcaataaatcagtttggggatttgacaagaggtgcagaaagcactggcaatgtctataatccgccagatcatttatctgataagccacttggtgacctgggaacactagaagctggagagaacggggaagcccatttctcaggaccgaaggagaaattgagagtggttgacttgatcggccgctctattgctttgtatgcaaccgaggacagatcagaccctggcattgccgcagccgtgattgcaagaagcgccggggtaggagagaactacaagaaactctgcacttgtgatggtgtcaccatttgggaatcaagctaaacctgctaccagcgaattttccatactatttacttccgtatgttgtacacacacattaacgtagaaacaatcaaagtggcaactgaacatttggaataagcttgaatacattgaggaataaaggctgttctcatgtggagcttggacagtattttttttgcgtcggttagtggacctgttctgcttctgccgctgcgacacaacagatctctggtttgattacccaaaggttcctgctccattgcttgcttggctaaacgcacagtacacaaacgaagttcacattggtggcagccatgtgaggacgagggggctccggacgacgtggacgccagccaggacgccgtggctccacctttgaactctgtaacctaaccttgacacggtaatggtagtatggtacgtcgaggacgacggacccgacgttcgtcacggtgcgacgcaccgtcagcgcagcagatggccggataattcaagtcaccaggcgagctgaaggtgtgcttgcatgtcttgctcgagttcttggtgaaggacctgagctgcaacggcgtcaggttctccacgcagaggaactgcaggtagtcgtcctggaccatatcgtagaccaggccagacttgagaacacgcagctagcgggcgtatgtggccagctccgtgatcgaacggcgtggacgccttgcagttgcaggtggccgcgtcgttcagcgcagccac

SEQ ID NO: 24292 - DNA, 1792 bp, Zea Mays
ccaagttcaagttcagttcagaatcagaagttcagaaccaaaactggtagtatcaatagcagtatcaatagcaatctagcacttgtcaacctaaccgattcccatccaaccaaccccgcacaccgccgcgggaagcagaagagactggaagagcctacaaaagcttgggggcgcggcagcacaacgcaggatggtgggcttcctccgggccttcgccgccgcttccgctgtgcccgcagcagctgccgcagcctatgctctcttttcatcctccgccccttcctcctccaagctccgcttccctcttcctgactccttcctctccgccgccgcctcctcgacctccgggcgcgctcccaacgccgtgcccccgatggccaccgccgctgccacggctgatctctcggctgccgatgataagcagcgggactcggcgcttccggagctcacgacggaattcatggtggacatgaaatgtgagggatgtgtaacagctgtgaaaaacaagctgcaaactcttgaaggaataaaaaacattgaggtggacttgtctaaccaagtcgttagagttttggggtctcttccagtgaagacaatgttagatgcccttcatcaaacagatttcttagtttctgctgctgtagctgagtttaaagggcctgttgtatttggtgttgttcgtctggcccaagtaaacatggagttggctagagttgaagccacgtttagtggtctatcacctggtaaacatggatggtcaataaatcagtttggggatttgacaagaggtgcagaaagcactggcaatgtctataatccgccagatcatttatctgataagccacttggtgacctgggaacactagaagctggagagaacggggaagcccatttctcaggaccgaaggagaaattgagagtggttgacttgatcggccgctctattgctttgtatgcaaccgaggacagatcagaccctggcattgccgcagccgtgattgcaagaagcgccggggtaggagagaactacaagaaactctgcacttgtgatggtgtcaccatttgggaatcaagctaaacctgctaccagcgaattttccatactatttacttccgtatgttgtacacacacattaacgtagaaacaatcaaagtggcaactgaacatttggaataagcttgaatacattgaggaataaaggctgttctcatgtggagcttggacagtattttttttgcgtcggttagtggacctgttctgcttctgccgctgcgacacaacagatctctggtttgattacccaaaggttcctgctccattgcttgcttggctaaacgcacagtacacaaacgaagttcacattggtggcagccatgtgaggacgagggggctccggacgacgtggacgccagccaggacgccgtggctccacctttgaactctgtaacctaaccttgacacggtaatggtagtatggtacgtcgaggacgacggacccgacgttcgtcacggtgcgacgcaccgtcagcgcagcagatggccggataattcaagtcaccaggcgagctgaaggtgtgcttgcatgtcttgctcgagttcttggtgaaggacctgagctgcaacggcgtcaggttctccacgcagaggaactgcaggtagtcgtcctggaccatatcgtagaccaggccagacttgagaacacgcagctagcgggcgtatgtggccagctccgtgatcgaacggcgtggacgccttgcagttgcaggtggccgcgtcgttcagcgcagccac

SEQ ID NO: 24293 - DNA, 605 bp, Zea Mays
gtcaagataagagaggaaagaactcattgtttacatgatcaggaaatggaatgcctaagctgtccagtttcagggcttctctttcttggcagggaagcatgagatgccatagctctctgctctcttcaaccctctgccaaaggagagttgccctgtaacaggactcagcttatggttcacgattgtaaagacagattcaagcttacactgcagcttagtgttgtaccggcctatggtggtgcaagtggtgtagatgaccagcgattaccttctgacgcgcgccaggatcagtggtcgtcggtatgggtatccgacggcggctgatggccttcagcttgaggacgtgaccgagatccctagttattggccatgtttggcacagctgctacttgttgaaaaagcagcttatctgataagctggtgaaaagcagcttctgcttgttggctgcttttagtgtattctgagaaacagctgaactgataagctgttgcagaagctagctgtttggcagaacttctgcttaaatttgtgaagaagctgaaaataagctgtgccaaacagggccattgggtcagctacacgctacttattattgagttttttt

SEQ ID NO: 24294 - DNA, 2401 bp, Zea Mays
ttggccgcacgcagctgggaagaaggatctgaaaacactgtcgtccattttcagactcagttatttgaaacatcaagatggttaatttcggaaagaaattgatggctgatcaagtggacgaatggaaaggatactacatcaattacaagctgatgaagaaaatgttaaagcaatatgtccaacaaacccaacatgatgagaaagatcgcgaacaagttcttaaagacttttcaaggtttcttgatgaccagattgaaaggattgtgctttttctgctacaacaacaaggccatcttgccagtaggattgagaaattggcagaaaaacgcactgctcttctggaagagtatgacatatcacaagtttatcagctgcatgatgcatacagggaagtcgggcttgatctcataaagcttctccgctttgttgatgtgaatgctactggtatacgcaagatactaaagaaatttgataaacgctttggctacaagttcactgattattatgtcaccactcgtgcaaatcatccttattctcagcttcagcaagtatttaagcaagtgggaattgtagctgttgtaggtgcattatcgcgcaaccttgaatatctgcagcatcatgaaggaagctttgtatccatctatgatcgtccagcagttaccttgaaggaccctattatagaccaagtaaaccatgcagtacagaaactcacgcatgccacgaattttatgcaattcttgggacagcacgcgcttattgtccaggaagatgcagaaagcgagtcggaggatcttgttggtgatcagagctaccatttcatgtccctggtgcttaatctagtgaacacattcctttacatggtgaatacatatatcattgtgccgactgcagatgactatgcagtaagccttggggctgctgcaactgtatgtggtataattattggatcgatggcagtcgcccaagtattctcctcagtctacttcagtgcctggtcaaataagtcctacttcaaacctcttgtgttcagtagcattatgctgtttcttggaaacctactgtatgcattggcatatgatctgaattcactaatagttctcctgactggacgactgctatgtgggttaggttctgcaagagcagtgaaccgtcgctatatcagtgactgtgtgcctctcaagatgaggctacaagcctctgccgggttcgttagtgctagcgctcttggcatggcatgtggccctgctcttgctggttttctccagattaaattcaagatatactcgctcagttttaatcagagcacattgcctggatgggtcatgtgcatttcttggcttatttacttattgtggttgtggcttacattcaaggaaccagaacacttcactaaaactctggtcaatgaacagccgtcagaatctggccgccaaggaaattctaacttggaggcaggtctagctgaaccattgcttcaaggtatagaacgaaggcaggatgagaactcagaagttaatgatgatactgaagtagagtcagaaagctctcatgaaccagcaacatcaattgcttcagcatacagattgctaactccatctgtgaaggcccagctactgatatacttcatgctcaagtacgcaatggaaatactactatcagaatcgagcgttgtcaccacatactattttagctggtctacaagtgctgtggctatctttctagcgattcttggattaacggttcttccagtaaatgccattgttggaagctacgttacaaatttattcgaggataggcaaattttgttggcatctgaagtcatggttctcatcggtataatcatgagcttttgtttcacacctcactactccatcccgcaatatgttctttcagctttcatcacatttgtatttgctgaggtgcttgaaggagtgaatctgtccttgctctcacgagtaatgtcatcgaggctttcccgagggacctacaatggtggactcctttcgacagaggccgggacgttggcccgtgtagttgcagatgccacgattactgcagccggttatctcggcacggacctccttctgaatgtcactcttctcccatcccttgtgatttgcatagtctccatcgcagcagcactctacacttacaacaatctctattgaagctattgttgctgtacaagtgtacaacaatgttcctaagctaaaatgttcctgcccacaacgggtttgtatatctgttcaagcatggtttgtaaacattttgatcaagtttgtatgcaaaatttcttgtatttagtgcatttatgtaaagattcatcctgtaaagaattataaactatgagacgctattgccatttatgatcatttatgtttatctttttagccttatgtta

SEQ ID NO: 24295 - DNA, 2643 bp, Zea Mays
ttctcgttcggtcgttttcgttcccctacctccagtccagtcccaggtccgagccggaccttgatcgccgccgtgcctcggcgcaaggaatggggccttcggtcttacccttgcacgcgccgccggcatcaggagacgtctctgtgtgcttcgccgtgccttcagccgtagccggcgccgcatcagcgtgctccagagaggaccgcagcttccagcacgtgtccctgacaccgccccacactggattgggaagggccgctgaccccacgcacctgcccgctggccagtgttggaagactcagttatttgaaacatcaagatggttaatttcggaaagaaattgatggctgatcaagtggacgaatggaaaggatactacatcaattacaagctgatgaagaaaatgttaaagcaatatgtccaacaaacccaacatgatgagaaagatcgcgaacaagttcttaaagacttttcaaggtttcttgatgaccagattgaaaggattgtgctttttctgctacaacaacaaggccatcttgccagtaggattgagaaattggcagaaaaacgcactgctcttctggaagagtatgacatatcacaagtttatcagctgcatgatgcatacagggaagtcgggcttgatctcataaagcttctccgctttgttgatgtgaatgctactggtatacgcaagatactaaagaaatttgataaacgctttggctacaagttcactgattattatgtcaccactcgtgcaaatcatccttattctcagcttcagcaagtatttaagcaagtgggaattgtagctgttgtaggtgcattatcgcgcaaccttgaatatctgcagcatcatgaaggaagctttgtatccatctatgatcgtccagcagttaccttgaaggaccctattatagaccaagtaaaccatgcagtacagaaactcacgcatgccacgaattttatgcaattcttgggacagcacgcgcttattgtccaggaagatgcagaaagcgagtcggaggatcttgttggtgatcagagctaccatttcatgtccctggtgcttaatctagtgaacacattcctttacatggtgaatacatatatcattgtgccgactgcagatgactatgcagtaagccttggggctgctgcaactgtatgtggtataattattggatcgatggcagtcgcccaagtattctcctcagtctacttcagtgcctggtcaaataagtcctacttcaaacctcttgtgttcagtagcattatgctgtttcttggaaacctactgtatgcattggcatatgatctgaattcactaatagttctcctgactggacgactgctatgtgggttaggttctgcaagagcagtgaaccgtcgctatatcagtgactgtgtgcctctcaagatgaggctacaagcctctgccgggttcgttagtgctagcgctcttggcatggcatgtggccctgctcttgctggttttctccagattaaattcaagatatactcgctcagttttaatcagagcacattgcctggatgggtcatgtgcatttcttggcttatttacttattgtggttgtggcttacattcaaggaaccagaacacttcactaaaactctggtcaatgaacagccgtcagaatctggccgccaaggaaattctaacttggaggcaggtctagctgaaccattgcttcaaggtatagaacgaaggcaggatgagaactcagaagttaatgatgatactgaagtagagtcagaaagctctcatgaaccagcaacatcaattgcttcagcatacagattgctaactccatctgtgaaggcccagctactgatatacttcatgctcaagtacgcaatggaaatactactatcagaatcgagcgttgtcaccacatactattttagctggtctacaagtgctgtggctatctttctagcgattcttggattaacggttcttccagtaaatgccattgttggaagctacgttacaaatttattcgaggataggcaaattttgttggcatctgaagtcatggttctcatcggtataatcatgagcttttgtttcacacctcactactccatcccgcaatatgttctttcagctttcatcacatttgtatttgctgaggtgcttgaaggagtgaatctgtccttgctctcacgagtaatgtcatcgaggctttcccgagggacctacaatggtggactcctttcgacagaggccgggacgttggcccgtgtagttgcagatgccacgattactgcagccggttatctcggcacggacctccttctgaatgtcactcttctcccatcccttgtgatttgcatagtctccatcgcagcagcactctacacttacaacaatctctattgaagctattgttgctgtacaagtgtacaacaatgttcctaagctaaaatgttcctgcccacaacgggtttgtatatctgttcaagcatggtttgtaaacattttgatcaagtttgtatgcaaaatttcttgtatttagtgcatttatgtaaagattcatcctgtaaagaattataaactatgagacgctattgccatttatgatcatttatgtttatctttttagccttatgtta

SEQ ID NO: 24296 - DNA, 2843 bp, Zea Mays
gttctcgttcggtcgttttcgttcccctacctccagtccagtcccaggtccgagccggaccttgatcgccgccgtgcctcggcgcaaggaatggggccttcggtcttacccttgcacgcgccgccggcatcaggagacgtctctgtgtgcttcgccgtgccttcagccgtagccggcgccgcatcagcgtgctccagagaggaccgcagcttccagcacgtgtccctgacaccgccccacactggattgggaagggccgctgaccccacgcacctgcccgctggccagtgttggaagagttgaattactcgattcagaagtttaagtttctctaatttaagctaaagggagaagagatggagcgcctggcttgagttggccgcacgcagctgggaagaaggatctgaaaacactgtcgtccatggcaaggcaaccaccaattgggtaaaagcatataagcaggcttaccgatcaataaatataaaaaaggtttcagactcagttatttgaaacatcaagatggttaatttcggaaagaaattgatggctgatcaagtggacgaatggaaaggatactacatcaattacaagctgatgaagaaaatgttaaagcaatatgtccaacaaacccaacatgatgagaaagatcgcgaacaagttcttaaagacttttcaaggtttcttgatgaccagattgaaaggattgtgctttttctgctacaacaacaaggccatcttgccagtaggattgagaaattggcagaaaaacgcactgctcttctggaagagtatgacatatcacaagtttatcagctgcatgatgcatacagggaagtcgggcttgatctcataaagcttctccgctttgttgatgtgaatgctactggtatacgcaagatactaaagaaatttgataaacgctttggctacaagttcactgattattatgtcaccactcgtgcaaatcatccttattctcagcttcagcaagtatttaagcaagtgggaattgtagctgttgtaggtgcattatcgcgcaaccttgaatatctgcagcatcatgaaggaagctttgtatccatctatgatcgtccagcagttaccttgaaggaccctattatagaccaagtaaaccatgcagtacagaaactcacgcatgccacgaattttatgcaattcttgggacagcacgcgcttattgtccaggaagatgcagaaagcgagtcggaggatcttgttggtgatcagagctaccatttcatgtccctggtgcttaatctagtgaacacattcctttacatggtgaatacatatatcattgtgccgactgcagatgactatgcagtaagccttggggctgctgcaactgtatgtggtataattattggatcgatggcagtcgcccaagtattctcctcagtctacttcagtgcctggtcaaataagtcctacttcaaacctcttgtgttcagtagcattatgctgtttcttggaaacctactgtatgcattggcatatgatctgaattcactaatagttctcctgactggacgactgctatgtgggttaggttctgcaagagcagtgaaccgtcgctatatcagtgactgtgtgcctctcaagatgaggctacaagcctctgccgggttcgttagtgctagcgctcttggcatggcatgtggccctgctcttgctggttttctccagattaaattcaagatatactcgctcagttttaatcagagcacattgcctggatgggtcatgtgcatttcttggcttatttacttattgtggttgtggcttacattcaaggaaccagaacacttcactaaaactctggtcaatgaacagccgtcagaatctggccgccaaggaaattctaacttggaggcaggtctagctgaaccattgcttcaaggtatagaacgaaggcaggatgagaactcagaagttaatgatgatactgaagtagagtcagaaagctctcatgaaccagcaacatcaattgcttcagcatacagattgctaactccatctgtgaaggcccagctactgatatacttcatgctcaagtacgcaatggaaatactactatcagaatcgagcgttgtcaccacatactattttagctggtctacaagtgctgtggctatctttctagcgattcttggattaacggttcttccagtaaatgccattgttggaagctacgttacaaatttattcgaggataggcaaattttgttggcatctgaagtcatggttctcatcggtataatcatgagcttttgtttcacacctcactactccatcccgcaatatgttctttcagctttcatcacatttgtatttgctgaggtgcttgaaggagtgaatctgtccttgctctcacgagtaatgtcatcgaggctttcccgagggacctacaatggtggactcctttcgacagaggccgggacgttggcccgtgtagttgcagatgccacgattactgcagccggttatctcggcacggacctccttctgaatgtcactcttctcccatcccttgtgatttgcatagtctccatcgcagcagcactctacacttacaacaatctctattgaagctattgttgctgtacaagtgtacaacaatgttcctaagctaaaatgttcctgcccacaacgggtttgtatatctgttcaagcatggtttgtaaacattttgatcaagtttgtatgcaaaatttcttgtatttagtgcatttatgtaaagattcatcctgtaaagaattataaactatgagacgctattgccatttatgatcatttatgtttatctttttagccttatgtta

SEQ ID NO: 24297 - DNA, 2837 bp, Zea Mays
gttctcgttcggtcgttttcgttcccctacctccagtccagtcccaggtccgagccggaccttgatcgccgccgtgcctcggcgcaaggaatggggccttcggtcttacccttgcacgcgccgccggcatcaggagacgtctctgtgtgcttcgccgtgccttcagccgtagccggcgccgcatcagcgtgctccagagaggaccgcagcttccagcacgtgtccctgacaccgccccacactggattgggaagggccgctgaccccacgcacctgcccgctggccagtgttggaagagttgaattactcgattcagaagtttaagtttctctaatttaagctaaagggagaagagatggagcgcctggcttgagttggccgcacgcagctgggaagaaggatctgaaaacactgtcgtccatggcaaggcaaccaccaattgggtaaaagcatataagcaggcttaccgatcaataaatataaaaaaggactcagttatttgaaacatcaagatggttaatttcggaaagaaattgatggctgatcaagtggacgaatggaaaggatactacatcaattacaagctgatgaagaaaatgttaaagcaatatgtccaacaaacccaacatgatgagaaagatcgcgaacaagttcttaaagacttttcaaggtttcttgatgaccagattgaaaggattgtgctttttctgctacaacaacaaggccatcttgccagtaggattgagaaattggcagaaaaacgcactgctcttctggaagagtatgacatatcacaagtttatcagctgcatgatgcatacagggaagtcgggcttgatctcataaagcttctccgctttgttgatgtgaatgctactggtatacgcaagatactaaagaaatttgataaacgctttggctacaagttcactgattattatgtcaccactcgtgcaaatcatccttattctcagcttcagcaagtatttaagcaagtgggaattgtagctgttgtaggtgcattatcgcgcaaccttgaatatctgcagcatcatgaaggaagctttgtatccatctatgatcgtccagcagttaccttgaaggaccctattatagaccaagtaaaccatgcagtacagaaactcacgcatgccacgaattttatgcaattcttgggacagcacgcgcttattgtccaggaagatgcagaaagcgagtcggaggatcttgttggtgatcagagctaccatttcatgtccctggtgcttaatctagtgaacacattcctttacatggtgaatacatatatcattgtgccgactgcagatgactatgcagtaagccttggggctgctgcaactgtatgtggtataattattggatcgatggcagtcgcccaagtattctcctcagtctacttcagtgcctggtcaaataagtcctacttcaaacctcttgtgttcagtagcattatgctgtttcttggaaacctactgtatgcattggcatatgatctgaattcactaatagttctcctgactggacgactgctatgtgggttaggttctgcaagagcagtgaaccgtcgctatatcagtgactgtgtgcctctcaagatgaggctacaagcctctgccgggttcgttagtgctagcgctcttggcatggcatgtggccctgctcttgctggttttctccagattaaattcaagatatactcgctcagttttaatcagagcacattgcctggatgggtcatgtgcatttcttggcttatttacttattgtggttgtggcttacattcaaggaaccagaacacttcactaaaactctggtcaatgaacagccgtcagaatctggccgccaaggaaattctaacttggaggcaggtctagctgaaccattgcttcaaggtatagaacgaaggcaggatgagaactcagaagttaatgatgatactgaagtagagtcagaaagctctcatgaaccagcaacatcaattgcttcagcatacagattgctaactccatctgtgaaggcccagctactgatatacttcatgctcaagtacgcaatggaaatactactatcagaatcgagcgttgtcaccacatactattttagctggtctacaagtgctgtggctatctttctagcgattcttggattaacggttcttccagtaaatgccattgttggaagctacgttacaaatttattcgaggataggcaaattttgttggcatctgaagtcatggttctcatcggtataatcatgagcttttgtttcacacctcactactccatcccgcaatatgttctttcagctttcatcacatttgtatttgctgaggtgcttgaaggagtgaatctgtccttgctctcacgagtaatgtcatcgaggctttcccgagggacctacaatggtggactcctttcgacagaggccgggacgttggcccgtgtagttgcagatgccacgattactgcagccggttatctcggcacggacctccttctgaatgtcactcttctcccatcccttgtgatttgcatagtctccatcgcagcagcactctacacttacaacaatctctattgaagctattgttgctgtacaagtgtacaacaatgttcctaagctaaaatgttcctgcccacaacgggtttgtatatctgttcaagcatggtttgtaaacattttgatcaagtttgtatgcaaaatttcttgtatttagtgcatttatgtaaagattcatcctgtaaagaattataaactatgagacgctattgccatttatgatcatttatgtttatctttttagccttatgtta

SEQ ID NO: 24298 - DNA, 2721 bp, Zea Mays
cgtcgttctcgttcggtcgttttcgttcccctacctccagtccagtcccaggtccgagccggaccttgatcgccgccgtgcctcggcgcaaggaatggggccttcggtcttacccttgcacgcgccgccggcatcaggagacgtctctgtgtgcttcgccgtgccttcagccgtagccggcgccgcatcagcgtgctccagagaggaccgcagcttccagcacgtgtccctgacaccgccccacactggattgggaagggccgctgaccccacgcacctgcccgctggccagtgttggaagggcaaggcaaccaccaattgggtaaaagcatataagcaggcttaccgatcaataaatataaaaaaggtttcagactcagttatttgaaacatcaagatggttaatttcggaaagaaattgatggctgatcaagtggacgaatggaaaggatactacatcaattacaagctgatgaagaaaatgttaaagcaatatgtccaacaaacccaacatgatgagaaagatcgcgaacaagttcttaaagacttttcaaggtttcttgatgaccagattgaaaggattgtgctttttctgctacaacaacaaggccatcttgccagtaggattgagaaattggcagaaaaacgcactgctcttctggaagagtatgacatatcacaagtttatcagctgcatgatgcatacagggaagtcgggcttgatctcataaagcttctccgctttgttgatgtgaatgctactggtatacgcaagatactaaagaaatttgataaacgctttggctacaagttcactgattattatgtcaccactcgtgcaaatcatccttattctcagcttcagcaagtatttaagcaagtgggaattgtagctgttgtaggtgcattatcgcgcaaccttgaatatctgcagcatcatgaaggaagctttgtatccatctatgatcgtccagcagttaccttgaaggaccctattatagaccaagtaaaccatgcagtacagaaactcacgcatgccacgaattttatgcaattcttgggacagcacgcgcttattgtccaggaagatgcagaaagcgagtcggaggatcttgttggtgatcagagctaccatttcatgtccctggtgcttaatctagtgaacacattcctttacatggtgaatacatatatcattgtgccgactgcagatgactatgcagtaagccttggggctgctgcaactgtatgtggtataattattggatcgatggcagtcgcccaagtattctcctcagtctacttcagtgcctggtcaaataagtcctacttcaaacctcttgtgttcagtagcattatgctgtttcttggaaacctactgtatgcattggcatatgatctgaattcactaatagttctcctgactggacgactgctatgtgggttaggttctgcaagagcagtgaaccgtcgctatatcagtgactgtgtgcctctcaagatgaggctacaagcctctgccgggttcgttagtgctagcgctcttggcatggcatgtggccctgctcttgctggttttctccagattaaattcaagatatactcgctcagttttaatcagagcacattgcctggatgggtcatgtgcatttcttggcttatttacttattgtggttgtggcttacattcaaggaaccagaacacttcactaaaactctggtcaatgaacagccgtcagaatctggccgccaaggaaattctaacttggaggcaggtctagctgaaccattgcttcaaggtatagaacgaaggcaggatgagaactcagaagttaatgatgatactgaagtagagtcagaaagctctcatgaaccagcaacatcaattgcttcagcatacagattgctaactccatctgtgaaggcccagctactgatatacttcatgctcaagtacgcaatggaaatactactatcagaatcgagcgttgtcaccacatactattttagctggtctacaagtgctgtggctatctttctagcgattcttggattaacggttcttccagtaaatgccattgttggaagctacgttacaaatttattcgaggataggcaaattttgttggcatctgaagtcatggttctcatcggtataatcatgagcttttgtttcacacctcactactccatcccgcaatatgttctttcagctttcatcacatttgtatttgctgaggtgcttgaaggagtgaatctgtccttgctctcacgagtaatgtcatcgaggctttcccgagggacctacaatggtggactcctttcgacagaggccgggacgttggcccgtgtagttgcagatgccacgattactgcagccggttatctcggcacggacctccttctgaatgtcactcttctcccatcccttgtgatttgcatagtctccatcgcagcagcactctacacttacaacaatctctattgaagctattgttgctgtacaagtgtacaacaatgttcctaagctaaaatgttcctgcccacaacgggtttgtatatctgttcaagcatggtttgtaaacattttgatcaagtttgtatgcaaaatttcttgtatttagtgcatttatgtaaagattcatcctgtaaagaattataaactatgagacgctattgccatttatgatcatttatgtttatctttttagccttatgtta

SEQ ID NO: 24299 - DNA, 2394 bp, Zea Mays
cccaaccgtccggtcaaccgaccagcgtttcctgttccacctttcagactcagttatttgaaacatcaagatggttaatttcggaaagaaattgatggctgatcaagtggacgaatggaaaggatactacatcaattacaagctgatgaagaaaatgttaaagcaatatgtccaacaaacccaacatgatgagaaagatcgcgaacaagttcttaaagacttttcaaggtttcttgatgaccagattgaaaggattgtgctttttctgctacaacaacaaggccatcttgccagtaggattgagaaattggcagaaaaacgcactgctcttctggaagagtatgacatatcacaagtttatcagctgcatgatgcatacagggaagtcgggcttgatctcataaagcttctccgctttgttgatgtgaatgctactggtatacgcaagatactaaagaaatttgataaacgctttggctacaagttcactgattattatgtcaccactcgtgcaaatcatccttattctcagcttcagcaagtatttaagcaagtgggaattgtagctgttgtaggtgcattatcgcgcaaccttgaatatctgcagcatcatgaaggaagctttgtatccatctatgatcgtccagcagttaccttgaaggaccctattatagaccaagtaaaccatgcagtacagaaactcacgcatgccacgaattttatgcaattcttgggacagcacgcgcttattgtccaggaagatgcagaaagcgagtcggaggatcttgttggtgatcagagctaccatttcatgtccctggtgcttaatctagtgaacacattcctttacatggtgaatacatatatcattgtgccgactgcagatgactatgcagtaagccttggggctgctgcaactgtatgtggtataattattggatcgatggcagtcgcccaagtattctcctcagtctacttcagtgcctggtcaaataagtcctacttcaaacctcttgtgttcagtagcattatgctgtttcttggaaacctactgtatgcattggcatatgatctgaattcactaatagttctcctgactggacgactgctatgtgggttaggttctgcaagagcagtgaaccgtcgctatatcagtgactgtgtgcctctcaagatgaggctacaagcctctgccgggttcgttagtgctagcgctcttggcatggcatgtggccctgctcttgctggttttctccagattaaattcaagatatactcgctcagttttaatcagagcacattgcctggatgggtcatgtgcatttcttggcttatttacttattgtggttgtggcttacattcaaggaaccagaacacttcactaaaactctggtcaatgaacagccgtcagaatctggccgccaaggaaattctaacttggaggcaggtctagctgaaccattgcttcaaggtatagaacgaaggcaggatgagaactcagaagttaatgatgatactgaagtagagtcagaaagctctcatgaaccagcaacatcaattgcttcagcatacagattgctaactccatctgtgaaggcccagctactgatatacttcatgctcaagtacgcaatggaaatactactatcagaatcgagcgttgtcaccacatactattttagctggtctacaagtgctgtggctatctttctagcgattcttggattaacggttcttccagtaaatgccattgttggaagctacgttacaaatttattcgaggataggcaaattttgttggcatctgaagtcatggttctcatcggtataatcatgagcttttgtttcacacctcactactccatcccgcaatatgttctttcagctttcatcacatttgtatttgctgaggtgcttgaaggagtgaatctgtccttgctctcacgagtaatgtcatcgaggctttcccgagggacctacaatggtggactcctttcgacagaggccgggacgttggcccgtgtagttgcagatgccacgattactgcagccggttatctcggcacggacctccttctgaatgtcactcttctcccatcccttgtgatttgcatagtctccatcgcagcagcactctacacttacaacaatctctattgaagctattgttgctgtacaagtgtacaacaatgttcctaagctaaaatgttcctgcccacaacgggtttgtatatctgttcaagcatggtttgtaaacattttgatcaagtttgtatgcaaaatttcttgtatttagtgcatttatgtaaagattcatcctgtaaagaattataaactatgagacgctattgccatttatgatcatttatgtttatctttttagccttatgtta

SEQ ID NO: 24300 - DNA, 2411 bp, Zea Mays
cttttctacccgcgcctgtggggcccaaccgtccggtcaaccgaccagcgtttcctgttccaccactcagttatttgaaacatcaagatggttaatttcggaaagaaattgatggctgatcaagtggacgaatggaaaggatactacatcaattacaagctgatgaagaaaatgttaaagcaatatgtccaacaaacccaacatgatgagaaagatcgcgaacaagttcttaaagacttttcaaggtttcttgatgaccagattgaaaggattgtgctttttctgctacaacaacaaggccatcttgccagtaggattgagaaattggcagaaaaacgcactgctcttctggaagagtatgacatatcacaagtttatcagctgcatgatgcatacagggaagtcgggcttgatctcataaagcttctccgctttgttgatgtgaatgctactggtatacgcaagatactaaagaaatttgataaacgctttggctacaagttcactgattattatgtcaccactcgtgcaaatcatccttattctcagcttcagcaagtatttaagcaagtgggaattgtagctgttgtaggtgcattatcgcgcaaccttgaatatctgcagcatcatgaaggaagctttgtatccatctatgatcgtccagcagttaccttgaaggaccctattatagaccaagtaaaccatgcagtacagaaactcacgcatgccacgaattttatgcaattcttgggacagcacgcgcttattgtccaggaagatgcagaaagcgagtcggaggatcttgttggtgatcagagctaccatttcatgtccctggtgcttaatctagtgaacacattcctttacatggtgaatacatatatcattgtgccgactgcagatgactatgcagtaagccttggggctgctgcaactgtatgtggtataattattggatcgatggcagtcgcccaagtattctcctcagtctacttcagtgcctggtcaaataagtcctacttcaaacctcttgtgttcagtagcattatgctgtttcttggaaacctactgtatgcattggcatatgatctgaattcactaatagttctcctgactggacgactgctatgtgggttaggttctgcaagagcagtgaaccgtcgctatatcagtgactgtgtgcctctcaagatgaggctacaagcctctgccgggttcgttagtgctagcgctcttggcatggcatgtggccctgctcttgctggttttctccagattaaattcaagatatactcgctcagttttaatcagagcacattgcctggatgggtcatgtgcatttcttggcttatttacttattgtggttgtggcttacattcaaggaaccagaacacttcactaaaactctggtcaatgaacagccgtcagaatctggccgccaaggaaattctaacttggaggcaggtctagctgaaccattgcttcaaggtatagaacgaaggcaggatgagaactcagaagttaatgatgatactgaagtagagtcagaaagctctcatgaaccagcaacatcaattgcttcagcatacagattgctaactccatctgtgaaggcccagctactgatatacttcatgctcaagtacgcaatggaaatactactatcagaatcgagcgttgtcaccacatactattttagctggtctacaagtgctgtggctatctttctagcgattcttggattaacggttcttccagtaaatgccattgttggaagctacgttacaaatttattcgaggataggcaaattttgttggcatctgaagtcatggttctcatcggtataatcatgagcttttgtttcacacctcactactccatcccgcaatatgttctttcagctttcatcacatttgtatttgctgaggtgcttgaaggagtgaatctgtccttgctctcacgagtaatgtcatcgaggctttcccgagggacctacaatggtggactcctttcgacagaggccgggacgttggcccgtgtagttgcagatgccacgattactgcagccggttatctcggcacggacctccttctgaatgtcactcttctcccatcccttgtgatttgcatagtctccatcgcagcagcactctacacttacaacaatctctattgaagctattgttgctgtacaagtgtacaacaatgttcctaagctaaaatgttcctgcccacaacgggtttgtatatctgttcaagcatggtttgtaaacattttgatcaagtttgtatgcaaaatttcttgtatttagtgcatttatgtaaagattcatcctgtaaagaattataaactatgagacgctattgccatttatgatcatttatgtttatctttttagccttatgtta

SEQ ID NO: 24301 - DNA, 2540 bp, Zea Mays
tgcaggcctggcgccacgccgtaccgtgcaagcgcgtttgctgatgttcatctaattactgtataataatatctccgggcgaaagagctagcaatcgtcggcgggggaggaggggctcgattgctgctcaagggcaaggcaaccaccaattgggtaaaagcatataagcaggcttaccgatcaataaatataaaaaaggttatttgaaacatcaagatggttaatttcggaaagaaattgatggctgatcaagtggacgaatggaaaggatactacatcaattacaagctgatgaagaaaatgttaaagcaatatgtccaacaaacccaacatgatgagaaagatcgcgaacaagttcttaaagacttttcaaggtttcttgatgaccagattgaaaggattgtgctttttctgctacaacaacaaggccatcttgccagtaggattgagaaattggcagaaaaacgcactgctcttctggaagagtatgacatatcacaagtttatcagctgcatgatgcatacagggaagtcgggcttgatctcataaagcttctccgctttgttgatgtgaatgctactggtatacgcaagatactaaagaaatttgataaacgctttggctacaagttcactgattattatgtcaccactcgtgcaaatcatccttattctcagcttcagcaagtatttaagcaagtgggaattgtagctgttgtaggtgcattatcgcgcaaccttgaatatctgcagcatcatgaaggaagctttgtatccatctatgatcgtccagcagttaccttgaaggaccctattatagaccaagtaaaccatgcagtacagaaactcacgcatgccacgaattttatgcaattcttgggacagcacgcgcttattgtccaggaagatgcagaaagcgagtcggaggatcttgttggtgatcagagctaccatttcatgtccctggtgcttaatctagtgaacacattcctttacatggtgaatacatatatcattgtgccgactgcagatgactatgcagtaagccttggggctgctgcaactgtatgtggtataattattggatcgatggcagtcgcccaagtattctcctcagtctacttcagtgcctggtcaaataagtcctacttcaaacctcttgtgttcagtagcattatgctgtttcttggaaacctactgtatgcattggcatatgatctgaattcactaatagttctcctgactggacgactgctatgtgggttaggttctgcaagagcagtgaaccgtcgctatatcagtgactgtgtgcctctcaagatgaggctacaagcctctgccgggttcgttagtgctagcgctcttggcatggcatgtggccctgctcttgctggttttctccagattaaattcaagatatactcgctcagttttaatcagagcacattgcctggatgggtcatgtgcatttcttggcttatttacttattgtggttgtggcttacattcaaggaaccagaacacttcactaaaactctggtcaatgaacagccgtcagaatctggccgccaaggaaattctaacttggaggcaggtctagctgaaccattgcttcaaggtatagaacgaaggcaggatgagaactcagaagttaatgatgatactgaagtagagtcagaaagctctcatgaaccagcaacatcaattgcttcagcatacagattgctaactccatctgtgaaggcccagctactgatatacttcatgctcaagtacgcaatggaaatactactatcagaatcgagcgttgtcaccacatactattttagctggtctacaagtgctgtggctatctttctagcgattcttggattaacggttcttccagtaaatgccattgttggaagctacgttacaaatttattcgaggataggcaaattttgttggcatctgaagtcatggttctcatcggtataatcatgagcttttgtttcacacctcactactccatcccgcaatatgttctttcagctttcatcacatttgtatttgctgaggtgcttgaaggagtgaatctgtccttgctctcacgagtaatgtcatcgaggctttcccgagggacctacaatggtggactcctttcgacagaggccgggacgttggcccgtgtagttgcagatgccacgattactgcagccggttatctcggcacggacctccttctgaatgtcactcttctcccatcccttgtgatttgcatagtctccatcgcagcagcactctacacttacaacaatctctattgaagctattgttgctgtacaagtgtacaacaatgttcctaagctaaaatgttcctgcccacaacgggtttgtatatctgttcaagcatggtttgtaaacattttgatcaagtttgtatgcaaaatttcttgtatttagtgcatttatgtaaagattcatcctgtaaagaattataaactatgagacgctattgccatttatgatcatttatgtttatctttttagccttatgtta

SEQ ID NO: 24302 - DNA, 2570 bp, Zea Mays
cgccattgcacgcctccggccggcggctgcttgtcttgctgcttctgccgcacatccgtgatccggcagaaggtgcttcgttcgttgcaggcctggcgccacgccgtaccgtgcaagcgcgtttgctgatgttcatctaattactgtataataatatctccgggcgaaagagctagcaatcgtcggcgggggaggaggggctcgattgctgctcaagtttcagactcagttatttgaaacatcaagatggttaatttcggaaagaaattgatggctgatcaagtggacgaatggaaaggatactacatcaattacaagctgatgaagaaaatgttaaagcaatatgtccaacaaacccaacatgatgagaaagatcgcgaacaagttcttaaagacttttcaaggtttcttgatgaccagattgaaaggattgtgctttttctgctacaacaacaaggccatcttgccagtaggattgagaaattggcagaaaaacgcactgctcttctggaagagtatgacatatcacaagtttatcagctgcatgatgcatacagggaagtcgggcttgatctcataaagcttctccgctttgttgatgtgaatgctactggtatacgcaagatactaaagaaatttgataaacgctttggctacaagttcactgattattatgtcaccactcgtgcaaatcatccttattctcagcttcagcaagtatttaagcaagtgggaattgtagctgttgtaggtgcattatcgcgcaaccttgaatatctgcagcatcatgaaggaagctttgtatccatctatgatcgtccagcagttaccttgaaggaccctattatagaccaagtaaaccatgcagtacagaaactcacgcatgccacgaattttatgcaattcttgggacagcacgcgcttattgtccaggaagatgcagaaagcgagtcggaggatcttgttggtgatcagagctaccatttcatgtccctggtgcttaatctagtgaacacattcctttacatggtgaatacatatatcattgtgccgactgcagatgactatgcagtaagccttggggctgctgcaactgtatgtggtataattattggatcgatggcagtcgcccaagtattctcctcagtctacttcagtgcctggtcaaataagtcctacttcaaacctcttgtgttcagtagcattatgctgtttcttggaaacctactgtatgcattggcatatgatctgaattcactaatagttctcctgactggacgactgctatgtgggttaggttctgcaagagcagtgaaccgtcgctatatcagtgactgtgtgcctctcaagatgaggctacaagcctctgccgggttcgttagtgctagcgctcttggcatggcatgtggccctgctcttgctggttttctccagattaaattcaagatatactcgctcagttttaatcagagcacattgcctggatgggtcatgtgcatttcttggcttatttacttattgtggttgtggcttacattcaaggaaccagaacacttcactaaaactctggtcaatgaacagccgtcagaatctggccgccaaggaaattctaacttggaggcaggtctagctgaaccattgcttcaaggtatagaacgaaggcaggatgagaactcagaagttaatgatgatactgaagtagagtcagaaagctctcatgaaccagcaacatcaattgcttcagcatacagattgctaactccatctgtgaaggcccagctactgatatacttcatgctcaagtacgcaatggaaatactactatcagaatcgagcgttgtcaccacatactattttagctggtctacaagtgctgtggctatctttctagcgattcttggattaacggttcttccagtaaatgccattgttggaagctacgttacaaatttattcgaggataggcaaattttgttggcatctgaagtcatggttctcatcggtataatcatgagcttttgtttcacacctcactactccatcccgcaatatgttctttcagctttcatcacatttgtatttgctgaggtgcttgaaggagtgaatctgtccttgctctcacgagtaatgtcatcgaggctttcccgagggacctacaatggtggactcctttcgacagaggccgggacgttggcccgtgtagttgcagatgccacgattactgcagccggttatctcggcacggacctccttctgaatgtcactcttctcccatcccttgtgatttgcatagtctccatcgcagcagcactctacacttacaacaatctctattgaagctattgttgctgtacaagtgtacaacaatgttcctaagctaaaatgttcctgcccacaacgggtttgtatatctgttcaagcatggtttgtaaacattttgatcaagtttgtatgcaaaatttcttgtatttagtgcatttatgtaaagattcatcctgtaaagaattataaactatgagacgctattgccatttatgatcatttatgtttatctttttagccttatgtta

SEQ ID NO: 24303 - DNA, 1209 bp, Zea Mays
ctcactggtatgtttgctgacaagaagaacacgtccagtgatagcagtaaaccagctttccagtttggtggaaataatgtcatatttggtggcaagaaggatgcacctgttgacagcagtaaacctttccagtttggtccgaataatggcatatttggtgacaagaaggatactcccagtgacagcagcaaacctttccattttggtgcaaacaagggcatatttggcgacaagaagacgacaagtgttgcccaaagttttaacccacagagtccacctctgttttcaatgaatcaacaatcagtcctcccaggaaaccaaaatacttctgaagcttcagctgacgcagatgaagatgctgaacctgagaagccaagcagcccttctgtaaagaaggcagaagagaagggggtagttgtcgttcatgaaaccaaatgcaaggtgtatgtcaagcatgatgatgccactaagggttggaaagacattggtgttggtcagctctctatcagaagtaaagaaggcacagagaaagcttccaaagaatccactcctaccattgttataagaaacgatgttggtaaaatcctcctgaatgctctgatctacaaggggataaaaatgaaccttcagaagaatacggttgcttcgatatttcatacttcagatgcacaatcaagtgaatcagctggtgacacagttgtagctcgaacatacctgttccgattgaaaaatgtagaggaggctacaaaactatcgacagcaatcaaggagaatgcgccctcagactagttcttacggcatggattatcatctcgaatctccgcttttggcacgagctgtaagatctgaaggggacaccaccgatggccactgcggcaggctaaaagatgccttgcagagtttctttatttttttttgttctcctagctgcatcaagatatcttgcttgtaacttgtaaggctgactggctggttatgtattagtactttcatgtaccatcttttgcattgacaagattattgagcatgcttgcagcccatcatgtcaccgcaggcagcaaagcaagtggcaatggttcaagtctgggatgcaaccgagtttccgtcttcggatatcctgtacagctttcaccacaagaactagaaatcgaggatctttcggccatcgagttgaccataatcgtcgtaagctgctggcctattgtaaac

SEQ ID NO: 24304 - DNA, 1606 bp, Zea Mays
gttaatatcttccgggaatctgtataattgtatcttattgttgctggtgattgcttatgagatttagaaacaccaacttcgtcctaattctgattacataaccatctgcattgtatctttttaaaacgtgcttatatattgatgatttaaggaaaaattcaaggatgttgtcaactggctaaggcaaaatcaagcaggttcaatagttgtttcatccccaagctcactgaaggatgataagtccaatctgccagcagcagatgatagcaagctcttagtacagccaagttcagataacaaacagaaggctccaattatggcttctagttcttcatcttttcagaactcaagcttaccgaaccttttttcatcgccttctcagcaaaaaacaccagattacagtggtatgtttgctgacaagaagaacacgtccagtgatagcagtaaaccagctttccagtttggtggaaataatgtcatatttggtggcaagaaggatgcacctgttgacagcagtaaacctttccagtttggtccgaataatggcatatttggtgacaagaaggatactcccagtgacagcagcaaacctttccattttggtgcaaacaagggcatatttggcgacaagaagacgacaagtgttgcccaaagttttaacccacagagtccacctctgttttcaatgaatcaacaatcagtcctcccaggaaaccaaaatacttctgaagcttcagctgacgcagatgaagatgctgaacctgagaagccaagcagcccttctgtaaagaaggcagaagagaagggggtagttgtcgttcatgaaaccaaatgcaaggtgtatgtcaagcatgatgatgccactaagggttggaaagacattggtgttggtcagctctctatcagaagtaaagaaggcacagagaaagcttccaaagaatccactcctaccattgttataagaaacgatgttggtaaaatcctcctgaatgctctgatctacaaggggataaaaatgaaccttcagaagaatacggttgcttcgatatttcatacttcagatgcacaatcaagtgaatcagctggtgacacagttgtagctcgaacatacctgttccgattgaaaaatgtagaggaggctacaaaactatcgacagcaatcaaggagaatgcgccctcagactagttcttacggcatggattatcatctcgaatctccgcttttggcacgagctgtaagatctgaaggggacaccaccgatggccactgcggcaggctaaaagatgccttgcagagtttctttatttttttttgttctcctagctgcatcaagatatcttgcttgtaacttgtaaggctgactggctggttatgtattagtactttcatgtaccatcttttgcattgacaagattattgagcatgcttgcagcccatcatgtcaccgcaggcagcaaagcaagtggcaatggttcaagtctgggatgcaaccgagtttccgtcttcggatatcctgtacagctttcaccacaagaactagaaatcgaggatctttcggccatcgagttgaccataatcgtcgtaagctgctggcctattgtaaac

SEQ ID NO: 24305 - DNA, 1853 bp, Zea Mays
gatgtgtactgtttgttttgaggcaaccagtgttgcgaaaaagctgtggatcttacgttcttgcgggcgtggaaaagttaccaagtaagagagtaatggacggaccctcttttgatgttcacagggcggagtcttcccatcagcatgtgatggcaggacccgctagtttagatcctcggcgggcggaggctgctagcaaacatgtgagggcacttaatacccagtttgcaagctgggttcaattgcagctgcaaaatcatccagctgaactttgggaggacggccttaaggattacatatcacatgcttctgaaatcatggaaaaattcaaggatgttgtcaactggctaaggcaaaatcaagcaggttcaatagttgtttcatccccaagctcactgaaggatgataagtccaatctgccagcagcagatgatagcaagctcttagtacagccaagttcagataacaaacagaaggctccaattatggcttctagttcttcatcttttcagaactcaagcttaccgaaccttttttcatcgccttctcagcaaaaaacaccagattacagtggtatgtttgctgacaagaagaacacgtccagtgatagcagtaaaccagctttccagtttggtggaaataatgtcatatttggtggcaagaaggatgcacctgttgacagcagtaaacctttccagtttggtccgaataatggcatatttggtgacaagaaggatactcccagtgacagcagcaaacctttccattttggtgcaaacaagggcatatttggcgacaagaagacgacaagtggtgacagcagtaatccttttcagtttggtgcaaataatggttttccaacatccaatgcaccatctattttttcttcagttgcccaaagttttaacccacagagtccacctctgttttcaatgaatcaacaatcagtcctcccaggaaaccaaaatacttctgaagcttcagctgacgcagatgaagatgctgaacctgagaagccaagcagcccttctgtaaagaaggcagaagagaagggggtagttgtcgttcatgaaaccaaatgcaaggtgtatgtcaagcatgatgatgccactaagggttggaaagacattggtgttggtcagctctctatcagaagtaaagaaggcacagagaaagcttccaaagaatccactcctaccattgttataagaaacgatgttggtaaaatcctcctgaatgctctgatctacaaggggataaaaatgaaccttcagaagaatacggttgcttcgatatttcatacttcagatgcacaatcaagtgaatcagctggtgacacagttgtagctcgaacatacctgttccgattgaaaaatgtagaggaggctacaaaactatcgacagcaatcaaggagaatgcgccctcagactagttcttacggcatggattatcatctcgaatctccgcttttggcacgagctgtaagatctgaaggggacaccaccgatggccactgcggcaggctaaaagatgccttgcagagtttctttatttttttttgttctcctagctgcatcaagatatcttgcttgtaacttgtaaggctgactggctggttatgtattagtactttcatgtaccatcttttgcattgacaagattattgagcatgcttgcagcccatcatgtcaccgcaggcagcaaagcaagtggcaatggttcaagtctgggatgcaaccgagtttccgtcttcggatatcctgtacagctttcaccacaagaactagaaatcgaggatctttcggccatcgagttgaccataatcgtcgtaagctgctggcctattgtaaac

SEQ ID NO: 24306 - DNA, 1966 bp, Zea Mays
agcaatcgcatattcgattgcctttcttgccctacgccgccagcttcccacggagccaccaccctccacttctcaccactgccgtctccttcccaaactcggctgccgtctcctttgattccacggcctgccacgcagcagcagcaaaactcctagtcaacccttcaactcgcctactactcctactagctccttcttttcttcgatctccgcaatctacagctttgcttctcccggctcgagcggctagggtttcgggagtgcgcggtgagacggcatgacaacgcggggagctaagcgcgcggccacctccgaccccgccgcacccgatggcggagtcttcccatcagcatgtgatggcaggacccgctagtttagatcctcggcgggcggaggctgctagcaaacatgtgagggcacttaatacccagtttgcaagctgcaaaatcatccagctgaactttgggaggacggccttaaggattacatatcacatgcttctgaaatcatggaaaaattcaaggatgttgtcaactggctaaggcaaaatcaagcaggttcaatagttgtttcatccccaagctcactgaaggatgataagtccaatctgccagcagcagatgatagcaagctcttagtacagccaagttcagataacaaacagaaggctccaattatggcttctagttcttcatcttttcagaactcaagcttaccgaaccttttttcatcgccttctcagcaaaaaacaccagattacagtggtatgtttgctgacaagaagaacacgtccagtgatagcagtaaaccagctttccagtttggtggaaataatgtcatatttggtggcaagaaggatgcacctgttgacagcagtaaacctttccagtttggtccgaataatggcatatttggtgacaagaaggatactcccagtgacagcagcaaacctttccattttggtgcaaacaagggcatatttggcgacaagaagacgacaagtgttgcccaaagttttaacccacagagtccacctctgttttcaatgaatcaacaatcagtcctcccaggaaaccaaaatacttctgaagcttcagctgacgcagatgaagatgctgaacctgagaagccaagcagcccttctgtaaagaaggcagaagagaagggggtagttgtcgttcatgaaaccaaatgcaaggtgtatgtcaagcatgatgatgccactaagggttggaaagacattggtgttggtcagctctctatcagaagtaaagaaggcacagagaaagcttccaaagaatccactcctaccattgttataagaaacgatgttggtaaaatcctcctgaatgctctgatctacaaggggataaaaatgaaccttcagaagaatacggttgcttcgatatttcatacttcagatgcacaatcaagtgaatcagctggtgacacagttgtagctcgaacatacctgttccgattgaaaaatgtagaggaggctacaaaactatcgacagcaatcaaggagaatgcgccctcagactagttcttacggcatggattatcatctcgaatctccgcttttggcacgagctgtaagatctgaaggggacaccaccgatggccactgcggcaggctaaaagatgccttgcagagtttctttatttttttttgttctcctagctgcatcaagatatcttgcttgtaacttgtaaggctgactggctggttatgtattagtactttcatgtaccatcttttgcattgacaagattattgagcatgcttgcagcccatcatgtcaccgcaggcagcaaagcaagtggcaatggttcaagtctgggatgcaaccgagtttccgtcttcggatatcctgtacagctttcaccacaagaactagaaatcgaggatctttcggccatcgagttgaccataatcgtcgtaagctgctggcctattgtaaac

SEQ ID NO: 24307 - DNA, 1874 bp, Zea Mays
agcaatcgcatattcgattgcctttcttgccctacgccgccagcttcccacggagccaccaccctccacttctcaccactgccgtctccttcccaaactcggctgccgtctcctttgattccacggcctgccacgcagcagcagcaaaactcctagtcaacccttcaactcgcctactactcctactagctccttcttttcttcgatctccgcaatctacagctttgcttctcccggctcgagcggctagggtttcgggagtgcgcggtgagacggcatgacaacgcggggagctaagcgcgcggccacctccgaccccgccgcacccgatctgggttcaattgcagctgcaaaatcatccagctgaactttgggaggacggccttaaggattacatatcacatgcttctgaaatcatggaaaaattcaaggatgttgtcaactggctaaggcaaaatcaagcaggttcaatagttgtttcatccccaagctcactgaaggatgataagtccaatctgccagcagcagatgatagcaagctcttagtacagccaagttcagataacaaacagaaggctccaattatggcttctagttcttcatcttttcagaactcaagcttaccgaaccttttttcatcgccttctcagcaaaaaacaccagattacagtggtatgtttgctgacaagaagaacacgtccagtgatagcagtaaaccagctttccagtttggtggaaataatgtcatatttggtggcaagaaggatgcacctgttgacagcagtaaacctttccagtttggtccgaataatggcatatttggtgacaagaaggatactcccagtgacagcagcaaacctttccattttggtgcaaacaagggcatatttggcgacaagaagacgacaagtgttgcccaaagttttaacccacagagtccacctctgttttcaatgaatcaacaatcagtcctcccaggaaaccaaaatacttctgaagcttcagctgacgcagatgaagatgctgaacctgagaagccaagcagcccttctgtaaagaaggcagaagagaagggggtagttgtcgttcatgaaaccaaatgcaaggtgtatgtcaagcatgatgatgccactaagggttggaaagacattggtgttggtcagctctctatcagaagtaaagaaggcacagagaaagcttccaaagaatccactcctaccattgttataagaaacgatgttggtaaaatcctcctgaatgctctgatctacaaggggataaaaatgaaccttcagaagaatacggttgcttcgatatttcatacttcagatgcacaatcaagtgaatcagctggtgacacagttgtagctcgaacatacctgttccgattgaaaaatgtagaggaggctacaaaactatcgacagcaatcaaggagaatgcgccctcagactagttcttacggcatggattatcatctcgaatctccgcttttggcacgagctgtaagatctgaaggggacaccaccgatggccactgcggcaggctaaaagatgccttgcagagtttctttatttttttttgttctcctagctgcatcaagatatcttgcttgtaacttgtaaggctgactggctggttatgtattagtactttcatgtaccatcttttgcattgacaagattattgagcatgcttgcagcccatcatgtcaccgcaggcagcaaagcaagtggcaatggttcaagtctgggatgcaaccgagtttccgtcttcggatatcctgtacagctttcaccacaagaactagaaatcgaggatctttcggccatcgagttgaccataatcgtcgtaagctgctggcctattgtaaac

SEQ ID NO: 24308 - DNA, 2037 bp, Zea Mays
taaaccagcaatcgcatattcgattgcctttcttgccctacgccgccagcttcccacggagccaccaccctccacttctcaccactgccgtctccttcccaaactcggctgccgtctcctttgattccacggcctgccacgcagcagcagcaaaactcctagtcaacccttcaactcgcctactactcctactagctccttcttttcttcgatctccgcaatctacagctttgcttctcccggctcgagcggctagggtttcgggagtgcgcggtgagacggcatgacaacgcggggagctaagcgcgcggccacctccgaccccgccgcacccgatggcggagtcttcccatcagcatgtgatggcaggacccgctagtttagatcctcggcgggcggaggctgctagcaaacatctgggttcaattgcagctgcaaaatcatccagctgaactttgggaggacggccttaaggattacatatcacatgcttctgaaatcatggaaaaattcaaggatgttgtcaactggctaaggcaaaatcaagcaggttcaatagttgtttcatccccaagctcactgaaggatgataagtccaatctgccagcagcagatgatagcaagctcttagtacagccaagttcagataacaaacagaaggctccaattatggcttctagttcttcatcttttcagaactcaagcttaccgaaccttttttcatcgccttctcagcaaaaaacaccagattacagtggtatgtttgctgacaagaagaacacgtccagtgatagcagtaaaccagctttccagtttggtggaaataatgtcatatttggtggcaagaaggatgcacctgttgacagcagtaaacctttccagtttggtccgaataatggcatatttggtgacaagaaggatactcccagtgacagcagcaaacctttccattttggtgcaaacaagggcatatttggcgacaagaagacgacaagtggtgacagcagtaatccttttcagtttggtgcaaataatggttttccaacatccaatgcaccatctattttttcttcagttgcccaaagttttaacccacagagtccacctctgttttcaatgaatcaacaatcagtcctcccaggaaaccaaaatacttctgaagcttcagctgacgcagatgaagatgctgaacctgagaagccaagcagcccttctgtaaagaaggcagaagagaagggggtagttgtcgttcatgaaaccaaatgcaaggtgtatgtcaagcatgatgatgccactaagggttggaaagacattggtgttggtcagctctctatcagaagtaaagaaggcacagagaaagcttccaaagaatccactcctaccattgttataagaaacgatgttggtaaaatcctcctgaatgctctgatctacaaggggataaaaatgaaccttcagaagaatacggttgcttcgatatttcatacttcagatgcacaatcaagtgaatcagctggtgacacagttgtagctcgaacatacctgttccgattgaaaaatgtagaggaggctacaaaactatcgacagcaatcaaggagaatgcgccctcagactagttcttacggcatggattatcatctcgaatctccgcttttggcacgagctgtaagatctgaaggggacaccaccgatggccactgcggcaggctaaaagatgccttgcagagtttctttatttttttttgttctcctagctgcatcaagatatcttgcttgtaacttgtaaggctgactggctggttatgtattagtactttcatgtaccatcttttgcattgacaagattattgagcatgcttgcagcccatcatgtcaccgcaggcagcaaagcaagtggcaatggttcaagtctgggatgcaaccgagtttccgtcttcggatatcctgtacagctttcaccacaagaactagaaatcgaggatctttcggccatcgagttgaccataatcgtcgtaagctgctggcctattgtaaac

SEQ ID NO: 24309 - DNA, 2029 bp, Zea Mays
gttcggtttgctgctttgaatgactgacgtgtgggtccacataaaccagcaatcgcatattcgattgcctttcttgccctacgccgccagcttcccacggagccaccaccctccacttctcaccactgccgtctccttcccaaactcggctgccgtctcctttgattccacggcctgccacgcagcagcagcaaaactcctagtcaacccttcaactcgcctactactcctactagctccttcttttcttcgatctccgcaatctacagctttgcttctcccggctcgagcggctagggtttcgggagtgcgcggtgagacggcatgacaacgcggggagctaagcgcgcggccacctccgaccccgccgcacccgatggcggagtcttcccatcagcatgtgatggcaggacccgctagtttagatcctcggcgggcggaggctgctagcaaacatgtgagggcacttaatacccagtttgcaagctgggttcaattgcagctgcaaaatcatccagctgaactttgggaggacggccttaaggattacatatcacatgcttctgaaatcatggaaaaattcaaggatgttgtcaactggctaaggcaaaatcaagcaggttcaatagttgtttcatccccaagctcactgaaggatgataagtccaatctgccagcagcagatgatagcaagctcttagtacagccaagttcagataacaaacagaaggctccaattatggcttctagttcttcatcttttcagaactcaagcttaccgaaccttttttcatcgccttctcagcaaaaaacaccagattacagtggtatgtttgctgacaagaagaacacgtccagtgatagcagtaaaccagctttccagtttggtggaaataatgtcatatttggtggcaagaaggatgcacctgttgacagcagtaaacctttccagtttggtccgaataatggcatatttggtgacaagaaggatactcccagtgacagcagcaaacctttccattttggtgcaaacaagggcatatttggcgacaagaagacgacaagtgttgcccaaagttttaacccacagagtccacctctgttttcaatgaatcaacaatcagtcctcccaggaaaccaaaatacttctgaagcttcagctgacgcagatgaagatgctgaacctgagaagccaagcagcccttctgtaaagaaggcagaagagaagggggtagttgtcgttcatgaaaccaaatgcaaggtgtatgtcaagcatgatgatgccactaagggttggaaagacattggtgttggtcagctctctatcagaagtaaagaaggcacagagaaagcttccaaagaatccactcctaccattgttataagaaacgatgttggtaaaatcctcctgaatgctctgatctacaaggggataaaaatgaaccttcagaagaatacggttgcttcgatatttcatacttcagatgcacaatcaagtgaatcagctggtgacacagttgtagctcgaacatacctgttccgattgaaaaatgtagaggaggctacaaaactatcgacagcaatcaaggagaatgcgccctcagactagttcttacggcatggattatcatctcgaatctccgcttttggcacgagctgtaagatctgaaggggacaccaccgatggccactgcggcaggctaaaagatgccttgcagagtttctttatttttttttgttctcctagctgcatcaagatatcttgcttgtaacttgtaaggctgactggctggttatgtattagtactttcatgtaccatcttttgcattgacaagattattgagcatgcttgcagcccatcatgtcaccgcaggcagcaaagcaagtggcaatggttcaagtctgggatgcaaccgagtttccgtcttcggatatcctgtacagctttcaccacaagaactagaaatcgaggatctttcggccatcgagttgaccataatcgtcgtaagctgctggcctattgtaaac

SEQ ID NO: 24310 - DNA, 1113 bp, Zea Mays
ctggagcgtgaagggagtaatggccacaagggccaaccccaagccaggggcatgagatgggctaagcccttgatcaacttccgcttatgagtttcgaagggtacagggggatgctctgtatagaggaggctccactttactgctaactaacctatcctggccttctctatttcgggggatactttccaattgcaagagataaccctaaccaactagatccatgatccttattattctggacttgatggtgatgcaggggtggcactacattactgcagtcgagtcagtcttaggccatgacagcaatagttaaactagcagtttttcttcaccggtgtggtgctgctactagaataagaatagaacgcactcgtactgggttggaacctttggttattgctgcaattcctactatgaagtacaattgtgaggctttcaactctaaagacgatgtccagtgctcaatatgtttaggcgaatacagggagaaagagatactacgaatcataccaacatgccgccacagctttcaccttgcctgcttagatttatggttggaaaagcagacgacttgcccaatatgccgggtctcactggaagagctgcaggctgccatgccatcggtatgtagcatccagcaactcccgcccgagcccgaccccgaccccgacccagagaattctgataacccagcacctcagtgtttccaacctgctcgtcaacatcccagagatcaaaataatagccaggagacgcacgaatcagtagaagtgattattgaaattcgacgatgaatagaaacattgacatgaatgtagaaagctaagcgacggaggcaaatatggaacatttcctgcaaccaagcaccggcgttttctttagggctactgctaatcaattagtcatgtcgcccgcagcattgtctcggtatcatgacgtttcatctcccaattcctttgtagaggaaaaagaaaagtttatgtacgattcacgtagtaggtcatcatgttatattattgagaatctgaggcctttgagatcattttgatgttgtaaatatacattgtatcaatattgaataacataaagggtcagagctgcacaaatatcttc

SEQ ID NO: 24311 - DNA, 2994 bp, Zea Mays
cggagtaagtcctctccgtctcagctcgcgagccacagtagcagccgccccttcagcctccatcatctggcgctcgtccgctcccttcctccgcacctcgccaccggccgctgccgcaccggtcgcccctttcttcgcggccccatcgcatcgcacccggttggcctcaaccggctagctccgcatcgtgccccaccaaatgggcgccccgggccgcgacctcaccgctctcctatctatccgcggcagcggcagcccgtctgttcaagcggtaggctatcgcctttcagtgtctggtaggtggtatcagtgattcagtgtgaggacggaggcggaggggaggtggggcaaactcggtgtgaagcacatcagcgggcatgtttgggtcggggctgaacctagtcagcgcggcgctcggcttcggcatgaccgcagccttcgcggcgttcgtctgtgtgaggttcatctgctgccgcgaacgccgtggtgacacccgtgcgccgccatcgccggatttcgccgcggaactcgatggcccggtgcgtgcaatgcccccgccccctttcctgttgacactgtgctgctgcctagtccacggtccttcccacgaaggggaattttctcgtatctcggaaaaggcatggactctgaagtgtccctgctgtatgttgtctgcgataaaaatcgaaaggaggattacattacatgagaatttcatgtgcgttccgaatcaaatggggaattaaatagggacacacgtggccaacttgcttttccagtgggtgtgatgcagtcaaagtggctttagattccttagtgttacgaggtttttttgggattatttatgaaaatctggcgccctttaaaataacaggctacttaacttcgctttggtatccttgttctatccatatgtgattacaatgaaactgaagtcctagccttgaagggccttgtcggcagtctccgaaataccatatcttcattgcacctatgattgtttttatccatgacctggtaattatgagtgcaactttgatatatctggatttatttgttttatcttaagccttgattgttttggtagcattctgatctatttcgagttccctatgcatccacgaacaaactttacaatcaacaagttgacagcacctgcacaggaccagctggaaaaaaggataagagttttaggctgtattctttctatgttattatatatttttcatgttgccaactagctgtgatccactcagcactcttttgcaatgatctgttccaattcattgttgtttatattatgtcgattacaagtttgtgaatcactctctttagagcaaaatttgtgtttgaatggccattgtgtgttcttttttttcatacatgtactaaattttaaaaaatgactatgccaatcaagcaaaagtataattctcagagttagtgttctatcattcacaaagcatctctattaaatattcttttttaaccggaaagtggttggttttgtgtctttaaatgttatttgtgtaatttaccagagacttgagagaacatttgagggagaattaagaagagagggagagggaagctgtggtcaagacgtggcaggtgttttagagttactggagcgtgaagggagtaatggccacaagggccaaccccaagccaggggcatgagatgggctaagcccttgatcaacttccgcttatgagtttcgaagggtacagggggatgctctgtatagaggaggctccactttactgctaactaacctatcctggccttctctatttcgggggatactttccaattgcaagagataaccctaaccaactagatccatgatccttattattctggacttgatggtgatgcaggggtggcactacattactgcagtcgagtcagtcttaggccatgacagcaatagttaaactagcagtttttcttcaccggtgtggtgctgctactagaataagagtacgagacagtaatttatgaattggtgaccatgttattcttgtttgcattatctgatttttttttgaacacacaggagagatggtcaggtcacacacaaacaaacaaactcacgcacctagtaaacaaaggaaaacgacctgaccaaatgttacctgaagattattatagttttggtcaaaataatgaatagcaaaatagcctagttttttattataaaagttgaaatttaatcctgtcattttgtgttgttcagatagaacgcactcgtactgggttggaacctttggttattgctgcaattcctactatgaagtacaattgtgaggctttcaactctaaagacgatgtccagtgctcaatatgtttaggcgaatacagggagaaagagatactacgaatcataccaacatgccgccacagctttcaccttgcctgcttagatttatggttggaaaagcagacgacttgcccaatatgccgggtctcactggaagagctgcaggctgccatgccatcggtatgtagcatccagcaactcccgcccgagcccgaccccgaccccgacccagagaattctgataacccagcacctcagtgtttccaacctgctcgtcaacatcccagagatcaaaataatagccaggagacgcacgaatcagtagaagtgattattgaaattcgacgatgaatagaaacattgacatgaatgtagaaagctaagcgacggaggcaaatatggaacatttcctgcaaccaagcaccggcgttttctttagggctactgctaatcaattagtcatgtcgcccgcagcattgtctcggtatcatgacgtttcatctcccaattcctttgtagaggaaaaagaaaagtttatgtacgattcacgtagtaggtcatcatgttatattattgagaatctgaggcctttgagatcattttgatgttgtaaatatacattgtatcaatattgaataacataaagggtcagagctgcacaaatatcttc

SEQ ID NO: 24312 - DNA, 773 bp, Zea Mays
cttcgctgtcgccttgactcggaaacgcactcgtactgggttggaacctttggttattgctgcaattcctactatgaagtacaattgtgaggctttcaactctaaagacgatgtccagtgctcaatatgtttaggcgaatacagggagaaagagatactacgaatcataccaacatgccgccacagctttcaccttgcctgcttagatttatggttggaaaagcagacgacttgcccaatatgccgggtctcactggaagagctgcaggctgccatgccatcggtatgtagcatccagcaactcccgcccgagcccgaccccgaccccgacccagagaattctgataacccagcacctcagtgtttccaacctgctcgtcaacatcccagagatcaaaataatagccaggagacgcacgaatcagtagaagtgattattgaaattcgacgatgaatagaaacattgacatgaatgtagaaagctaagcgacggaggcaaatatggaacatttcctgcaaccaagcaccggcgttttctttagggctactgctaatcaattagtcatgtcgcccgcagcattgtctcggtatcatgacgtttcatctcccaattcctttgtagaggaaaaagaaaagtttatgtacgattcacgtagtaggtcatcatgttatattattgagaatctgaggcctttgagatcattttgatgttgtaaatatacattgtatcaatattgaataacataaagggtcagagctgcacaaatatcttc

SEQ ID NO: 24313 - DNA, 799 bp, Zea Mays
ccacgccccgtcgccttcggcccttcgctgtcgccttgactcggaatagaacgcactcgtactgggttggaacctttggttattgctgcaattcctactatgaagtacaattgtgaggctttcaactctaaagacgatgtccagtgctcaatatgtttaggcgaatacagggagaaagagatactacgaatcataccaacatgccgccacagctttcaccttgcctgcttagatttatggttggaaaagcagacgacttgcccaatatgccgggtctcactggaagagctgcaggctgccatgccatcggtatgtagcatccagcaactcccgcccgagcccgaccccgaccccgacccagagaattctgataacccagcacctcagtgtttccaacctgctcgtcaacatcccagagatcaaaataatagccaggagacgcacgaatcagtagaagtgattattgaaattcgacgatgaatagaaacattgacatgaatgtagaaagctaagcgacggaggcaaatatggaacatttcctgcaaccaagcaccggcgttttctttagggctactgctaatcaattagtcatgtcgcccgcagcattgtctcggtatcatgacgtttcatctcccaattcctttgtagaggaaaaagaaaagtttatgtacgattcacgtagtaggtcatcatgttatattattgagaatctgaggcctttgagatcattttgatgttgtaaatatacattgtatcaatattgaataacataaagggtcagagctgcacaaatatcttc

SEQ ID NO: 24314 - DNA, 2037 bp, Zea Mays
gcctgtttagcacgaaaaaaacgggccgaaaagcgggctaaacgggccggtaagcacgttttagtgtaaaaaacgggcttaacgggcttagaggtaaacgagccgtgccaggctagcccgccgtgcctagtttcctatcaagcccgcccgcttattctaccgtgccgggctcggaccgggcccaaaaaacgggcttcgtgccgggctcacgggcctcgtgctttttggccatctataccagtagggtacgtacaatccgattgtatttatattctagtatgattgtatgtggactcttaagtgtctcttgtacttagaaaaccaaaccttcaaaccgattgtgcggtcacaccttgtcccccaactcccgcccggatctccatcgccacgcacttctctgctactgatctttagccaaaacaatgccgcggatgacgtggctatgatttcccaaggcaacaatatccacttgagccagttccttgtccagaagctgaaccatccactgatccacccgaaaagcgcgctatttttatacggccaccaccaggtcagcaaggcagccggcgcctagttctctcctccatcgcaactcccacgacccttttccaagtctcgcctccacggctcgtcggctccatccctattcctctcgagtcgcctccgtcccctttgttcaccccagaccccacgcgtgtggctttgaaagagcaccctcatgcatggtctggccggttgaattgaaggagaactgggcgaccggcggttatccaactgtctctaaccggatagagaagaaagtgctccactctccagacaaggtaccgaactcccctcgcattgcgcgtgtcgaatttttgcaaactgcatgggggctggggcgtcgagcgtggtggcgccggacgggtacggccgggggtgggggcagacgtcgctgggcgacatgccggagagctgcatcgcggcggtgctgctctacctcggcccggctgagatctgccaggtggcctgcctcaaccggacgttccgggacgcggcctccgccgactgcatctgggccgccaagttgccctccaactacaggtacctcgccgcactcgcggccgcggccgacgacgactgcgcttgcgatgacgcggccgaaggcagtggcaggtgctgctcctctgcggcgatcaagaaggaggtatacgcgcgcctctgccggcccacccggttcgacggcggcaccaagttacttgagtaggaattttggatcgacaagaacaagggaggtttctgcatgtccatctgctcaaaggctatgtcgatcacagggagagatgatcggaggtattggagccacctatccacagaggaatcaagatttcacggcgtcgcttatcttcagcagatttggtggcttgaggtcggcggggagattgacttctgctttcctgccggttcatacagcctattcttccggctacgtttgggccgaccgcacaagcggatgggccgccgatgccatggctccgagaatatccacggttgggacatcaaaccgacacggttccagctttcaacctcagatgaccagcacactacatctgagtctcacctagttaaccctggaagatggaccctttaccacgtcggtgatttcatcgtatcgagttcagacgaggtgacgggactcaagttctctatgatgcagatcgactgtacgcatacaaaaggcggcctgtgtgttgattcagtctgtatataccccaaagatctcggatatgaggactgcgtgttctgccagaaagttttgtaagagcgcttgagtttcttggctagacttttttttcttctttttcgggtcattcttgtccaaaatggtagtgcgcaaaaaaaaaaatccctgaggacccgtttgtttcgttggaattgaattccattttaataattataatttagacaaaactaattaagtttatatatttatatatgtaatatatttgtatattatcctaaatcatatgagagagatagttatatactacatttatg

SEQ ID NO: 24315 - DNA, 869 bp, Zea Mays
cacgctcatctggaagttgatgcaacgaacctaatgacgtaactgacgccctaccatgcacaacggaaattgagccaggaattttggatcgacaagaacaagggaggtttctgcatgtccatctgctcaaaggctatgtcgatcacagggagagatgatcggaggtattggagccacctatccacagaggaatcaagatttcacggcgtcgcttatcttcagcagatttggtggcttgaggtcggcggggagattgacttctgctttcctgccggttcatacagcctattcttccggctacgtttgggccgaccgcacaagcggatgggccgccgatgccatggctccgagaatatccacggttgggacatcaaaccgacacggttccagctttcaacctcagatgaccagcacactacatctgagtctcacctagttaaccctggaagatggaccctttaccacgtcggtgatttcatcgtatcgagttcagacgaggtgacgggactcaagttctctatgatgcagatcgactgtacgcatacaaaaggcggcctgtgtgttgattcagtctgtatataccccaaagatctcggatatgaggactgcgtgttctgccagaaagttttgtaagagcgcttgagtttcttggctagacttttttttcttctttttcgggtcattcttgtccaaaatggtagtgcgcaaaaaaaaaaatccctgaggacccgtttgtttcgttggaattgaattccattttaataattataatttagacaaaactaattaagtttatatatttatatatgtaatatatttgtatattatcctaaatcatatgagagagatagttatatactacatttatg

SEQ ID NO: 24316 - DNA, 1380 bp, Zea Mays
gttcatccacactgttcaggaaatattgtatcatttaattcaaggaagtaatggtggtggttcatctagaactcattcgattccaagttctagctatggccatgatcggacatcaaatgcacaaaaattgtcaggagatgtaaactgtgagtgtgagttgcaactagcagttgatgaagctttagctagagagttgcatgaaatggagagcaaactagccaacacttcacttaatgacaataatggaagaaagacaacatcatcttcagcatttgatagaggcaataattctgcaagtagacctcctcaggtattggaggaggatgtgattgatccagataatatgacgtatgaggaactgcaacagctaggggaagccattggtacccaaagcaaagggctgcctgaaagtgtcatagcactcttgccaacttcaacttacaaaactgggatattctccagaaaggaaaaacatgatgaatgtgtgatctgttgtatggcatacaagaaccgagataggctgactaaattgccatgtggacatcactaccatcaagcttgtgttgctaaatggttacagatcaataaggaattttggatcgacaagaacaagggaggtttctgcatgtccatctgctcaaaggctatgtcgatcacagggagagatgatcggaggtattggagccacctatccacagaggaatcaagatttcacggcgtcgcttatcttcagcagatttggtggcttgaggtcggcggggagattgacttctgctttcctgccggttcatacagcctattcttccggctacgtttgggccgaccgcacaagcggatgggccgccgatgccatggctccgagaatatccacggttgggacatcaaaccgacacggttccagctttcaacctcagatgaccagcacactacatctgagtctcacctagttaaccctggaagatggaccctttaccacgtcggtgatttcatcgtatcgagttcagacgaggtgacgggactcaagttctctatgatgcagatcgactgtacgcatacaaaaggcggcctgtgtgttgattcagtctgtatataccccaaagatctcggatatgaggactgcgtgttctgccagaaagttttgtaagagcgcttgagtttcttggctagacttttttttcttctttttcgggtcattcttgtccaaaatggtagtgcgcaaaaaaaaaaatccctgaggacccgtttgtttcgttggaattgaattccattttaataattataatttagacaaaactaattaagtttatatatttatatatgtaatatatttgtatattatcctaaatcatatgagagagatagttatatactacatttatg

SEQ ID NO: 24317 - DNA, 159 bp, Zea Mays
caacaccgtgattacacgatgccactggtggcgagccggccatttcagccaaagcggtgggccgcgcttccttcctcagtcctcactactcactcgtccccttccagttccgcttccgatctgcgcttcgatctccctcttcgcagaggtgcttgtgag

SEQ ID NO: 24318 - DNA, 292 bp, Zea Mays
gaccacaacaccgtgattacacgatgccactggtggcgagccggccatttcagccaaagcggtgggccgcgcttccttcctcagtcctcactactcactcgtccccttccagttccgcttccgatctgcgcttcgatctccctcttcgcagagttgtagagcaatgcttatgaattttgacgagtccatatgtaagttgacaaaatttgctagggagagggactgcaggtgatccgatttcacaatttttagtacaatgattgcaatgtgatgcatttacatggaacctgat

SEQ ID NO: 24319 - DNA, 320 bp, Zea Mays
gcagatctcctgcgtgttcgagaaaaaataaaactcgacctgcaggggggaggggtaaggacagcgtaaaacttttttctcgaatacgtaggagagttgtgtatcattgtattaaggagggagaccctcagtacaacacgcaccccacacacccactcaaacactctagatcaccggctaccattagataagaaacgaccaatcgaccacacagggctgcataaaactggcaagaggaatataaggttagtgaatggatgccagttttagaaagattcatggtgtgagtacctcaatttcattacaaaattcaatttctt

SEQ ID NO: 24320 - DNA, 1699 bp, Zea Mays
cgaggagggagcgagagagagacagaaagagacacagtcacacagcgtagggcgctgcggcctgcggggaggaagggcaccagcttggtctttctcatccattcgcaaatcgcaacaaatcttgcatcttatcttaccctagaaaaacaaatcttgcatcttcagctgtctgtacgtgtgtgtgtgagagagagacactgcgtgccgcagcagcagctctggacaggcttacaggcaagtcagagagcgagggaggagccgggaagaggaggccggagggaacaaaaggggaagtttggttctttcctctaccacctggagcgtctccttgccagccagcgcccggtccggtgagctccataccatccaagtagtgtgaggaaccgtcgtcgttgctggcgatccaagagaccaggagatgggcagcggcaggaacggcgctgtggtgaggcgatgtacagagctgcaagccttggcgcagaaagaggaggagatagatttcgctaatggaaagccaaacacctttctttcatggcaccatcgatcagggacgccagcccagctgctgcaaaggaggtactcatgcagcggtgatgagcgaggaggccccaaggaggagttcctgtgctgcccaccaccaccacctctgaaaagggcccggatgggatacgagagcatgcagggaagccatggagtcagtgatgcgaggactactgctgggggagggggactgtactgcatcgatgattacatgcaagccatggccgtgggctggagaataaaggaggagggcctcatcagatggcagaggagagatgcggctgctgctacgccttccaatctccaagccatgggatgtttggtgcaagaatctggcccctttaaggtacgccgaccagaagcacaccgtcttggttctgcgctgaagcagcaggacggcgacgactccagcaaagaggacggaaacgacggacggccccagtccagcaatgcagcgacgaaggaggacgaggcatctgagcagtgctcgctctcgctgtccctcggtaatctggacgcaaaatgcgggcgtggcatggcggcagcggcctcctcgcgaagcggcgagagcagctgcatcctcacggcctcgccggcgaggaggagctccagcgactgctccggccactcaggctgcttcgtcgtcgggccgggtggtgttgttagcctggagctttccctgtccatctgtggatcttagctagaccactccggccacttctggacgacgattctgtacatcagtggcggcgttggtgatcgccgcgtttgtttttttggtgttcgtgggcacatcatgaccgtgttagaaagtttagtaaccttagaaccatagcatgttagttctagctaagctagtatgatgtttgttacctctacctgtagccctagctggtatgtgtaaggctggctccaacaaggtcccctaaagggttctctaccctaaatatagaggatcaaacggtcctttacgctctccagcaacgtcctctaaacggtcctttaaatttagaggacgctgctggattctctatatatagagtttctctaaacgatcctctattcatttgactacttttaaataaccggtttagtaaaactaaaatatgtacaatatatttgagagtatgataaacacgtatgtacaaaaaaaataaaa

SEQ ID NO: 24321 - DNA, 1969 bp, Zea Mays
ccgctgtccctcggggcttgcgccgtctgcagcgtgacatgggccatgcatgcatgcggctgctcttctcctacaaaacctgcatgcttacttgtcgcatcaacttttactgtgcattttgactgtcgtcttgggctgatgcgattgtctgcttcccttctgagagggacagcttcatcacacaccgggcgttctgcgatgcgctcgcgcaggaaagcgcgcgcctgccgccgacgagcctcagcagcctcaccagccacctctacggcgccaccagcacgggcaacatggcgctcagcctctcgcaggtgggctcccacctcacctccactctccaggatggccaccaccaccacccgtccgcggagctcctccgactcggcgccacggccggcggcggcagcagcatcgccgcgcgcctcgaccacctcctgtcgcccaacggtgcatccgccttccgcccgccgcagggtccgccgtcgtcggcttccttcttcctcaacgcgggggcttcggtggggccggactttggggacgacgtgggcaatggcccgcactcgttcctgcagggcaacaagcctttccatggactcatgcagctgcccgacctccaaggcaacggtgctggggggcccggcggctcaggccccagcctcttcaacctgagtttctttgctaacaatggcaacagctcggggtccagtcacgagcatgcaagccaggggctcatgaacaataatgaccacttcaacggcggagcaggtggaggcggcgggggttcggaagcttcggaggctgggattttcggcggaaacttcgttggtggtggagatcaagttccaccgcccgggctctacagcgatcaagcctccatgctgccgcagatgtcggcgacagctctgctccagaaggcggcgcagatgggcgcgacctcgagcgcgaacggcggcgctgcatccatgttccgaggcttcgtgggctcatcccctcacgtgcggccggcgacgccgcacatggaacagagcgacgcgaacctaaacgacctgatgaactcgctcgctggaggtggtgtcggcgccggaggaatgttcggcagcagcaacggcgccggaggcccggggatgtttgatccgaggcagctgtgtgacatggagcacgaggtgaagttcggccatggtggcggagacatgacgcgggacttccttggcgtcggcggaggaggcatcgtgcgcgggatatcgacacctagaggagaccaccaaagcagcagcgatatgagctccctggaggccgagatgaagtcggcctcgtccttcaacggaggcaggatgccatgaccgacccatcggtcgagcttataaacaaggcataagctcgcgcacagtaagcaagagacttgatcaagcagatgcagtgagagaagagtaaggtcatcgttatatagcgtagtagcaatcaatgcaagttatcaactgagtcgcatgagtgagttcatgcatggataaagctggctagcttcttagctagctttcatcatccgaagggaccttgggtgagagagaggcgtctttctctgactaatggagtaagctagagtgcgagttggacgcatgtgatgacccctttggtcgtggtgggggttggtgttcctgttggttttcccttgctttgtagttggataatctttgttggattaagtatagtttctggtgatagaaccaataaggatgtttgtagctagcttataatgagggcgtgaattgcagcttaatttgcttcactcccctcctattttttattaccttttctctttttgcaaagcaatattctccttacaatgtcattaatcgtgcaagctgaaattcatgatattttcttgtgtcaggatgcatgcatattgtatagtcaagtgctgtgtctgcactgattaacattttttcttatttattactaaagtccatttactagg

SEQ ID NO: 24322 - DNA, 2339 bp, Zea Mays
gtcgtgcatgcacactgcatacaggtcaggcctatgctgcctgcgcgcgagagatctcgctcgtctggatctattggagttttatgagttggatgctgacaccaggagcatcttcttctctcatatgcactcgaccccgacgctgaggtgatcgcgctgtcgcccaagacgcttatggcgaccaacaggttcgtgtgcgaggtgtgcaacaaggggttccagcgcgagcagaacctgcagctgcaccggcgcgggcacaacctgccgtggaagctgaagcagaagaacccgctacaggcgcagcggcggcgcgtgtacctgtgcccggagccgacgtgcgtgcaccacgacccggcccgcgccctcggcgacctgacggggatcaagaagcacttctgccgcaagcacggcgagaagaagtggaagtgcgacaagtgctccaagcgctacgccgtgcagtcggactggaaggcgcactccaagatctgcggcacccgtgagtaccgatgcgactgcggcacactcttctccaggagggacagcttcatcacacaccgggcgttctgcgatgcgctcgcgcaggaaagcgcgcgcctgccgccgacgagcctcagcagcctcaccagccacctctacggcgccaccagcacgggcaacatggcgctcagcctctcgcaggtgggctcccacctcacctccactctccaggatggccaccaccaccacccgtccgcggagctcctccgactcggcgccacggccggcggcggcagcagcatcgccgcgcgcctcgaccacctcctgtcgcccaacggtgcatccgccttccgcccgccgcagggtccgccgtcgtcggcttccttcttcctcaacgcgggggcttcggtggggccggactttggggacgacgtgggcaatggcccgcactcgttcctgcagggcaacaagcctttccatggactcatgcagctgcccgacctccaaggcaacggtgctggggggcccggcggctcaggccccagcctcttcaacctgagtttctttgctaacaatggcaacagctcggggtccagtcacgagcatgcaagccaggggctcatgaacaataatgaccacttcaacggcggagcaggtggaggcggcgggggttcggaagcttcggaggctgggattttcggcggaaacttcgttggtggtggagatcaagttccaccgcccgggctctacagcgatcaagcctccatgctgccgcagatgtcggcgacagctctgctccagaaggcggcgcagatgggcgcgacctcgagcgcgaacggcggcgctgcatccatgttccgaggcttcgtgggctcatcccctcacgtgcggccggcgacgccgcacatggaacagagcgacgcgaacctaaacgacctgatgaactcgctcgctggaggtggtgtcggcgccggaggaatgttcggcagcagcaacggcgccggaggcccggggatgtttgatccgaggcagctgtgtgacatggagcacgaggtgaagttcggccatggtggcggagacatgacgcgggacttccttggcgtcggcggaggaggcatcgtgcgcgggatatcgacacctagaggagaccaccaaagcagcagcgatatgagctccctggaggccgagatgaagtcggcctcgtccttcaacggaggcaggatgccatgaccgacccatcggtcgagcttataaacaaggcataagctcgcgcacagtaagcaagagacttgatcaagcagatgcagtgagagaagagtaaggtcatcgttatatagcgtagtagcaatcaatgcaagttatcaactgagtcgcatgagtgagttcatgcatggataaagctggctagcttcttagctagctttcatcatccgaagggaccttgggtgagagagaggcgtctttctctgactaatggagtaagctagagtgcgagttggacgcatgtgatgacccctttggtcgtggtgggggttggtgttcctgttggttttcccttgctttgtagttggataatctttgttggattaagtatagtttctggtgatagaaccaataaggatgtttgtagctagcttataatgagggcgtgaattgcagcttaatttgcttcactcccctcctattttttattaccttttctctttttgcaaagcaatattctccttacaatgtcattaatcgtgcaagctgaaattcatgatattttcttgtgtcaggatgcatgcatattgtatagtcaagtgctgtgtctgcactgattaacattttttcttatttattactaaagtccatttactagg

SEQ ID NO: 24323 - DNA, 3027 bp, Zea Mays
ctttctctctcctcctctctgtctcttgctccgagctgtatataaaaatactccctctcctgtatatttcccgtgtgcataggcgcaggggggaaaattccagaaattgatttatagtggggcatattagatgtgggagaggaaagcagcaggagagaagagagagaaggaaaagtatgacaaggaaatgagagaaatgggagaacagccttcttagcctctccctccatgcatcctctctccaccactgctatctctcagtagcaagagcaaagcaagaggagagcgagctagcggtaccagggagagagtgagatcagttccaagcacatacatatgagaaggtacagccatcactcccctcaggaatttcggggcctctcctcttccggtctttatctccttggttctgtcgggctcttcctcgatttgtctccggatcggaggaacggcaaaaatctttctcgtctcgcccccatggtcgccgctcgcatgctcgaagaaggggaaggacgaagaacactgccgaccctattcctagcaacgggccaaagcgaccagctgcaggaaggagaagcagtgttggcgcgttcgagctggtggtgccaggataaatcgggaggaagtgatggcatcgaattcatcggcggcgttctttggtgttagggatggggaccagcaagaccagattaagccgctgatatcaccgcagcaacagctggcagcggcgctgcccggtgtggcaggcggtgttcctgcggcgtccggccaaggcgcgccgccggcgcagccaccgcccaagaagaagaggactatgcctgaccccgacgctgaggtgatcgcgctgtcgcccaagacgcttatggcgaccaacaggttcgtgtgcgaggtgtgcaacaaggggttccagcgcgagcagaacctgcagctgcaccggcgcgggcacaacctgccgtggaagctgaagcagaagaacccgctacaggcgcagcggcggcgcgtgtacctgtgcccggagccgacgtgcgtgcaccacgacccggcccgcgccctcggcgacctgacggggatcaagaagcacttctgccgcaagcacggcgagaagaagtggaagtgcgacaagtgctccaagcgctacgccgtgcagtcggactggaaggcgcactccaagatctgcggcacccgtgagtaccgatgcgactgcggcacactcttctccaggagggacagcttcatcacacaccgggcgttctgcgatgcgctcgcgcaggaaagcgcgcgcctgccgccgacgagcctcagcagcctcaccagccacctctacggcgccaccagcacgggcaacatggcgctcagcctctcgcaggtgggctcccacctcacctccactctccaggatggccaccaccaccacccgtccgcggagctcctccgactcggcgccacggccggcggcggcagcagcatcgccgcgcgcctcgaccacctcctgtcgcccaacggtgcatccgccttccgcccgccgcagggtccgccgtcgtcggcttccttcttcctcaacgcgggggcttcggtggggccggactttggggacgacgtgggcaatggcccgcactcgttcctgcagggcaacaagcctttccatggactcatgcagctgcccgacctccaaggcaacggtgctggggggcccggcggctcaggccccagcctcttcaacctgagtttctttgctaacaatggcaacagctcggggtccagtcacgagcatgcaagccaggggctcatgaacaataatgaccacttcaacggcggagcaggtggaggcggcgggggttcggaagcttcggaggctgggattttcggcggaaacttcgttggtggtggagatcaagttccaccgcccgggctctacagcgatcaagcctccatgctgccgcagatgtcggcgacagctctgctccagaaggcggcgcagatgggcgcgacctcgagcgcgaacggcggcgctgcatccatgttccgaggcttcgtgggctcatcccctcacgtgcggccggcgacgccgcacatggaacagagcgacgcgaacctaaacgacctgatgaactcgctcgctggaggtggtgtcggcgccggaggaatgttcggcagcagcaacggcgccggaggcccggggatgtttgatccgaggcagctgtgtgacatggagcacgaggtgaagttcggccatggtggcggagacatgacgcgggacttccttggcgtcggcggaggaggcatcgtgcgcgggatatcgacacctagaggagaccaccaaagcagcagcgatatgagctccctggaggccgagatgaagtcggcctcgtccttcaacggaggcaggatgccatgaccgacccatcggtcgagcttataaacaaggcataagctcgcgcacagtaagcaagagacttgatcaagcagatgcagtgagagaagagtaaggtcatcgttatatagcgtagtagcaatcaatgcaagttatcaactgagtcgcatgagtgagttcatgcatggataaagctggctagcttcttagctagctttcatcatccgaagggaccttgggtgagagagaggcgtctttctctgactaatggagtaagctagagtgcgagttggacgcatgtgatgacccctttggtcgtggtgggggttggtgttcctgttggttttcccttgctttgtagttggataatctttgttggattaagtatagtttctggtgatagaaccaataaggatgtttgtagctagcttataatgagggcgtgaattgcagcttaatttgcttcactcccctcctattttttattaccttttctctttttgcaaagcaatattctccttacaatgtcattaatcgtgcaagctgaaattcatgatattttcttgtgtcaggatgcatgcatattgtatagtcaagtgctgtgtctgcactgattaacattttttcttatttattactaaagtccatttactagg

SEQ ID NO: 24324 - DNA, 2521 bp, Zea Mays
ctttctctctcctcctctctgtctcttgctccgagctgtatataaaaatactccctctcctgtatatttcccgtgtgcataggcgcaggggggaaaattccagaaattgatttatagtggggcatattagatgtgggagaggaaagcagcaggagagaagagagagaaggaaaagtatgacaaggaaatgagagaaatgggagaacagccttcttagcctctccctccatgcatcctctctccaccactgctatctctcagtagcaagagcaaagcaagaggagagcgagctagcggtaccagggagagagtgagaccccgacgctgaggtgatcgcgctgtcgcccaagacgcttatggcgaccaacaggttcgtgtgcgaggtgtgcaacaaggggttccagcgcgagcagaacctgcagctgcaccggcgcgggcacaacctgccgtggaagctgaagcagaagaacccgctacaggcgcagcggcggcgcgtgtacctgtgcccggagccgacgtgcgtgcaccacgacccggcccgcgccctcggcgacctgacggggatcaagaagcacttctgccgcaagcacggcgagaagaagtggaagtgcgacaagtgctccaagcgctacgccgtgcagtcggactggaaggcgcactccaagatctgcggcacccgtgagtaccgatgcgactgcggcacactcttctccaggagggacagcttcatcacacaccgggcgttctgcgatgcgctcgcgcaggaaagcgcgcgcctgccgccgacgagcctcagcagcctcaccagccacctctacggcgccaccagcacgggcaacatggcgctcagcctctcgcaggtgggctcccacctcacctccactctccaggatggccaccaccaccacccgtccgcggagctcctccgactcggcgccacggccggcggcggcagcagcatcgccgcgcgcctcgaccacctcctgtcgcccaacggtgcatccgccttccgcccgccgcagggtccgccgtcgtcggcttccttcttcctcaacgcgggggcttcggtggggccggactttggggacgacgtgggcaatggcccgcactcgttcctgcagggcaacaagcctttccatggactcatgcagctgcccgacctccaaggcaacggtgctggggggcccggcggctcaggccccagcctcttcaacctgagtttctttgctaacaatggcaacagctcggggtccagtcacgagcatgcaagccaggggctcatgaacaataatgaccacttcaacggcggagcaggtggaggcggcgggggttcggaagcttcggaggctgggattttcggcggaaacttcgttggtggtggagatcaagttccaccgcccgggctctacagcgatcaagcctccatgctgccgcagatgtcggcgacagctctgctccagaaggcggcgcagatgggcgcgacctcgagcgcgaacggcggcgctgcatccatgttccgaggcttcgtgggctcatcccctcacgtgcggccggcgacgccgcacatggaacagagcgacgcgaacctaaacgacctgatgaactcgctcgctggaggtggtgtcggcgccggaggaatgttcggcagcagcaacggcgccggaggcccggggatgtttgatccgaggcagctgtgtgacatggagcacgaggtgaagttcggccatggtggcggagacatgacgcgggacttccttggcgtcggcggaggaggcatcgtgcgcgggatatcgacacctagaggagaccaccaaagcagcagcgatatgagctccctggaggccgagatgaagtcggcctcgtccttcaacggaggcaggatgccatgaccgacccatcggtcgagcttataaacaaggcataagctcgcgcacagtaagcaagagacttgatcaagcagatgcagtgagagaagagtaaggtcatcgttatatagcgtagtagcaatcaatgcaagttatcaactgagtcgcatgagtgagttcatgcatggataaagctggctagcttcttagctagctttcatcatccgaagggaccttgggtgagagagaggcgtctttctctgactaatggagtaagctagagtgcgagttggacgcatgtgatgacccctttggtcgtggtgggggttggtgttcctgttggttttcccttgctttgtagttggataatctttgttggattaagtatagtttctggtgatagaaccaataaggatgtttgtagctagcttataatgagggcgtgaattgcagcttaatttgcttcactcccctcctattttttattaccttttctctttttgcaaagcaatattctccttacaatgtcattaatcgtgcaagctgaaattcatgatattttcttgtgtcaggatgcatgcatattgtatagtcaagtgctgtgtctgcactgattaacattttttcttatttattactaaagtccatttactagg

SEQ ID NO: 24325 - DNA, 3653 bp, Zea Mays
ccaaaattccctccccaattctctcgtgctttctctcgaccgccgccaccgcctcctctcctccgccaccgccaccgccaccgacgcctccaaaaccctacaccccagcagagtcagcaagcgttgtagcaggctgcggccgctgcctcgctgcgatgcaccgcgccttcgaggagatctccgacgaggagtggtctaatcacaccttcgagccctcgcgcgtcctcaagcgccctaatcagcggccctcgcagcctccgccgtcgatcgattcattcatctacaaccccaaggcttgctccgccgccggcaccagcactgcaactgtcgtcctctcggacgacgacagcgacttcgacctaggtgcggacgggggttcccgccgcgctgcgaagagccaacgcgtcctcaagcgcccgcataacggggccccatcgcggccttctctgccagttaaatcgtcccgccgcaatccccaaccatccaatgccgctgccgcctttgggttctccgatagtgaggacgatgacttcgatcttcctacgtcgcctttgaggacgtcaagccttcgccgcaaaggaaagaaccaacgccccctcaaggcccctcagctcaaacctcacttgcgggctcctccgccacccaactcttccagccataatccgaaacggtccaaatttgcctccgatgtgaagctttccaacagtgaggacgacgatttcgacctcacaaaaacgttaagcctcaacagcagcacaaataggcaacacatccagaagcgtccacagcacaagccccgtttgcagcatcgtcagtcctttggctcatcttgcggcaatcagaagcattccaaggctgttgccaccacacggctatctgacagtgatgatgatgacttcaacatcacggacaatgactttgaccttccagcttcgcattcaaggatatcacgcccacgccgcactactagttgccgccggttgacgagttttgctattgacatctctgaggaagacgaagaagaccttgctgatgatgacttcgactaccaagacccaaggcctccccagcaacgctcctctggccgccgctttgtggtcggggacgatgatgacagtgatgtgcctgtagctctggaggaggaggatggggtgaattggtcggagctggagaaggaggacgtagatgaggactacaatggggtgagaagtgtacatgtggaggagcccgagggagatgtagtgggaatggcattgcacaaatgttcacgcatctcgtcagatctgcgcaaagagctttttggttcatcagcgcagaattgtgaaagctactgtgagatagatgcttccacttgtggtattgttactcaggaagacgtaaatgctgcatgcacacgtgagaagtctgggtttgagcctgtgttgaagccttatcagcttgtgggagtcaatttccttctcctactgcatcggaaaagcattggtggagcaattttggctgatgaaatgggtctagggaagacagtgcaggctgtcacttatcttaatctattacagcatctatataatgacccaggtccacatctgatagtttgcccagcttccgtgttggagaattgggaaagagaactcaggaaatggtgcccttcgttttcgatcatcatgtttcatggagctgcaaggactacctactcaaaggaattaagctccttaggaaaggctggctgtccagctccatttaatgtcctccttgttggctactcactttttgaaaggcggagtgctcagcaaaaggatgatcgtagggccctcaaaagatggcgatggagctgtgttttgatggatgaagcacatgttttgaaagataagggtagcttccgatggagaaacctgatggctgttgcgcaacatgctcgccaaaggctaatgctgacaggaactcctctccaaaatgatttgcatgagctatggtcattgttggagttcatgatgcctgatatatttgctactggggatgttgatctgaagaagctgctgaatgcagaagatcgcgaactaatttcacagataaagtccattttagggccatttattcttagacgtttgaagtcagatgtaatgcagcagcttgttcctaaaatccaacatgttaagtttgttgtcatgggcacagagcagtctgaagcttacaaaaatgccataaatgagtaccgtgctgcttgccaggctcgtagtgccaagtcttcagatggcatttccaataatgttgctggattgattccaaagcgacaaatatcaaactattttacacagtttcgtaagattgcgaatcaccctttgcttataaggtgtatttatggtgacaaagatgttgatcgaattgcacggttgctgtaccctaaaggtgcatttggcttcgaatgctccttggagagagcaatacaagagctaaagaactacagtgatttcaatatccaccaactattattgtcatatggtgatgtgggcacaaagggcgctctaaaggatgagcatgtttttgcatcggcaaaatgtcaggccttaggggagcttttaccttctctggcaaatgatggtcacagagtactcatatttagtcagtggaccacaatgcttgacatccttgaatgggcattggaaattataggagttacatatagacgccttgatggagggaccgctgtgacagaaaggcagactatagtggacacgttcaacaacgatctttctatatttgcatgtttactttctacaagagctggaggccagggtctgaaccttgtaggagctgacacagtcattatacatgatatggattttaacccccagatggatcggcaagctgaggaccgttgccatcgcattggacaacagaaacctgtcactatctataggtgctagtgacaaaggattcagttgatgaaaacatctatgagattgcaaggcggaagctagtactagacgctgcaattcttcattctggagcagagttggacaatagtaccgatgtaccagagaagacaatgggggagattttggcatctcttctcctggtctgaagttctaaccctggagtttcttgaagcgtacgtccaagcatggttctgtcccgagaaggtgacaagccaagaactgacaagaaacactgttatctggaggcgcggcgtcctggtgccctttccatgaaggaaaaggtcttagcacgccctgggtaagttgctattggcatgcatcattgatggaatgagcgctgtcccccgaccatggagctgccctcgtggagggacgtgatttggtagttaattgctggtgggtaaagctgggtttatgggctcagtgctgggccactttgttgctcttgctctctgaatttctgataccgtcgtctggatgtcttgggaatggtccgagccttttctgtttggtactacttcagcgatgctgtgcataagcgacatgcggaaacggccacgagcctcgtgtgcctagcggtgtacgggtgcggtcagagtgtctccttttgagtaatcgactaatcgtcctatctgtcgtaacgatggcgcaggacatcctgatgcctgaatctacgggcttcgtacattctctttcgtgatgttcaaatcttcccttgcg

SEQ ID NO: 24326 - DNA, 3676 bp, Zea Mays
cccagttctcccacttccggggccgccaaaattccctccccaattctctcgtgctttctctcgaccgccgccaccgcctcctctcctccgccaccgccaccgccaccgacgcctccaaaaccctacaccccagcagagtcagcaagcgttgtagcaggctgcggccgctgcctcgctgcgatgcaccgcgccttcgaggagatctccgacgaggagtggtctaatcacaccttcgagccctcgcgcgtcctcaagcgccctaatcagcggccctcgcagcctccgccgtcgatcgattcattcatctacaaccccaaggcttgctccgccgccggcaccagcactgcaactgtcgtcctctcggacgacgacagcgacttcgacctaggtgcggacgggggttcccgccgcgctgcgaagagccaacgcgtcctcaagcgcccgcataacggggccccatcgcggccttctctgccagttaaatcgtcccgccgcaatccccaaccatccaatgccgctgccgcctttgggttctccgatagtgaggacgatgacttcgatcttcctacgtcgcctttgaggacgtcaagccttcgccgcaaaggaaagaaccaacgccccctcaaggcccctcagctcaaacctcacttgcgggctcctccgccacccaactcttccagccataatccgaaacggtccaaatttgcctccgatgtgaagctttccaacagtgaggacgacgatttcgacctcacaaaaacgttaagcctcaacagcagcacaaataggcaacacatccagaagcgtccacagcacaagccccgtttgcagcatcgtcagtcctttggctcatcttgcggcaatcagaagcattccaaggctgttgccaccacacggctatctgacagtgatgatgatgacttcaacatcacggacaatgactttgaccttccagcttcgcattcaaggatatcacgcccacgccgcactactagttgccgccggttgacgagttttgctattgacatctctgaggaagacgaagaagaccttgctgatgatgacttcgactaccaagacccaaggcctccccagcaacgctcctctggccgccgctttgtggtcggggacgatgatgacagtgatgtgcctgtagctctggaggaggaggatggggtgaattggtcggagctggagaaggaggacgtagatgaggactacaatggggtgagaagtgtacatgtggaggagcccgagggagatgtagtgggaatggcattgcacaaatgttcacgcatctcgtcagatctgcgcaaagagctttttggttcatcagcgcagaattgtgaaagctactgtgagatagatgcttccacttgtggtattgttactcaggaagacgtaaatgctgcatgcacacgtgagaagtctgggtttgagcctgtgttgaagccttatcagcttgtgggagtcaatttccttctcctactgcatcggaaaagcattggtggagcaattttggctgatgaaatgggtctagggaagacagtgcaggctgtcacttatcttaatctattacagcatctatataatgacccaggtccacatctgatagtttgcccagcttccgtgttggagaattgggaaagagaactcaggaaatggtgcccttcgttttcgatcatcatgtttcatggagctgcaaggactacctactcaaaggaattaagctccttaggaaaggctggctgtccagctccatttaatgtcctccttgttggctactcactttttgaaaggcggagtgctcagcaaaaggatgatcgtagggccctcaaaagatggcgatggagctgtgttttgatggatgaagcacatgttttgaaagataagggtagcttccgatggagaaacctgatggctgttgcgcaacatgctcgccaaaggctaatgctgacaggaactcctctccaaaatgatttgcatgagctatggtcattgttggagttcatgatgcctgatatatttgctactggggatgttgatctgaagaagctgctgaatgcagaagatcgcgaactaatttcacagataaagtccattttagggccatttattcttagacgtttgaagtcagatgtaatgcagcagcttgttcctaaaatccaacatgttaagtttgttgtcatgggcacagagcagtctgaagcttacaaaaatgccataaatgagtaccgtgctgcttgccaggctcgtagtgccaagtcttcagatggcatttccaataatgttgctggattgattccaaagcgacaaatatcaaactattttacacagtttcgtaagattgcgaatcaccctttgcttataaggtgtatttatggtgacaaagatgttgatcgaattgcacggttgctgtaccctaaaggtgcatttggcttcgaatgctccttggagagagcaatacaagagctaaagaactacagtgatttcaatatccaccaactattattgtcatatggtgatgtgggcacaaagggcgctctaaaggatgagcatgtttttgcatcggcaaaatgtcaggccttaggggagcttttaccttctctggcaaatgatggtcacagagtactcatatttagtcagtggaccacaatgcttgacatccttgaatgggcattggaaattataggagttacatatagacgccttgatggagggaccgctgtgacagaaaggcagactatagtggacacgttcaacaacgatctttctatatttgcatgtttactttctacaagagctggaggccagggtctgaaccttgtaggagctgacacagtcattatacatgatatggattttaacccccagatggatcggcaagctgaggaccgttgccatcgcattggacaacagaaacctgtcactatctataggctagtgacaaaggattcagttgatgaaaacatctatgagattgcaaggcggaagctagtactagacgctgcaattcttcattctggagcagagttggacaatagtaccgatgtaccagagaagacaatgggggagattttggcatctcttctcctggtctgaagttctaaccctggagtttcttgaagcgtacgtccaagcatggttctgtcccgagaaggtgacaagccaagaactgacaagaaacactgttatctggaggcgcggcgtcctggtgccctttccatgaaggaaaaggtcttagcacgccctgggtaagttgctattggcatgcatcattgatggaatgagcgctgtcccccgaccatggagctgccctcgtggagggacgtgatttggtagttaattgctggtgggtaaagctgggtttatgggctcagtgctgggccactttgttgctcttgctctctgaatttctgataccgtcgtctggatgtcttgggaatggtccgagccttttctgtttggtactacttcagcgatgctgtgcataagcgacatgcggaaacggccacgagcctcgtgtgcctagcggtgtacgggtgcggtcagagtgtctccttttgagtaatcgactaatcgtcctatctgtcgtaacgatggcgcaggacatcctgatgcctgaatctacgggcttcgtacattctctttcgtgatgttcaaatcttcccttgcg

SEQ ID NO: 24327 - DNA, 3214 bp, Zea Mays
cagcttcggcgccgcccagttctcccacttccggggccgccaaaattccctccccaattctctcgtgctttctctcgaccgccgccaccgcctcctctcctccgccaccgccaccgccaccgacgcctccaaaaccctacaccccagcagagtcagcaagcgttgtagcaggctgcggccgctgcctcgctgcgatgcaccgcgccttcgaggagatctccgacgaggagtggtctaatcacaccttcgagccctcgcgcgtcctcaagcgccctaatcagcggccctcgcagcctccgccgtcgatcgattcattcatctacaaccccaaggcttgctccgccgccggcaccagcactgcaactgtcgtcctctcggacgacgacagcgacttcgacctaggtgcggacgggggttcccgccgcgctgcgaagagccaacgcgtcctcaagcgcccgcataacggggccccatcgcggccttctctgccagttaaatcgtcccgccgcaatccccaaccatccaatgccgctgccgcctttgggttctccgatagtgaggacgatgacttcgatcttcctacgtcgcctttgaggacgtcaagccttcgccgcaaaggaaagaaccaacgccccctcaaggcccctcagctcaaacctcacttgcgggctcctccgccacccaactcttccagccataatccgaaacggtccaaatttgcctccgatgtgaagctttccaacagtgaggacgacgatttcgacctcacaaaaacgttaagcctcaacagcagcacaaataggcaacacatccagaagcgtccacagcacaagccccgtttgcagcatcgtcagtcctttggctcatcttgcggcaatcagaagcattccaaggctgttgccaccacacggctatctgacagtgatgatgatgacttcaacatcacggacaatgactttgaccttccagcttcgcattcaaggatatcacgcccacgccgcactactagttgccgccggttgacgagttttgctattgacatctctgaggaagacgaagaagaccttgctgatgatgacttcgactaccaagacccaaggcctccccagcaacgctcctctggccgccgctttgtggtcggggacgatgatgacagtgatgtgcctgtagctctggaggaggaggatggggtgaattggtcggagctggagaaggaggacgtagatgaggactacaatggggtgagaagtgtacatgtggaggagcccgagggagatgtagtgggaatggcattgcacaaatgttcacgcatctcgtcagatctgcgcaaagagctttttggttcatcagcgcagaattgtgaaagctactgtgagatagatgcttccacttgtggtattgttactcaggaagacgtaaatgctgcatgcacacgtgagaagtctgggtttgagcctgtgttgaagccttatcagcttgtgggagtcaatttccttctcctactgcatcggaaaagcattggtggagcaattttggctgatgaaatgggtctagggaagacagtgcaggctgtcacttatcttaatctattacagcatctatataatgacccaggtccacatctgatagtttgcccagcttccgtgttggagaattgggaaagagaactcaggaaatggtgcccttcgttttcgatcatcatgtttcatggagctgcaaggactacctactcaaaggaattaagctccttaggaaaggctggctgtccagctccatttaatgtcctccttgttggctactcactttttgaaaggcggagtgctcagcaaaaggatgatcgtagggccctcaaaagatggcgatggagctgtgttttgatggatgaagcacatgttttgaaagataagggtagcttccgatggagaaacctgatggctgttgcgcaacatgctcgccaaaggctaatgctgacaggaactcctctccaaaatgatttgcatgagctatggtcattgttggagttcatgatgcctgatatatttgctactggggatgttgatctgaagaagctgctgaatgcagaagatcgcgaactaatttcacagataaagtccattttagggccatttattcttagacgtttgaagtcagatgtaatgcagcagcttgttcctaaaatccaacatgttaagtttgttgtcatgggcacagagcagtctgaagcttacaaaaatgccataaatgagtaccgtgctgcttgccaggctcgtagtgccaagtcttcagatggcatttccaataatgttgctggattgattccaaagcgacaaatatcaaactattttacacagtttcgtaagattgcgaatcaccctttgcttataaggtgtatttatggtgacaaagatgttgatcgaattgcacggttgctgtaccctaaaggtgcatttggcttcgaatgctccttggagagagcaatacaagagctaaagaactacagtgatttcaatatccaccaactattattgtcatatggtgatgtgggcacaaagggcgctctaaaggatgagcatgtttttgcatcggcaaaatgtcaggccttaggggagcttttaccttctctggcaaatgatggtcacagagtactcatatttagtcagtggaccacaatgcttgacatccttgaatgggcattggaaattataggagttacatatagacgccttgatggagggaccgctgtgacagaaaggcagactatagtggacacgttcaacaacgatctttctatatttgcatgtttactttctacaagagctggaggccagggtctgaaccttgtaggagctgacacagtcattatacatgatatggattttaacccccagatggatcggcaagctgaggaccgttgccatcgcattggacaacagaaacctgtcactatctataggctagtgacaaaggattcagttgatgaaaacatctatgagattgcaaggcggaagctagtactagacgctgcaattcttcattctggagcagagttggacaatagtaccgatgtaccagagaagacaatgggggagattttggcatctcttctcctggtctgaagttctaaccctggagtttcttgaagacaggagaactccatatcattgctttaacaaagagagttacaacacctaaactgttgttgactcatttgtgg

SEQ ID NO: 24328 - DNA, 3648 bp, Zea Mays
ccaaaattccctccccaattctctcgtgctttctctcgaccgccgccaccgcctcctctcctccgccaccgccaccgccaccgacgcctccaaaaccctacaccccagcagagtcagcaagcgttgtagcaggctgcggccgctgcctcgctgcgatgcaccgcgccttcgaggagatctccgacgaggagtggtctaatcacaccttcgagccctcgcgcgtcctcaagcgccctaatcagcggccctcgcagcctccgccgtcgatcgattcattcatctacaaccccaaggcttgctccgccgccggcaccagcactgcaactgtcgtcctctcggacgacgacagcgacttcgacctaggtgcggacgggggttcccgccgcgctgcgaagagccaacgcgtcctcaagcgcccgcataacggggccccatcgcggccttctctgccagttaaatcgtcccgccgcaatccccaaccatccaatgccgctgccgcctttgggttctccgatagtgaggacgatgacttcgatcttcctacgtcgcctttgaggacgtcaagccttcgccgcaaaggaaagaaccaacgccccctcaaggcccctcagctcaaacctcacttgcgggctcctccgccacccaactcttccagccataatccgaaacggtccaaatttgcctccgatgtgaagctttccaacagtgaggacgacgatttcgacctcacaaaaacgttaagcctcaacagcagcacaaataggcaacacatccagaagcgtccacagcacaagccccgtttgcagcatcgtcagtcctttggctcatcttgcggcaatcagaagcattccaaggctgttgccaccacacggctatctgacagtgatgatgatgacttcaacatcacggacaatgactttgaccttccagcttcgcattcaaggatatcacgcccacgccgcactactagttgccgccggttgacgagttttgctattgacatctctgaggaagacgaagaagaccttgctgatgatgacttcgactaccaagacccaaggcctccccagcaacgctcctctggccgccgctttgtggtcggggacgatgatgacagtgatgtgcctgtagctctggaggaggaggatggggtgaattggtcggagctggagaaggaggacgtagatgaggactacaatggggtgagaagtgtacatgtggaggagcccgagggagatgtagtgggaatggcattgcacaaatgttcacgcatctcgtcagatctgcgcaaagagctttttggttcatcagcgcagaattgtgaaagctactgtgagatagatgcttccacttgtggtattgttactcaggaagacgtaaatgctgcatgcacacgtgagaagtctgggtttgagcctgtgttgaagccttatcagcttgtgggagtcaatttccttctcctactgcatcggaaaagcattggtggagcaattttggctgatgaaatgggtctagggaagacagtgcaggctgtcacttatcttaatctattacagcatctatataatgacccaggtccacatctgatagtttgcccagcttccgtgttggagaattgggaaagagaactcaggaaatggtgcccttcgttttcgatcatcatgtttcatggagctgcaaggactacctactcaaaggaattaagctccttaggaaaggctggctgtccagctccatttaatgtcctccttgttggctactcactttttgaaaggcggagtgctcagcaaaaggatgatcgtagggccctcaaaagatggcgatggagctgtgttttgatggatgaagcacatgttttgaaagataagggtagcttccgatggagaaacctgatggctgttgcgcaacatgctcgccaaaggctaatgctgacaggaactcctctccaaaatgatttgcatgagctatggtcattgttggagttcatgatgcctgatatatttgctactggggatgttgatctgaagaagctgctgaatgcagaagatcgcgaactaatttcacagataaagtccattttagggccatttattcttagacgtttgaagtcagatgtaatgcagcagcttgttcctaaaatccaacatgttaagtttgttgtcatgggcacagagcagtctgaagcttacaaaaatgccataaatgagtaccgtgctgcttgccaggctcgtagtgccaagtcttcagatggcatttccaataatgttgctggattgattccaaagcgacaaatatcaaactattttacacagtttcgtaagattgcgaatcaccctttgcttataaggtgtatttatggtgacaaagatgttgatcgaattgcacggttgctgtaccctaaaggtgcatttggcttcgaatgctccttggagagagcaatacaagagctaaagaactacagtgatttcaatatccaccaactattattgtcatatggtgatgtgggcacaaagggcgctctaaaggatgagcatgtttttgcatcggcaaaatgtcaggccttaggggagcttttaccttctctggcaaatgatggtcacagagtactcatatttagtcagtggaccacaatgcttgacatccttgaatgggcattggaaattataggagttacatatagacgccttgatggagggaccgctgtgacagaaaggcagactatagtggacacgttcaacaacgatctttctatatttgcatgtttactttctacaagagctggaggccagggtctgaaccttgtaggagctgacacagtcattatacatgatatggattttaacccccagatggatcggcaagctgaggaccgttgccatcgcattggacaacagaaacctgtcactatctataggctagtgacaaaggattcagttgatgaaaacatctatgagattgcaaggcggaagctagtactagacgctgcaattcttcattctggagcagagttggacaatagtaccgatgtaccagagaagacaatgggggagattttggcatctcttctcctggtctgaagttctaaccctggagtttcttgaaggtatacaattctacccgtgggatatcttcaacaatgggtttttggccttcatttaagcttaccattcaccctggttaatgtcttgaatcttgaggtcctaagatgtgcatccatgtatcctttttgctcttgaaacctcccatcttttagtctgccttatccatcttttgttctatgaatggcgtgctataaactgctggatttccgaagtgtttatggttctacataatgacataatgtttaaggttactgtaggttgtaatggagtccggttcccacccccccctctgatataggaagaactgaaatctgaagtaatacatctgtaccaaagttttaacttgttttaaatgaaacgcagaatagttccaaagtcgcaacattttcttcagtctgtaccattatttatctttatttttattttatctgcacaagtaggtacggggtacctaagctacacttaacattgtcaggatacgttttagagtgcagtttgaccacatgtacatgtatcttgacatactagtctaactgtcagtttgaga

SEQ ID NO: 24329 - DNA, 1719 bp, Zea Mays
ctcaattgctcacaacatttttgtcgatggtgtagcttgtgatcattcaattttggctgatgaaatgggtctagggaagacagtgcaggctgtcacttatcttaatctattacagcatctatataatgacccaggtccacatctgatagtttgcccagcttccgtgttggagaattgggaaagagaactcaggaaatggtgcccttcgttttcgatcatcatgtttcatggagctgcaaggactacctactcaaaggaattaagctccttaggaaaggctggctgtccagctccatttaatgtcctccttgttggctactcactttttgaaaggcggaggtttggagtgactgctttagtgcttttgcatgacacagcagaatgtcatattcagaacattgaaaatttatttataatttaaaacgtttatgtagtgctcagcaaaaggatgatcgtagggccctcaaaagatggcgatggagctgtgttttgatggatgaagcacatgttttgaaagataagggtagcttccgatggagaaacctgatggctgttgcgcaacatgctcgccaaaggctaatgctgacaggaactcctctccaaaatgatttgcatgagctatggtcattgttggagttcatgatgcctgatatatttgctactggggatgttgatctgaagaagctgctgaatgcagaagatcgcgaactaatttcacagataaagtccattttagggccatttattcttagacgtttgaagtcagatgtaatgcagcagcttgttcctaaaatccaacatgttaagtttgttgtcatgggcacagagcagtctgaagcttacaaaaatgccataaatgagtaccgtgctgcttgccaggctcgtagtgccaagtcttcagatggcatttccaataatgttgctggattgattccaaagcgacaaatatcaaactattttacacagtttcgtaagattgcgaatcaccctttgcttataaggtgtatttatggtgacaaagatgttgatcgaattgcacggttgctgtaccctaaaggtgcatttggcttcgaatgctccttggagagagcaatacaagagctaaagaactacagtgatttcaatatccaccaactattattgtcatatggtgatgtgggcacaaagggcgctctaaaggatgagcatgtttttgcatcggcaaaatgtcaggccttaggggagcttttaccttctctggcaaatgatggtcacagagtactcatatttagtcagtggaccacaatgcttgacatccttgaatgggcattggaaattataggagttacatatagacgccttgatggagggaccgctgtgacagaaaggcagactatagtggacacgttcaacaacgatctttctatatttgcatgtttactttctacaagagctggaggccagggtctgaaccttgtaggagctgacacagtcattatacatgatatggattttaacccccagatggatcggcaagctgaggaccgttgccatcgcattggacaacagaaacctgtcactatctataggtgctactgaaatgagtccgcgagagagggtggaaaacaaatcgcaactaaatggagagtgtgacacgcggatttgttttaccgaggttcggttcttgcaaacctactccccgttgaggaagccacaaaggccgggtctctttcaaccctt

SEQ ID NO: 24330 - DNA, 3149 bp, Zea Mays
cagttctcccacttccggggccgccaaaattccctccccaattctctcgtgctttctctcgaccgccgccaccgcctcctctcctccgccaccgccaccgccaccgacgcctccaaaaccctacaccccagcagagtcagcaagcgttgtagcaggctgcggccgctgcctcgctgcgatgcaccgcgccttcgaggagatctccgacgaggagtggtctaatcacaccttcgagccctcgcgcgtcctcaagcgccctaatcagcggccctcgcagcctccgccgtcgatcgattcattcatctacaaccccaaggcttgctccgccgccggcaccagcactgcaactgtcgtcctctcggacgacgacagcgacttcgacctaggtgcggacgggggttcccgccgcgctgcgaagagccaacgcgtcctcaagcgcccgcataacggggccccatcgcggccttctctgccagttaaatcgtcccgccgcaatccccaaccatccaatgccgctgccgcctttgggttctccgatagtgaggacgatgacttcgatcttcctacgtcgcctttgaggacgtcaagccttcgccgcaaaggaaagaaccaacgccccctcaaggcccctcagctcaaacctcacttgcgggctcctccgccacccaactcttccagccataatccgaaacggtccaaatttgcctccgatgtgaagctttccaacagtgaggacgacgatttcgacctcacaaaaacgttaagcctcaacagcagcacaaataggcaacacatccagaagcgtccacagcacaagccccgtttgcagcatcgtcagtcctttggctcatcttgcggcaatcagaagcattccaaggctgttgccaccacacggctatctgacagtgatgatgatgacttcaacatcacggacaatgactttgaccttccagcttcgcattcaaggatatcacgcccacgccgcactactagttgccgccggttgacgagttttgctattgacatctctgaggaagacgaagaagaccttgctgatgatgacttcgactaccaagacccaaggcctccccagcaacgctcctctggccgccgctttgtggtcggggacgatgatgacagtgatgtgcctgtagctctggaggaggaggatggggtgaattggtcggagctggagaaggaggacgtagatgaggactacaatggggtgagaagtgtacatgtggaggagcccgagggagatgtagtgggaatggcattgcacaaatgttcacgcatctcgtcagatctgcgcaaagagctttttggttcatcagcgcagaattgtgaaagctactgtgagatagatgcttccacttgtggtattgttactcaggaagacgtaaatgctgcatgcacacgtgagaagtctgggtttgagcctgtgttgaagccttatcagcttgtgggagtcaatttccttctcctactgcatcggaaaagcattggtggagcaattttggctgatgaaatgggtctagggaagacagtgcaggctgtcacttatcttaatctattacagcatctatataatgacccaggtccacatctgatagtttgcccagcttccgtgttggagaattgggaaagagaactcaggaaatggtgcccttcgttttcgatcatcatgtttcatggagctgcaaggactacctactcaaaggaattaagctccttaggaaaggctggctgtccagctccatttaatgtcctccttgttggctactcactttttgaaaggcggagcaaaaggatgatcgtagggccctcaaaagatggcgatggagctgtgttttgatggatgaagcacatgttttgaaagataagggtagcttccgatggagaaacctgatggctgttgcgcaacatgctcgccaaaggctaatgctgacaggaactcctctccaaaatgatttgcatgagctatggtcattgttggagttcatgatgcctgatatatttgctactggggatgttgatctgaagaagctgctgaatgcagaagatcgcgaactaatttcacagataaagtccattttagggccatttattcttagacgtttgaagtcagatgtaatgcagcagcttgttcctaaaatccaacatgttaagtttgttgtcatgggcacagagcagtctgaagcttacaaaaatgccataaatgagtaccgtgctgcttgccaggctcgtagtgccaagtcttcagatggcatttccaataatgttgctggattgattccaaagcgacaaatatcaaactattttacacagtttcgtaagattgcgaatcaccctttgcttataaggtgtatttatggtgacaaagatgttgatcgaattgcacggttgctgtaccctaaaggtgcatttggcttcgaatgctccttggagagagcaatacaagagctaaagaactacagtgatttcaatatccaccaactattattgtcatatggtgatgtgggcacaaagggcgctctaaaggatgagcatgtttttgcatcggcaaaatgtcaggccttaggggagcttttaccttctctggcaaatgatggtcacagagtactcatatttagtcagtggaccacaatgcttgacatccttgaatgggcattggaaattataggagttacatatagacgccttgatggagggtatgttctttatttagttttgtaatcaaaatttactctgtttattagctattttgtatttcttccaggaccgctgtgacagaaaggcagactatagtggacacgttcaacaacgatctttctatatttgcatgtttactttctacaagagctggaggccagggtctgaaccttgtaggagctgacacagtcattatacatgatatggattttaacccccagatggatcggcaagctgaggaccgttgccatcgcattggacaacagaaacctgtcactatctataggtgctactgaaatgagtccgcgagagagggtggaaaacaaatcgcaactaaatggagagtgtgacacgcggatttgttttaccgaggttcggttcttgcaaacctactccccgttgaggaagccacaaaggccgggtctctttcaaccctt

SEQ ID NO: 24331 - DNA, 728 bp, Zea Mays
cgccgcttccgcatcggcgccgtccaaggttaccgaggccgagctcgtgcgcctccgcgaggaggagcggctccgcctcgagcgggaggcagaggccgccaagaagcgcgccgcgcgggtcgccgaggaggaggagtacgagcgcgtagtcctcgtcgaaaacactaacagggatgattccctcatcgaggccaggtcggttgaggaggctatcgcgcggatgtcggtcgtggatccgcaggcgtccctgcccgctgacaagcatcctgagcgtcgcctcaagtcgacctttaaggcatttgaagaggcagagctccctaagctgaaggaagaaaagccaggtctaacgctgcaccaatacaaagacatgatatggaaactgtggaagaagtccccagacaaccctcttaaccaggctgctgactgaattttgcaaccctactgaatcttatgtaaaggccaaccttcaaacagcactggattggtgaattgtgttggtacctttttcttggagtggatgcgcaccaaaccttgaatcagaaaggtgttccagtctcggctaataatttccaaatcactggagtgtatactgtgggaggtgctcttgtttagactcgactagtcgagtttcctttttgtgtttagtatgatggttgggcacgtgctggtaccgaacgtgcttcactcattatagtattttgattcttgaacaaattgtgtggtggacg

SEQ ID NO: 24332 - DNA, 1991 bp, Zea Mays
atatgtccttattgtaggcgtgcacacccgtgttctgcctctcgacgcctgtctgcccgcgccccccgcttgtgatgcccatctcgtctccccgctgtggcagccgccttcgcgtccgccgcgagatccctccgcgcacgggcgcgtcccccacaaaccgcgctccgtgaaatccgcactcccctcgccgcctccccagcccgcagcctctcctcaacctccctccccaaggagctggcggcggcgcgactgcgtcgggagaggacgcagaggacgccgcgcgggggctgcggcaggagctcgactccgagcaggcctccccggagatggcagccagatccggctattgagccccctaaccgagcggatccaagatagttttttttgtctccagttgctctacacagcaagtctatgaggaaggagcaaaagaagttgctctttcagttgtcagcggaattaatttaactcaagcatacttgcctatggcaaacaagcagtggacttacacaatgatcgaaatgacagactgttcgtgctatcggtttggaaagaacatgtggaaagctaatctcggatcttgcttccttcaggtacagacaacccttgtttttataggagttgtcagagaattgttttcgtgattaaacatgtgtgtttgtttagtggctggtattgttatcatatacccttgtttttagttctatacatattccttaagcatgagcaaattgggggcatttttagtgaagcaattactggtatgtacatgcaattactggtatgtacatggttaatcaaataatttgcatcatggatgttgttttagtgattaatcactcagaaccgatttcctgatgaactggatacactgtttagtgccagctattatttaagcacaagaagtagtcatatacccttgtttttatgtctgtacataccacctggaaatttacacatggggccattttttagtgaagcaattactaaacctgtatagttctggtggctgctataatttttcctgattaatcagagaattgttttagtgattaaccatgtgtgtttagtggctggtattgttgtcatataccttgtttttaggtctgtacatactacctgagcatgaccacatcagccttatgtttgaacaatttcacacatttacatttgtgaatgtgttgaccgtaagcatcatctttatttaaatcagaaacttggttttacaatgatgtctcattgaagttcttgcttttccttgtttgcaaatctgaaatacccttgtatgttctggcggaaagaagacccaaaggaccttgaacagcaaaatctaaggtttcaacattgcagacacacaagagtccagcatgcgccaacgctcctgcagtttgtgacagattgctcaaagaaaagcaagacagctcgccaatcctagaagtggaaaaaaacaacatagaataattagccagctacagggagtaaaccattaagagaagaaacatcgtaatgccatgtttccaaatgggcacaaagaaacttcaagcacctctagacggaagctgtctgcactgaagatcaggacacgaatatcgcgagctttatcaaggctcgccttgtgcggaaggtgtatttctgtgagatctccaagatgaagcattagggggtcaatcgccccagattttacatgtagctaacttagtagggcacccataatccataatttattctctgtagttgtagcagcgacctagaggtgttattctgtagcacattgtgtaacatgtaggagagagataaacacatatccccattctttctactgaaacaccagaaatagttgctcttgctccataattcattaatgtgaacttctgaagccatgccaaggtcttatattgatcctctgttgtcatattgataaaaatagggtatgtaaaaccttttctcataacagtttaacacatattttatatataagttatcgtaatatt

SEQ ID NO: 24333 - DNA, 1995 bp, Zea Mays
atatgtccttattgtaggcgtgcacacccgtgttctgcctctcgacgcctgtctgcccgcgccccccgcttgtgatgcccatctcgtctccccgctgtggcagccgccttcgcgtccgccgcgagatccctccgcgcacgggcgcgtcccccacaaaccgcgctccgtgaaatccgcactcccctcgccgcctccccagcccgcagcctctcctcaacctccctccccaaggagctggcggcggcgcgactgcgtcgggagaggacgcagaggacgccgcgcgggggctgcggcaggagctcgactccgagcaggcctccccggagatggcagccagatccggctattgagccccctaaccgagcggatccaagttgctctacacagcaagtctatgaggaaggagcaaaagaagttgctctttcagttgtcagcggaattaatttaactcaagcatacttgcctatggcaaacaagcagtggacttacacaatgatcgaaatgacagagtatactgttcgtgctatcggtttggaaagaacatgtggaaagctaatctcggatcttgcttccttcaggtacagacaacccttgtttttataggagttgtcagagaattgttttcgtgattaaacatgtgtgtttgtttagtggctggtattgttatcatatacccttgtttttagttctatacatattccttaagcatgagcaaattgggggcatttttagtgaagcaattactggtatgtacatgcaattactggtatgtacatggttaatcaaataatttgcatcatggatgttgttttagtgattaatcactcagaaccgatttcctgatgaactggatacactgtttagtgccagctattatttaagcacaagaagtagtcatatacccttgtttttatgtctgtacataccacctggaaatttacacatggggccattttttagtgaagcaattactaaacctgtatagttctggtggctgctataatttttcctgattaatcagagaattgttttagtgattaaccatgtgtgtttagtggctggtattgttgtcatataccttgtttttaggtctgtacatactacctgagcatgaccacatcagccttatgtttgaacaatttcacacatttacatttgtgaatgtgttgaccgtaagcatcatctttatttaaatcagaaacttggttttacaatgatgtctcattgaagttcttgcttttccttgtttgcaaatctgaaatacccttgtatgttctggcggaaagaagacccaaaggaccttgaacagcaaaatctaaggtttcaacattgcagacacacaagagtccagcatgcgccaacgctcctgcagttgatgcttcttccagtagtttgtgacagattgctcaaagaaaagcaagacagctcgccaatcctagaagtggaaaaaaacaacatagaataattagccagctacagggagtaaaccattaagagaagaaacatcgtaatgccatgtttccaaatgggcacaaagaaacttcaagcacctctagacggaagctgtctgcactgaagatcaggacacgaatatcgcgagctttatcaaggctcgccttgtgcggaaggtgtatttctgtgagatctccaagatgaagcattagggggtcaatcgccccagattttacatgtagctaacttagtagggcacccataatccataatttattctctgtagttgtagcagcgacctagaggtgttattctgtagcacattgtgtaacatgtaggagagagataaacacatatccccattctttctactgaaacaccagaaatagttgctcttgctccataattcattaatgtgaacttctgaagccatgccaaggtcttatattgatcctctgttgtcatattgataaaaatagggtatgtaaaaccttttctcataacagtttaacacatattttatatataagttatcgtaatatt

SEQ ID NO: 24334 - DNA, 1819 bp, Zea Mays
atatgtccttattgtaggcgtgcacacccgtgttctgcctctcgacgcctgtctgcccgcgccccccgcttgtgatgcccatctcgtctccccgctgtggcagccgccttcgcgtccgccgcgagatccctccgcgcacgggcgcgtcccccacaaaccgcgctccgtgaaatccgcactcccctcgccgcctccccagcccgcagcctctcctcaacctccctccccaaggagctggcggcggcgcgactgcgtcgggagaggacgcagaggacgccgcgcgggggctgcggcaggagctcgactccgagcaggcctccccggagatggcagccagatccggctattgagccccctaaccgagcggatccaagatagttttttttgtctccagttgctctacacagcaagtctatgaggaaggagcaaaagaagttgctctttcagttgtcagcggaattaatttaactcaagcatacttgcctatggcaaacaagcagtggacttacacaatgatcgaaatgacagactgttcgtgctatcggtttggaaagaacatgtggaaagctaatctcggatcttgcttccttcaggtacagacaacccttgtttttataggagttgtcagagaattgttttcgtgattaaacatgtgtgtttgtttagtggctggtattgttatcatatacccttgtttttagttctatacatattccttaagcatgagcaaattgggggcatttttagtgaagcaattactggtatgtacatgcaattactggtatgtacatggttaatcaaataatttgcatcatggatgttgttttagtgattaatcactcagaaccgatttcctgatgaactggatacactgtttagtgccagctattatttaagcacaagaagtagtcatatacccttgtttttatgtctgtacataccacctggaaatttacacatggggccattttttagtgaagcaattactaaacctgtatagttctggtggctgctataatttttcctgattaatcagagaattgttttagtgattaaccatgtgtgtttagtggctggtattgttgtcatataccttgtttttaggtctgtacatactacctgagcatgaccacatcagccttatgtttgaacaatttcacacatttacatttgtgaatgtgttgaccgtaagcatcatctttatttaaatcagaaacttggttttacaatgatgtctcattgaagttcttgcttttccttgtttgcaaatctgaaatacccttgtatgttctggcggaaagaagacccaaaggaccttgaacagcaaaatctaaggtttcaacattgcagacacacaagagtccagcatgcgccaacgctcctgcagctgtctgcactgaagatcaggacacgaatatcgcgagctttatcaaggctcgccttgtgcggaaggtgtatttctgtgagatctccaagatgaagcattagggggtcaatcgccccagattttacatgtagctaacttagtagggcacccataatccataatttattctctgtagttgtagcagcgacctagaggtgttattctgtagcacattgtgtaacatgtaggagagagataaacacatatccccattctttctactgaaacaccagaaatagttgctcttgctccataattcattaatgtgaacttctgaagccatgccaaggtcttatattgatcctctgttgtcatattgataaaaatagggtatgtaaaaccttttctcataacagtttaacacatattttatatataagttatcgtaatatt

SEQ ID NO: 24335 - DNA, 2234 bp, Zea Mays
atatgtccttattgtaggcgtgcacacccgtgttctgcctctcgacgcctgtctgcccgcgccccccgcttgtgatgcccatctcgtctccccgctgtggcagccgccttcgcgtccgccgcgagatccctccgcgcacgggcgcgtcccccacaaaccgcgctccgtgaaatccgcactcccctcgccgcctccccagcccgcagcctctcctcaacctccctccccaaggagctggcggcggcgcgactgcgtcgggagaggacgcagaggacgccgcgcgggggctgcggcaggagctcgactccgagcaggcctccccggagatggcagccagatccggctattgagccccctaaccgagcggatccaagttgctctacacagcaagtctatgaggaaggagcaaaagaagttgctctttcagttgtcagcggaattaatttaactcaagcatacttgcctatggcaaacaagcagtggacttacacaatgatcgaaatgacagactgttcgtgctatcggtttggaaagaacatgtggaaagctaatctcggatcttgcttccttcaggtacagacaacccttgtttttataggagttgtcagagaattgttttcgtgattaaacatgtgtgtttgtttagtggctggtattgttatcatatacccttgtttttagttctatacatattccttaagcatgagcaaattgggggcatttttagtgaagcaattactggtatgtacatgcaattactggtatgtacatggttaatcaaataatttgcatcatggatgttgttttagtgattaatcactcagaaccgatttcctgatgaactggatacactgtttagtgccagctattatttaagcacaagaagtagtcatatacccttgtttttatgtctgtacataccacctggaaatttacacatggggccattttttagtgaagcaattactaaacctgtatagttctggtggctgctataatttttcctgattaatcagagaattgttttagtgattaaccatgtgtgtttagtggctggtattgttgtcatataccttgtttttaggtctgtacatactacctgagcatgaccacatcagccttatgtttgaacaatttcacacatttacatttgtgaatgtgttgaccgtaagcatcatctttatttaaatcagaaacttggttttacaatgatgtctcattgaagttcttgcttttccttgtttgcaaatctgaaatacccttgtatgttctggcggaaagaagacccaaaggaccttgaacagcaaaatctaaggtttcaacattgcagacacacaagagtccagcatgcgccaacgctcctgcaggttagtccgagatggcccttcattttcctgtttcaatagataaaaaaactgaggtcgcattaaaaaactgaagtctattcaacaaatcaccaaccatgatttttctgaggcacatgggtacaatcagcacaaactccatttgccaagaaaaggttataatgcattcacaccaataaatgttcgtttcacaagacataagcaaagaacattgaggtcgcattatctaaccttttggtgattgcagttgatgcttcttccagtagtttgtgacagattgctcaaagaaaagcaagacagctcgccaatcctagaagtggaaaaaaacaacatagaataattagccagctacagggagtaaaccattaagagaagaaacatcgtaatgccatgtttccaaatgggcacaaagaaacttcaagcacctctagacggaagctgtctgcactgaagatcaggacacgaatatcgcgagctttatcaaggctcgccttgtgcggaaggtgtatttctgtgagatctccaagatgaagcattagggggtcaatcgccccagattttacatgtagctaacttagtagggcacccataatccataatttattctctgtagttgtagcagcgacctagaggtgttattctgtagcacattgtgtaacatgtaggagagagataaacacatatccccattctttctactgaaacaccagaaatagttgctcttgctccataattcattaatgtgaacttctgaagccatgccaaggtcttatattgatcctctgttgtcatattgataaaaatagggtatgtaaaaccttttctcataacagtttaacacatattttatatataagttatcgtaatatt

SEQ ID NO: 24336 - DNA, 2158 bp, Zea Mays
atatgtccttattgtaggcgtgcacacccgtgttctgcctctcgacgcctgtctgcccgcgccccccgcttgtgatgcccatctcgtctccccgctgtggcagccgccttcgcgtccgccgcgagatccctccgcgcacgggcgcgtcccccacaaaccgcgctccgtgaaatccgcactcccctcgccgcctccccagcccgcagcctctcctcaacctccctccccaaggagctggcggcggcgcgactgcgtcgggagaggacgcagaggacgccgcgcgggggctgcggcaggagctcgactccgagcaggcctccccggagatggcagccagatccggctattgagccccctaaccgagcggatccaagcaagcatacttgcctatggcaaacaagcagtggacttacacaatgatcgaaatgacagactgttcgtgctatcggtttggaaagaacatgtggaaagctaatctcggatcttgcttccttcaggtacagacaacccttgtttttataggagttgtcagagaattgttttcgtgattaaacatgtgtgtttgtttagtggctggtattgttatcatatacccttgtttttagttctatacatattccttaagcatgagcaaattgggggcatttttagtgaagcaattactggtatgtacatgcaattactggtatgtacatggttaatcaaataatttgcatcatggatgttgttttagtgattaatcactcagaaccgatttcctgatgaactggatacactgtttagtgccagctattatttaagcacaagaagtagtcatatacccttgtttttatgtctgtacataccacctggaaatttacacatggggccattttttagtgaagcaattactaaacctgtatagttctggtggctgctataatttttcctgattaatcagagaattgttttagtgattaaccatgtgtgtttagtggctggtattgttgtcatataccttgtttttaggtctgtacatactacctgagcatgaccacatcagccttatgtttgaacaatttcacacatttacatttgtgaatgtgttgaccgtaagcatcatctttatttaaatcagaaacttggttttacaatgatgtctcattgaagttcttgcttttccttgtttgcaaatctgaaatacccttgtatgttctggcggaaagaagacccaaaggaccttgaacagcaaaatctaaggtttcaacattgcagacacacaagagtccagcatgcgccaacgctcctgcaggttagtccgagatggcccttcattttcctgtttcaatagataaaaaaactgaggtcgcattaaaaaactgaagtctattcaacaaatcaccaaccatgatttttctgaggcacatgggtacaatcagcacaaactccatttgccaagaaaaggttataatgcattcacaccaataaatgttcgtttcacaagacataagcaaagaacattgaggtcgcattatctaaccttttggtgattgcagttgatgcttcttccagtagtttgtgacagattgctcaaagaaaagcaagacagctcgccaatcctagaagtggaaaaaaacaacatagaataattagccagctacagggagtaaaccattaagagaagaaacatcgtaatgccatgtttccaaatgggcacaaagaaacttcaagcacctctagacggaagctgtctgcactgaagatcaggacacgaatatcgcgagctttatcaaggctcgccttgtgcggaaggtgtatttctgtgagatctccaagatgaagcattagggggtcaatcgccccagattttacatgtagctaacttagtagggcacccataatccataatttattctctgtagttgtagcagcgacctagaggtgttattctgtagcacattgtgtaacatgtaggagagagataaacacatatccccattctttctactgaaacaccagaaatagttgctcttgctccataattcattaatgtgaacttctgaagccatgccaaggtcttatattgatcctctgttgtcatattgataaaaatagggtatgtaaaaccttttctcataacagtttaacacatattttatatataagttatcgtaatatt

SEQ ID NO: 24337 - DNA, 2015 bp, Zea Mays
atatgtccttattgtaggcgtgcacacccgtgttctgcctctcgacgcctgtctgcccgcgccccccgcttgtgatgcccatctcgtctccccgctgtggcagccgccttcgcgtccgccgcgagatccctccgcgcacgggcgcgtcccccacaaaccgcgctccgtgaaatccgcactcccctcgccgcctccccagcccgcagcctctcctcaacctccctccccaaggagctggcggcggcgcgactgcgtcgggagaggacgcagaggacgccgcgcgggggctgcggcaggagctcgactccgagcaggcctccccggagatggcagccagatccggctattgagccccctaaccgagcggatccaagatagttttttttgtctccagttgctctacacagcaagtctatgaggaaggagcaaaagaagttgctctttcagttgtcagcggaattaatttaactcaagcatacttgcctatggcaaacaagcagtggacttacacaatgatcgaaatgacagagtatactgttcgtgctatcggtttggaaagaacatgtggaaagctaatctcggatcttgcttccttcaggtacagacaacccttgtttttataggagttgtcagagaattgttttcgtgattaaacatgtgtgtttgtttagtggctggtattgttatcatatacccttgtttttagttctatacatattccttaagcatgagcaaattgggggcatttttagtgaagcaattactggtatgtacatgcaattactggtatgtacatggttaatcaaataatttgcatcatggatgttgttttagtgattaatcactcagaaccgatttcctgatgaactggatacactgtttagtgccagctattatttaagcacaagaagtagtcatatacccttgtttttatgtctgtacataccacctggaaatttacacatggggccattttttagtgaagcaattactaaacctgtatagttctggtggctgctataatttttcctgattaatcagagaattgttttagtgattaaccatgtgtgtttagtggctggtattgttgtcatataccttgtttttaggtctgtacatactacctgagcatgaccacatcagccttatgtttgaacaatttcacacatttacatttgtgaatgtgttgaccgtaagcatcatctttatttaaatcagaaacttggttttacaatgatgtctcattgaagttcttgcttttccttgtttgcaaatctgaaatacccttgtatgttctggcggaaagaagacccaaaggaccttgaacagcaaaatctaaggtttcaacattgcagacacacaagagtccagcatgcgccaacgctcctgcagttgatgcttcttccagtagtttgtgacagattgctcaaagaaaagcaagacagctcgccaatcctagaagtggaaaaaaacaacatagaataattagccagctacagggagtaaaccattaagagaagaaacatcgtaatgccatgtttccaaatgggcacaaagaaacttcaagcacctctagacggaagctgtctgcactgaagatcaggacacgaatatcgcgagctttatcaaggctcgccttgtgcggaaggtgtatttctgtgagatctccaagatgaagcattagggggtcaatcgccccagattttacatgtagctaacttagtagggcacccataatccataatttattctctgtagttgtagcagcgacctagaggtgttattctgtagcacattgtgtaacatgtaggagagagataaacacatatccccattctttctactgaaacaccagaaatagttgctcttgctccataattcattaatgtgaacttctgaagccatgccaaggtcttatattgatcctctgttgtcatattgataaaaatagggtatgtaaaaccttttctcataacagtttaacacatattttatatataagttatcgtaatatt

SEQ ID NO: 24338 - DNA, 1919 bp, Zea Mays
atatgtccttattgtaggcgtgcacacccgtgttctgcctctcgacgcctgtctgcccgcgccccccgcttgtgatgcccatctcgtctccccgctgtggcagccgccttcgcgtccgccgcgagatccctccgcgcacgggcgcgtcccccacaaaccgcgctccgtgaaatccgcactcccctcgccgcctccccagcccgcagcctctcctcaacctccctccccaaggagctggcggcggcgcgactgcgtcgggagaggacgcagaggacgccgcgcgggggctgcggcaggagctcgactccgagcaggcctccccggagatggcagccagatccggctattgagccccctaaccgagcggatccaagcaagcatacttgcctatggcaaacaagcagtggacttacacaatgatcgaaatgacagagtatactgttcgtgctatcggtttggaaagaacatgtggaaagctaatctcggatcttgcttccttcaggtacagacaacccttgtttttataggagttgtcagagaattgttttcgtgattaaacatgtgtgtttgtttagtggctggtattgttatcatatacccttgtttttagttctatacatattccttaagcatgagcaaattgggggcatttttagtgaagcaattactggtatgtacatgcaattactggtatgtacatggttaatcaaataatttgcatcatggatgttgttttagtgattaatcactcagaaccgatttcctgatgaactggatacactgtttagtgccagctattatttaagcacaagaagtagtcatatacccttgtttttatgtctgtacataccacctggaaatttacacatggggccattttttagtgaagcaattactaaacctgtatagttctggtggctgctataatttttcctgattaatcagagaattgttttagtgattaaccatgtgtgtttagtggctggtattgttgtcatataccttgtttttaggtctgtacatactacctgagcatgaccacatcagccttatgtttgaacaatttcacacatttacatttgtgaatgtgttgaccgtaagcatcatctttatttaaatcagaaacttggttttacaatgatgtctcattgaagttcttgcttttccttgtttgcaaatctgaaatacccttgtatgttctggcggaaagaagacccaaaggaccttgaacagcaaaatctaaggtttcaacattgcagacacacaagagtccagcatgcgccaacgctcctgcagttgatgcttcttccagtagtttgtgacagattgctcaaagaaaagcaagacagctcgccaatcctagaagtggaaaaaaacaacatagaataattagccagctacagggagtaaaccattaagagaagaaacatcgtaatgccatgtttccaaatgggcacaaagaaacttcaagcacctctagacggaagctgtctgcactgaagatcaggacacgaatatcgcgagctttatcaaggctcgccttgtgcggaaggtgtatttctgtgagatctccaagatgaagcattagggggtcaatcgccccagattttacatgtagctaacttagtagggcacccataatccataatttattctctgtagttgtagcagcgacctagaggtgttattctgtagcacattgtgtaacatgtaggagagagataaacacatatccccattctttctactgaaacaccagaaatagttgctcttgctccataattcattaatgtgaacttctgaagccatgccaaggtcttatattgatcctctgttgtcatattgataaaaatagggtatgtaaaaccttttctcataacagtttaacacatattttatatataagttatcgtaatatt

SEQ ID NO: 24339 - DNA, 1914 bp, Zea Mays
atatgtccttattgtaggcgtgcacacccgtgttctgcctctcgacgcctgtctgcccgcgccccccgcttgtgatgcccatctcgtctccccgctgtggcagccgccttcgcgtccgccgcgagatccctccgcgcacgggcgcgtcccccacaaaccgcgctccgtgaaatccgcactcccctcgccgcctccccagcccgcagcctctcctcaacctccctccccaaggagctggcggcggcgcgactgcgtcgggagaggacgcagaggacgccgcgcgggggctgcggcaggagctcgactccgagcaggcctccccggagatggcagccagatccggctattgagccccctaaccgagcggatccaagcaagcatacttgcctatggcaaacaagcagtggacttacacaatgatcgaaatgacagactgttcgtgctatcggtttggaaagaacatgtggaaagctaatctcggatcttgcttccttcaggtacagacaacccttgtttttataggagttgtcagagaattgttttcgtgattaaacatgtgtgtttgtttagtggctggtattgttatcatatacccttgtttttagttctatacatattccttaagcatgagcaaattgggggcatttttagtgaagcaattactggtatgtacatgcaattactggtatgtacatggttaatcaaataatttgcatcatggatgttgttttagtgattaatcactcagaaccgatttcctgatgaactggatacactgtttagtgccagctattatttaagcacaagaagtagtcatatacccttgtttttatgtctgtacataccacctggaaatttacacatggggccattttttagtgaagcaattactaaacctgtatagttctggtggctgctataatttttcctgattaatcagagaattgttttagtgattaaccatgtgtgtttagtggctggtattgttgtcatataccttgtttttaggtctgtacatactacctgagcatgaccacatcagccttatgtttgaacaatttcacacatttacatttgtgaatgtgttgaccgtaagcatcatctttatttaaatcagaaacttggttttacaatgatgtctcattgaagttcttgcttttccttgtttgcaaatctgaaatacccttgtatgttctggcggaaagaagacccaaaggaccttgaacagcaaaatctaaggtttcaacattgcagacacacaagagtccagcatgcgccaacgctcctgcagttgatgcttcttccagtagtttgtgacagattgctcaaagaaaagcaagacagctcgccaatcctagaagtggaaaaaaacaacatagaataattagccagctacagggagtaaaccattaagagaagaaacatcgtaatgccatgtttccaaatgggcacaaagaaacttcaagcacctctagacggaagctgtctgcactgaagatcaggacacgaatatcgcgagctttatcaaggctcgccttgtgcggaaggtgtatttctgtgagatctccaagatgaagcattagggggtcaatcgccccagattttacatgtagctaacttagtagggcacccataatccataatttattctctgtagttgtagcagcgacctagaggtgttattctgtagcacattgtgtaacatgtaggagagagataaacacatatccccattctttctactgaaacaccagaaatagttgctcttgctccataattcattaatgtgaacttctgaagccatgccaaggtcttatattgatcctctgttgtcatattgataaaaatagggtatgtaaaaccttttctcataacagtttaacacatattttatatataagttatcgtaatatt

SEQ ID NO: 24340 - DNA, 1450 bp, Zea Mays
atatgtccttattgtaggcgtgcacacccgtgttctgcctctcgacgcctgtctgcccgcgccccccgcttgtgatgcccatctcgtctccccgctgtggcagccgccttcgcgtccgccgcgagatccctccgcgcacgggcgcgtcccccacaaaccgcgctccgtgaaatccgcactcccctcgccgcctccccagcccgcagcctctcctcaacctccctccccaaggagctggcggcggcgcgactgcgtcgggagaggacgcagaggacgccgcgcgggggctgcggcaggagctcgactccgagcaggcctccccggagatggcagccagatccggctattgagccccctaaccgagcggatccaagcaagcatacttgcctatggcaaacaagcagtggacttacacaatgatcgaaatgacagactgttcgtgctatcggtttggaaagaacatgtggaaagctaatctcggatcttgcttccttcagaagacccaaaggaccttgaacagcaaaatctaaggtttcaacattgcagacacacaagagtccagcatgcgccaacgctcctgcaggttagtccgagatggcccttcattttcctgtttcaatagataaaaaaactgaggtcgcattaaaaaactgaagtctattcaacaaatcaccaaccatgatttttctgaggcacatgggtacaatcagcacaaactccatttgccaagaaaaggttataatgcattcacaccaataaatgttcgtttcacaagacataagcaaagaacattgaggtcgcattatctaaccttttggtgattgcagttgatgcttcttccagtagtttgtgacagattgctcaaagaaaagcaagacagctcgccaatcctagaagtggaaaaaaacaacatagaataattagccagctacagggagtaaaccattaagagaagaaacatcgtaatgccatgtttccaaatgggcacaaagaaacttcaagcacctctagacggaagctgtctgcactgaagatcaggacacgaatatcgcgagctttatcaaggctcgccttgtgcggaaggtgtatttctgtgagatctccaagatgaagcattagggggtcaatcgccccagattttacatgtagctaacttagtagggcacccataatccataatttattctctgtagttgtagcagcgacctagaggtgttattctgtagcacattgtgtaacatgtaggagagagataaacacatatccccattctttctactgaaacaccagaaatagttgctcttgctccataattcattaatgtgaacttctgaagccatgccaaggtcttatattgatcctctgttgtcatattgataaaaatagggtatgtaaaaccttttctcataacagtttaacacatattttatatataagttatcgtaatatt

SEQ ID NO: 24341 - DNA, 2239 bp, Zea Mays
atatgtccttattgtaggcgtgcacacccgtgttctgcctctcgacgcctgtctgcccgcgccccccgcttgtgatgcccatctcgtctccccgctgtggcagccgccttcgcgtccgccgcgagatccctccgcgcacgggcgcgtcccccacaaaccgcgctccgtgaaatccgcactcccctcgccgcctccccagcccgcagcctctcctcaacctccctccccaaggagctggcggcggcgcgactgcgtcgggagaggacgcagaggacgccgcgcgggggctgcggcaggagctcgactccgagcaggcctccccggagatggcagccagatccggctattgagccccctaaccgagcggatccaagttgctctacacagcaagtctatgaggaaggagcaaaagaagttgctctttcagttgtcagcggaattaatttaactcaagcatacttgcctatggcaaacaagcagtggacttacacaatgatcgaaatgacagagtatactgttcgtgctatcggtttggaaagaacatgtggaaagctaatctcggatcttgcttccttcaggtacagacaacccttgtttttataggagttgtcagagaattgttttcgtgattaaacatgtgtgtttgtttagtggctggtattgttatcatatacccttgtttttagttctatacatattccttaagcatgagcaaattgggggcatttttagtgaagcaattactggtatgtacatgcaattactggtatgtacatggttaatcaaataatttgcatcatggatgttgttttagtgattaatcactcagaaccgatttcctgatgaactggatacactgtttagtgccagctattatttaagcacaagaagtagtcatatacccttgtttttatgtctgtacataccacctggaaatttacacatggggccattttttagtgaagcaattactaaacctgtatagttctggtggctgctataatttttcctgattaatcagagaattgttttagtgattaaccatgtgtgtttagtggctggtattgttgtcatataccttgtttttaggtctgtacatactacctgagcatgaccacatcagccttatgtttgaacaatttcacacatttacatttgtgaatgtgttgaccgtaagcatcatctttatttaaatcagaaacttggttttacaatgatgtctcattgaagttcttgcttttccttgtttgcaaatctgaaatacccttgtatgttctggcggaaagaagacccaaaggaccttgaacagcaaaatctaaggtttcaacattgcagacacacaagagtccagcatgcgccaacgctcctgcaggttagtccgagatggcccttcattttcctgtttcaatagataaaaaaactgaggtcgcattaaaaaactgaagtctattcaacaaatcaccaaccatgatttttctgaggcacatgggtacaatcagcacaaactccatttgccaagaaaaggttataatgcattcacaccaataaatgttcgtttcacaagacataagcaaagaacattgaggtcgcattatctaaccttttggtgattgcagttgatgcttcttccagtagtttgtgacagattgctcaaagaaaagcaagacagctcgccaatcctagaagtggaaaaaaacaacatagaataattagccagctacagggagtaaaccattaagagaagaaacatcgtaatgccatgtttccaaatgggcacaaagaaacttcaagcacctctagacggaagctgtctgcactgaagatcaggacacgaatatcgcgagctttatcaaggctcgccttgtgcggaaggtgtatttctgtgagatctccaagatgaagcattagggggtcaatcgccccagattttacatgtagctaacttagtagggcacccataatccataatttattctctgtagttgtagcagcgacctagaggtgttattctgtagcacattgtgtaacatgtaggagagagataaacacatatccccattctttctactgaaacaccagaaatagttgctcttgctccataattcattaatgtgaacttctgaagccatgccaaggtcttatattgatcctctgttgtcatattgataaaaatagggtatgtaaaaccttttctcataacagtttaacacatattttatatataagttatcgtaatatt

SEQ ID NO: 24342 - DNA, 2099 bp, Zea Mays
atatgtccttattgtaggcgtgcacacccgtgttctgcctctcgacgcctgtctgcccgcgccccccgcttgtgatgcccatctcgtctccccgctgtggcagccgccttcgcgtccgccgcgagatccctccgcgcacgggcgcgtcccccacaaaccgcgctccgtgaaatccgcactcccctcgccgcctccccagcccgcagcctctcctcaacctccctccccaaggagctggcggcggcgcgactgcgtcgggagaggacgcagaggacgccgcgcgggggctgcggcaggagctcgactccgagcaggcctccccggagatggcagccagatccggctattgagccccctaaccgagcggatccaagctgttcgtgctatcggtttggaaagaacatgtggaaagctaatctcggatcttgcttccttcaggtacagacaacccttgtttttataggagttgtcagagaattgttttcgtgattaaacatgtgtgtttgtttagtggctggtattgttatcatatacccttgtttttagttctatacatattccttaagcatgagcaaattgggggcatttttagtgaagcaattactggtatgtacatgcaattactggtatgtacatggttaatcaaataatttgcatcatggatgttgttttagtgattaatcactcagaaccgatttcctgatgaactggatacactgtttagtgccagctattatttaagcacaagaagtagtcatatacccttgtttttatgtctgtacataccacctggaaatttacacatggggccattttttagtgaagcaattactaaacctgtatagttctggtggctgctataatttttcctgattaatcagagaattgttttagtgattaaccatgtgtgtttagtggctggtattgttgtcatataccttgtttttaggtctgtacatactacctgagcatgaccacatcagccttatgtttgaacaatttcacacatttacatttgtgaatgtgttgaccgtaagcatcatctttatttaaatcagaaacttggttttacaatgatgtctcattgaagttcttgcttttccttgtttgcaaatctgaaatacccttgtatgttctggcggaaagaagacccaaaggaccttgaacagcaaaatctaaggtttcaacattgcagacacacaagagtccagcatgcgccaacgctcctgcaggttagtccgagatggcccttcattttcctgtttcaatagataaaaaaactgaggtcgcattaaaaaactgaagtctattcaacaaatcaccaaccatgatttttctgaggcacatgggtacaatcagcacaaactccatttgccaagaaaaggttataatgcattcacaccaataaatgttcgtttcacaagacataagcaaagaacattgaggtcgcattatctaaccttttggtgattgcagttgatgcttcttccagtagtttgtgacagattgctcaaagaaaagcaagacagctcgccaatcctagaagtggaaaaaaacaacatagaataattagccagctacagggagtaaaccattaagagaagaaacatcgtaatgccatgtttccaaatgggcacaaagaaacttcaagcacctctagacggaagctgtctgcactgaagatcaggacacgaatatcgcgagctttatcaaggctcgccttgtgcggaaggtgtatttctgtgagatctccaagatgaagcattagggggtcaatcgccccagattttacatgtagctaacttagtagggcacccataatccataatttattctctgtagttgtagcagcgacctagaggtgttattctgtagcacattgtgtaacatgtaggagagagataaacacatatccccattctttctactgaaacaccagaaatagttgctcttgctccataattcattaatgtgaacttctgaagccatgccaaggtcttatattgatcctctgttgtcatattgataaaaatagggtatgtaaaaccttttctcataacagtttaacacatattttatatataagttatcgtaatatt

SEQ ID NO: 24343 - DNA, 2259 bp, Zea Mays
atatgtccttattgtaggcgtgcacacccgtgttctgcctctcgacgcctgtctgcccgcgccccccgcttgtgatgcccatctcgtctccccgctgtggcagccgccttcgcgtccgccgcgagatccctccgcgcacgggcgcgtcccccacaaaccgcgctccgtgaaatccgcactcccctcgccgcctccccagcccgcagcctctcctcaacctccctccccaaggagctggcggcggcgcgactgcgtcgggagaggacgcagaggacgccgcgcgggggctgcggcaggagctcgactccgagcaggcctccccggagatggcagccagatccggctattgagccccctaaccgagcggatccaagatagttttttttgtctccagttgctctacacagcaagtctatgaggaaggagcaaaagaagttgctctttcagttgtcagcggaattaatttaactcaagcatacttgcctatggcaaacaagcagtggacttacacaatgatcgaaatgacagagtatactgttcgtgctatcggtttggaaagaacatgtggaaagctaatctcggatcttgcttccttcaggtacagacaacccttgtttttataggagttgtcagagaattgttttcgtgattaaacatgtgtgtttgtttagtggctggtattgttatcatatacccttgtttttagttctatacatattccttaagcatgagcaaattgggggcatttttagtgaagcaattactggtatgtacatgcaattactggtatgtacatggttaatcaaataatttgcatcatggatgttgttttagtgattaatcactcagaaccgatttcctgatgaactggatacactgtttagtgccagctattatttaagcacaagaagtagtcatatacccttgtttttatgtctgtacataccacctggaaatttacacatggggccattttttagtgaagcaattactaaacctgtatagttctggtggctgctataatttttcctgattaatcagagaattgttttagtgattaaccatgtgtgtttagtggctggtattgttgtcatataccttgtttttaggtctgtacatactacctgagcatgaccacatcagccttatgtttgaacaatttcacacatttacatttgtgaatgtgttgaccgtaagcatcatctttatttaaatcagaaacttggttttacaatgatgtctcattgaagttcttgcttttccttgtttgcaaatctgaaatacccttgtatgttctggcggaaagaagacccaaaggaccttgaacagcaaaatctaaggtttcaacattgcagacacacaagagtccagcatgcgccaacgctcctgcaggttagtccgagatggcccttcattttcctgtttcaatagataaaaaaactgaggtcgcattaaaaaactgaagtctattcaacaaatcaccaaccatgatttttctgaggcacatgggtacaatcagcacaaactccatttgccaagaaaaggttataatgcattcacaccaataaatgttcgtttcacaagacataagcaaagaacattgaggtcgcattatctaaccttttggtgattgcagttgatgcttcttccagtagtttgtgacagattgctcaaagaaaagcaagacagctcgccaatcctagaagtggaaaaaaacaacatagaataattagccagctacagggagtaaaccattaagagaagaaacatcgtaatgccatgtttccaaatgggcacaaagaaacttcaagcacctctagacggaagctgtctgcactgaagatcaggacacgaatatcgcgagctttatcaaggctcgccttgtgcggaaggtgtatttctgtgagatctccaagatgaagcattagggggtcaatcgccccagattttacatgtagctaacttagtagggcacccataatccataatttattctctgtagttgtagcagcgacctagaggtgttattctgtagcacattgtgtaacatgtaggagagagataaacacatatccccattctttctactgaaacaccagaaatagttgctcttgctccataattcattaatgtgaacttctgaagccatgccaaggtcttatattgatcctctgttgtcatattgataaaaatagggtatgtaaaaccttttctcataacagtttaacacatattttatatataagttatcgtaatatt

SEQ ID NO: 24344 - DNA, 1299 bp, Zea Mays
atatgtccttattgtaggcgtgcacacccgtgttctgcctctcgacgcctgtctgcccgcgccccccgcttgtgatgcccatctcgtctccccgctgtggcagccgccttcgcgtccgccgcgagatccctccgcgcacgggcgcgtcccccacaaaccgcgctccgtgaaatccgcactcccctcgccgcctccccagcccgcagcctctcctcaacctccctccccaaggagctggcggcggcgcgactgcgtcgggagaggacgcagaggacgccgcgcgggggctgcggcaggagctcgactccgagcaggcctccccggagatggcagccagatccggctattgagccccctaaccgagcggatccaagatagttttttttgtctccagttgctctacacagcaagtctatgaggaaggagcaaaagaagttgctctttcagttgtcagcggaattaatttaactcaagcatacttgcctatggcaaacaagcagtggacttacacaatgatcgaaatgacagactgttcgtgctatcggtttggaaagaacatgtggaaagctaatctcggatcttgcttccttcagacccaaaggaccttgaacagcaaaatctaaggtttcaacattgcagacacacaagagtccagcatgcgccaacgctcctgcagttgatgcttcttccagtagtttgtgacagattgctcaaagaaaagcaagacagctcgccaatcctagaagtggaaaaaaacaacatagaataattagccagctacagggagtaaaccattaagagaagaaacatcgtaatgccatgtttccaaatgggcacaaagaaacttcaagcacctctagacggaagctgtctgcactgaagatcaggacacgaatatcgcgagctttatcaaggctcgccttgtgcggaaggtgtatttctgtgagatctccaagatgaagcattagggggtcaatcgccccagattttacatgtagctaacttagtagggcacccataatccataatttattctctgtagttgtagcagcgacctagaggtgttattctgtagcacattgtgtaacatgtaggagagagataaacacatatccccattctttctactgaaacaccagaaatagttgctcttgctccataattcattaatgtgaacttctgaagccatgccaaggtcttatattgatcctctgttgtcatattgataaaaatagggtatgtaaaaccttttctcataacagtttaacacatattttatatataagttatcgtaatatt

SEQ ID NO: 24345 - DNA, 1551 bp, Zea Mays
atatgtccttattgtaggcgtgcacacccgtgttctgcctctcgacgcctgtctgcccgcgccccccgcttgtgatgcccatctcgtctccccgctgtggcagccgccttcgcgtccgccgcgagatccctccgcgcacgggcgcgtcccccacaaaccgcgctccgtgaaatccgcactcccctcgccgcctccccagcccgcagcctctcctcaacctccctccccaaggagctggcggcggcgcgactgcgtcgggagaggacgcagaggacgccgcgcgggggctgcggcaggagctcgactccgagcaggcctccccggagatggcagccagatccggctattgagccccctaaccgagcggatccaagatagttttttttgtctccagttgctctacacagcaagtctatgaggaaggagcaaaagaagttgctctttcagttgtcagcggaattaatttaactcaagcatacttgcctatggcaaacaagcagtggacttacacaatgatcgaaatgacagagtatactgttcgtgctatcggtttggaaagaacatgtggaaagctaatctcggatcttgcttccttcagaagacccaaaggaccttgaacagcaaaatctaaggtttcaacattgcagacacacaagagtccagcatgcgccaacgctcctgcaggttagtccgagatggcccttcattttcctgtttcaatagataaaaaaactgaggtcgcattaaaaaactgaagtctattcaacaaatcaccaaccatgatttttctgaggcacatgggtacaatcagcacaaactccatttgccaagaaaaggttataatgcattcacaccaataaatgttcgtttcacaagacataagcaaagaacattgaggtcgcattatctaaccttttggtgattgcagttgatgcttcttccagtagtttgtgacagattgctcaaagaaaagcaagacagctcgccaatcctagaagtggaaaaaaacaacatagaataattagccagctacagggagtaaaccattaagagaagaaacatcgtaatgccatgtttccaaatgggcacaaagaaacttcaagcacctctagacggaagctgtctgcactgaagatcaggacacgaatatcgcgagctttatcaaggctcgccttgtgcggaaggtgtatttctgtgagatctccaagatgaagcattagggggtcaatcgccccagattttacatgtagctaacttagtagggcacccataatccataatttattctctgtagttgtagcagcgacctagaggtgttattctgtagcacattgtgtaacatgtaggagagagataaacacatatccccattctttctactgaaacaccagaaatagttgctcttgctccataattcattaatgtgaacttctgaagccatgccaaggtcttatattgatcctctgttgtcatattgataaaaatagggtatgtaaaaccttttctcataacagtttaacacatattttatatataagttatcgtaatatt

SEQ ID NO: 24346 - DNA, 1523 bp, Zea Mays
atatgtccttattgtaggcgtgcacacccgtgttctgcctctcgacgcctgtctgcccgcgccccccgcttgtgatgcccatctcgtctccccgctgtggcagccgccttcgcgtccgccgcgagatccctccgcgcacgggcgcgtcccccacaaaccgcgctccgtgaaatccgcactcccctcgccgcctccccagcccgcagcctctcctcaacctccctccccaaggagctggcggcggcgcgactgcgtcgggagaggacgcagaggacgccgcgcgggggctgcggcaggagctcgactccgagcaggcctccccggagatggcagccagatccggctattgagccccctaaccgagcggatccaagttgctctacacagcaagtctatgaggaaggagcaaaagaagttgctctttcagttgtcagcggaattaatttaactcaagcatacttgcctatggcaaacaagcagtggacttacacaatgatcgaaatgacagactgttcgtgctatcggtttggaaagaacatgtggaaagctaatctcggatcttgcttccttcagacccaaaggaccttgaacagcaaaatctaaggtttcaacattgcagacacacaagagtccagcatgcgccaacgctcctgcaggttagtccgagatggcccttcattttcctgtttcaatagataaaaaaactgaggtcgcattaaaaaactgaagtctattcaacaaatcaccaaccatgatttttctgaggcacatgggtacaatcagcacaaactccatttgccaagaaaaggttataatgcattcacaccaataaatgttcgtttcacaagacataagcaaagaacattgaggtcgcattatctaaccttttggtgattgcagttgatgcttcttccagtagtttgtgacagattgctcaaagaaaagcaagacagctcgccaatcctagaagtggaaaaaaacaacatagaataattagccagctacagggagtaaaccattaagagaagaaacatcgtaatgccatgtttccaaatgggcacaaagaaacttcaagcacctctagacggaagctgtctgcactgaagatcaggacacgaatatcgcgagctttatcaaggctcgccttgtgcggaaggtgtatttctgtgagatctccaagatgaagcattagggggtcaatcgccccagattttacatgtagctaacttagtagggcacccataatccataatttattctctgtagttgtagcagcgacctagaggtgttattctgtagcacattgtgtaacatgtaggagagagataaacacatatccccattctttctactgaaacaccagaaatagttgctcttgctccataattcattaatgtgaacttctgaagccatgccaaggtcttatattgatcctctgttgtcatattgataaaaatagggtatgtaaaaccttttctcataacagtttaacacatattttatatataagttatcgtaatatt

SEQ ID NO: 24347 - DNA, 1990 bp, Zea Mays
atatgtccttattgtaggcgtgcacacccgtgttctgcctctcgacgcctgtctgcccgcgccccccgcttgtgatgcccatctcgtctccccgctgtggcagccgccttcgcgtccgccgcgagatccctccgcgcacgggcgcgtcccccacaaaccgcgctccgtgaaatccgcactcccctcgccgcctccccagcccgcagcctctcctcaacctccctccccaaggagctggcggcggcgcgactgcgtcgggagaggacgcagaggacgccgcgcgggggctgcggcaggagctcgactccgagcaggcctccccggagatggcagccagatccggctattgagccccctaaccgagcggatccaagttgctctacacagcaagtctatgaggaaggagcaaaagaagttgctctttcagttgtcagcggaattaatttaactcaagcatacttgcctatggcaaacaagcagtggacttacacaatgatcgaaatgacagactgttcgtgctatcggtttggaaagaacatgtggaaagctaatctcggatcttgcttccttcaggtacagacaacccttgtttttataggagttgtcagagaattgttttcgtgattaaacatgtgtgtttgtttagtggctggtattgttatcatatacccttgtttttagttctatacatattccttaagcatgagcaaattgggggcatttttagtgaagcaattactggtatgtacatgcaattactggtatgtacatggttaatcaaataatttgcatcatggatgttgttttagtgattaatcactcagaaccgatttcctgatgaactggatacactgtttagtgccagctattatttaagcacaagaagtagtcatatacccttgtttttatgtctgtacataccacctggaaatttacacatggggccattttttagtgaagcaattactaaacctgtatagttctggtggctgctataatttttcctgattaatcagagaattgttttagtgattaaccatgtgtgtttagtggctggtattgttgtcatataccttgtttttaggtctgtacatactacctgagcatgaccacatcagccttatgtttgaacaatttcacacatttacatttgtgaatgtgttgaccgtaagcatcatctttatttaaatcagaaacttggttttacaatgatgtctcattgaagttcttgcttttccttgtttgcaaatctgaaatacccttgtatgttctggcggaaagaagacccaaaggaccttgaacagcaaaatctaaggtttcaacattgcagacacacaagagtccagcatgcgccaacgctcctgcagttgatgcttcttccagtagtttgtgacagattgctcaaagaaaagcaagacagctcgccaatcctagaagtggaaaaaaacaacatagaataattagccagctacagggagtaaaccattaagagaagaaacatcgtaatgccatgtttccaaatgggcacaaagaaacttcaagcacctctagacggaagctgtctgcactgaagatcaggacacgaatatcgcgagctttatcaaggctcgccttgtgcggaaggtgtatttctgtgagatctccaagatgaagcattagggggtcaatcgccccagattttacatgtagctaacttagtagggcacccataatccataatttattctctgtagttgtagcagcgacctagaggtgttattctgtagcacattgtgtaacatgtaggagagagataaacacatatccccattctttctactgaaacaccagaaatagttgctcttgctccataattcattaatgtgaacttctgaagccatgccaaggtcttatattgatcctctgttgtcatattgataaaaatagggtatgtaaaaccttttctcataacagtttaacacatattttatatataagttatcgtaatatt

SEQ ID NO: 24348 - DNA, 1184 bp, Zea Mays
atatgtccttattgtaggcgtgcacacccgtgttctgcctctcgacgcctgtctgcccgcgccccccgcttgtgatgcccatctcgtctccccgctgtggcagccgccttcgcgtccgccgcgagatccctccgcgcacgggcgcgtcccccacaaaccgcgctccgtgaaatccgcactcccctcgccgcctccccagcccgcagcctctcctcaacctccctccccaaggagctggcggcggcgcgactgcgtcgggagaggacgcagaggacgccgcgcgggggctgcggcaggagctcgactccgagcaggcctccccggagatggcagccagatccggctattgagccccctaaccgagcggatccaagcaagcatacttgcctatggcaaacaagcagtggacttacacaatgatcgaaatgacagactgttcgtgctatcggtttggaaagaacatgtggaaagctaatctcggatcttgcttccttcagacccaaaggaccttgaacagcaaaatctaaggtttcaacattgcagacacacaagagtccagcatgcgccaacgctcctgcagtttgtgacagattgctcaaagaaaagcaagacagctcgccaatcctagaagtggaaaaaaacaacatagaataattagccagctacagggagtaaaccattaagagaagaaacatcgtaatgccatgtttccaaatgggcacaaagaaacttcaagcacctctagacggaagctgtctgcactgaagatcaggacacgaatatcgcgagctttatcaaggctcgccttgtgcggaaggtgtatttctgtgagatctccaagatgaagcattagggggtcaatcgccccagattttacatgtagctaacttagtagggcacccataatccataatttattctctgtagttgtagcagcgacctagaggtgttattctgtagcacattgtgtaacatgtaggagagagataaacacatatccccattctttctactgaaacaccagaaatagttgctcttgctccataattcattaatgtgaacttctgaagccatgccaaggtcttatattgatcctctgttgtcatattgataaaaatagggtatgtaaaaccttttctcataacagtttaacacatattttatatataagttatcgtaatatt

SEQ ID NO: 24349 - DNA, 2163 bp, Zea Mays
atatgtccttattgtaggcgtgcacacccgtgttctgcctctcgacgcctgtctgcccgcgccccccgcttgtgatgcccatctcgtctccccgctgtggcagccgccttcgcgtccgccgcgagatccctccgcgcacgggcgcgtcccccacaaaccgcgctccgtgaaatccgcactcccctcgccgcctccccagcccgcagcctctcctcaacctccctccccaaggagctggcggcggcgcgactgcgtcgggagaggacgcagaggacgccgcgcgggggctgcggcaggagctcgactccgagcaggcctccccggagatggcagccagatccggctattgagccccctaaccgagcggatccaagcaagcatacttgcctatggcaaacaagcagtggacttacacaatgatcgaaatgacagagtatactgttcgtgctatcggtttggaaagaacatgtggaaagctaatctcggatcttgcttccttcaggtacagacaacccttgtttttataggagttgtcagagaattgttttcgtgattaaacatgtgtgtttgtttagtggctggtattgttatcatatacccttgtttttagttctatacatattccttaagcatgagcaaattgggggcatttttagtgaagcaattactggtatgtacatgcaattactggtatgtacatggttaatcaaataatttgcatcatggatgttgttttagtgattaatcactcagaaccgatttcctgatgaactggatacactgtttagtgccagctattatttaagcacaagaagtagtcatatacccttgtttttatgtctgtacataccacctggaaatttacacatggggccattttttagtgaagcaattactaaacctgtatagttctggtggctgctataatttttcctgattaatcagagaattgttttagtgattaaccatgtgtgtttagtggctggtattgttgtcatataccttgtttttaggtctgtacatactacctgagcatgaccacatcagccttatgtttgaacaatttcacacatttacatttgtgaatgtgttgaccgtaagcatcatctttatttaaatcagaaacttggttttacaatgatgtctcattgaagttcttgcttttccttgtttgcaaatctgaaatacccttgtatgttctggcggaaagaagacccaaaggaccttgaacagcaaaatctaaggtttcaacattgcagacacacaagagtccagcatgcgccaacgctcctgcaggttagtccgagatggcccttcattttcctgtttcaatagataaaaaaactgaggtcgcattaaaaaactgaagtctattcaacaaatcaccaaccatgatttttctgaggcacatgggtacaatcagcacaaactccatttgccaagaaaaggttataatgcattcacaccaataaatgttcgtttcacaagacataagcaaagaacattgaggtcgcattatctaaccttttggtgattgcagttgatgcttcttccagtagtttgtgacagattgctcaaagaaaagcaagacagctcgccaatcctagaagtggaaaaaaacaacatagaataattagccagctacagggagtaaaccattaagagaagaaacatcgtaatgccatgtttccaaatgggcacaaagaaacttcaagcacctctagacggaagctgtctgcactgaagatcaggacacgaatatcgcgagctttatcaaggctcgccttgtgcggaaggtgtatttctgtgagatctccaagatgaagcattagggggtcaatcgccccagattttacatgtagctaacttagtagggcacccataatccataatttattctctgtagttgtagcagcgacctagaggtgttattctgtagcacattgtgtaacatgtaggagagagataaacacatatccccattctttctactgaaacaccagaaatagttgctcttgctccataattcattaatgtgaacttctgaagccatgccaaggtcttatattgatcctctgttgtcatattgataaaaatagggtatgtaaaaccttttctcataacagtttaacacatattttatatataagttatcgtaatatt

SEQ ID NO: 24350 - DNA, 2254 bp, Zea Mays
atatgtccttattgtaggcgtgcacacccgtgttctgcctctcgacgcctgtctgcccgcgccccccgcttgtgatgcccatctcgtctccccgctgtggcagccgccttcgcgtccgccgcgagatccctccgcgcacgggcgcgtcccccacaaaccgcgctccgtgaaatccgcactcccctcgccgcctccccagcccgcagcctctcctcaacctccctccccaaggagctggcggcggcgcgactgcgtcgggagaggacgcagaggacgccgcgcgggggctgcggcaggagctcgactccgagcaggcctccccggagatggcagccagatccggctattgagccccctaaccgagcggatccaagatagttttttttgtctccagttgctctacacagcaagtctatgaggaaggagcaaaagaagttgctctttcagttgtcagcggaattaatttaactcaagcatacttgcctatggcaaacaagcagtggacttacacaatgatcgaaatgacagactgttcgtgctatcggtttggaaagaacatgtggaaagctaatctcggatcttgcttccttcaggtacagacaacccttgtttttataggagttgtcagagaattgttttcgtgattaaacatgtgtgtttgtttagtggctggtattgttatcatatacccttgtttttagttctatacatattccttaagcatgagcaaattgggggcatttttagtgaagcaattactggtatgtacatgcaattactggtatgtacatggttaatcaaataatttgcatcatggatgttgttttagtgattaatcactcagaaccgatttcctgatgaactggatacactgtttagtgccagctattatttaagcacaagaagtagtcatatacccttgtttttatgtctgtacataccacctggaaatttacacatggggccattttttagtgaagcaattactaaacctgtatagttctggtggctgctataatttttcctgattaatcagagaattgttttagtgattaaccatgtgtgtttagtggctggtattgttgtcatataccttgtttttaggtctgtacatactacctgagcatgaccacatcagccttatgtttgaacaatttcacacatttacatttgtgaatgtgttgaccgtaagcatcatctttatttaaatcagaaacttggttttacaatgatgtctcattgaagttcttgcttttccttgtttgcaaatctgaaatacccttgtatgttctggcggaaagaagacccaaaggaccttgaacagcaaaatctaaggtttcaacattgcagacacacaagagtccagcatgcgccaacgctcctgcaggttagtccgagatggcccttcattttcctgtttcaatagataaaaaaactgaggtcgcattaaaaaactgaagtctattcaacaaatcaccaaccatgatttttctgaggcacatgggtacaatcagcacaaactccatttgccaagaaaaggttataatgcattcacaccaataaatgttcgtttcacaagacataagcaaagaacattgaggtcgcattatctaaccttttggtgattgcagttgatgcttcttccagtagtttgtgacagattgctcaaagaaaagcaagacagctcgccaatcctagaagtggaaaaaaacaacatagaataattagccagctacagggagtaaaccattaagagaagaaacatcgtaatgccatgtttccaaatgggcacaaagaaacttcaagcacctctagacggaagctgtctgcactgaagatcaggacacgaatatcgcgagctttatcaaggctcgccttgtgcggaaggtgtatttctgtgagatctccaagatgaagcattagggggtcaatcgccccagattttacatgtagctaacttagtagggcacccataatccataatttattctctgtagttgtagcagcgacctagaggtgttattctgtagcacattgtgtaacatgtaggagagagataaacacatatccccattctttctactgaaacaccagaaatagttgctcttgctccataattcattaatgtgaacttctgaagccatgccaaggtcttatattgatcctctgttgtcatattgataaaaatagggtatgtaaaaccttttctcataacagtttaacacatattttatatataagttatcgtaatatt

SEQ ID NO: 24351 - DNA, 2905 bp, Zea Mays
cccatttatttttcctgctcacagacttgcgttggccgttggcgaacaaagcgaattgtcatagtgacataatttattgtcaggaacctttattttatctttatacatcgtacatgttttctctccctgtctctagtactgtcgacatttttaaaattgcgcaatttttttaagaacggggaagaatgcccggagcgctctataaaacctgggggatcagaggaggaggacgtaggtatcgtgtcggtgtgcagtgtgttgtcatctccatctccagctccagcgccgccttgctctgtgtgcttccgcccgctctgtgttgctattgctaaactagtgtgttctgtcgctatgggctccctggccaccgcggacgggccgttgccgccgctcaagtaccctcaggctcgccgggacgaagacatcgtcgacgactaccacggcgtcctcgtgccggacccttacagatggtggattcgaaggaggtgaaggagttcgtggacgcgcaggcggccgtgaccagcgccgtgctgtccagctgcgaccaccgcgggcgcctgcgcgggcagctcaccgcgctcttcgaccacccgcgcttccgcgcgcccttcaagcgccggggcagctacttctacttccacaacccgggcctccgcccgcacagcgcgctctacgtgcagcacgggctgggcggcgagcccgacgtgctgctggaccccagcacgttcagcgaggacggcacggtgtcgctcggcgtggtcggcgtgagcgacgacggcgagcacctggcctacggcaccagcggcagcggcagcgactgggtcaccatcagggtcatgcgcgtgcgcgacaaggagcacctgcccgatacgctgtcctgggtgaaattctcgcgcatcgcgtggactcgtgacggccaagggttcttctactcgcgttttccggctccaagggatgcgctggattctgggatgaagactggcgtcaatctcaaccacgaagtctactatcatttccttggaacagagcagtcacaggacgtgttgtgctggagagaccctgatcatcccaagtacatatacatccctcaagtcacagaagacggcaagtacgtgatcctttcggtctcagaaacgtcagagccggtgaacaagctgtactactgcgacctgtcggctctcgctcacgggctgggcggcgtgaagagcgcccatggcaacggcatgctccccttcgtcaagctcgtggacaggttcgaggcctactacgggctcatcgctaacgacggcacccagttcacgttcctcacgaacaaagacgctccaaggtacaagctggcgagggtggacgtcgacgacgacgagcccgggtcgccgtggtggaccgacgtggttcccgaggacgaggacgggaaggcggtcctggagtcggcgtgcgccgtccacggccacaagctgctggtgagctacctgtcggatgtcaggtgcgtcctgcagatgaggagcctggtcactggggagctgcttcacgacatacccgtcgacatcggcactgtcagcgggatctccggcagacgatgcgacgccgaggtgttcgtcgagttcgcgagcttccttacccccgggatcatctacaggtgcgatgtcggctctgcggtcccggagatggacgtgtacagagagatctcggttccaggattcgatcgaaacgagtttgaagcgaagcaggtgttttatccgagtaaggatgggaccaagatcccaatgttcatcgtatccaagaaggagatcagcctggacggatcgcacccggcactactgttcggctacggcggcttcggcgtgagcgtgacgccgcagttcagcgtcgcccgcgtggtcctgatgaggaacctggggttcgtggcgtgcgtcgccaacctcaggggcggcggggagtacggcgagggctggcacagggccgggtcgctcgccaacaagcagaactgcttcgacgacttcgtcgccgccggcgagttcctcgtgtccgctggctacaccagcccggcgaggctgtgcgtcgagggcggcagcaacgggggcctcctggtagctgcctgcgtgaaccagcgccctgatctgtttggctgtgccctggcccatgtcggagtgatggacatgctacggttccacaagttcaccataggtcgtgcatggacatgcgacttcgggtgttcggagaacgaggaagagttccagtggcttatcaagtactcccccctgcacaacgtgcggcggccgtgggagaacaaacgggcggccgcagctgccaacggcgacgcaagctgccggggcttaggcggccagtaccctgcaaccatgctgctgacggcggaccacgacgaccgcgtggtgccgtcgcacacgctcaaattcctcgcgacgatgcagcacgtcctgcgccccggcgcggatggcagcccgcagacgaaccccgtcgtcgcccggatcgagcgcaagagcggccactgctgcggccgctccacgcagaagatcatcgacgaggctgcggatcggtacgcattcgccgcgaagatgatgggagtctcttggatggactgactgagtaacccaccaaatgagtactgcgcatttggctcaggctgttaggttacaatgtatcggtgctgtattgtaagcggccaggctggcaacttggcgtgacacatgtttggttctgcttctggtttggaaaattagaagctgaactaaaagggcttcttttctgcgactactttaaaaaaaacagcttttctttagtgtaaatttgagaccttgttattgatacttacgaagtttgttatattaatgcacagtaaattgaaactagattagaatttaaataattaagtgttataataaacgag

SEQ ID NO: 24352 - DNA, 2957 bp, Zea Mays
gtctcctctctttctgtacgataacaaataccaagaaataaacccatttatttttcctgctcacagacttgcgttggccgttggcgaacaaagcgaattgtcatagtgacataatttattgtcaggaacctttattttatctttatacatcgtacatgttttctctccctgtctctagtactgtcgacatttttaaaattgcgcaatttttttaagaacggggaagaatgcccggagcgctctataaaacctgggggatcagaggaggaggacgtaggtatcgtgtcggtgtgcagtgtgttgtcatctccatctccagctccagcgccgccttgctctgtgtgcttccgcccgctctgtgttgctattgctaaactagtgtgttctgtcgctatgggctccctggccaccgcggacgggccgttgccgccgctcaagtaccctcaggctcgccgggacgaagacatcgtcgacgactaccacggcgtcctcgtgccggacccttacagatggatggagcaggtggattcgaaggaggtgaaggagttcgtggacgcgcaggcggccgtgaccagcgccgtgctgtccagctgcgaccaccgcgggcgcctgcgcgggcagctcaccgcgctcttcgaccacccgcgcttccgcgcgcccttcaagcgccggggcagctacttctacttccacaacccgggcctccgcccgcacagcgcgctctacgtgcagcacgggctgggcggcgagcccgacgtgctgctggaccccagcacgttcagcgaggacggcacggtgtcgctcggcgtggtcggcgtgagcgacgacggcgagcacctggcctacggcaccagcggcagcggcagcgactgggtcaccatcagggtcatgcgcgtgcgcgacaaggagcacctgcccgatacgctgtcctgggtgaaattctcgcgcatcgcgtggactcgtgacggccaagggttcttctactcgcgttttccggctccaagggatgcgctggattctgggatgaagactggcgtcaatctcaaccacgaagtctactatcatttccttggaacagagcagtcacaggacgtgttgtgctggagagaccctgatcatcccaagtacatatacatccctcaagtcacagaagacggcaagtacgtgatcctttcggtctcagaaacgtcagagccggtgaacaagctgtactactgcgacctgtcggctctcgctcacgggctgggcggcgtgaagagcgcccatggcaacggcatgctccccttcgtcaagctcgtggacaggttcgaggcctactacgggctcatcgctaacgacggcacccagttcacgttcctcacgaacaaagacgctccaaggtacaagctggcgagggtggacgtcgacgacgacgagcccgggtcgccgtggtggaccgacgtggttcccgaggacgaggacgggaaggcggtcctggagtcggcgtgcgccgtccacggccacaagctgctggtgagctacctgtcggatgtcaggtgcgtcctgcagatgaggagcctggtcactggggagctgcttcacgacatacccgtcgacatcggcactgtcagcgggatctccggcagacgatgcgacgccgaggtgttcgtcgagttcgcgagcttccttacccccgggatcatctacaggtgcgatgtcggctctgcggtcccggagatggacgtgtacagagagatctcggttccaggattcgatcgaaacgagtttgaagcgaagcaggtgttttatccgagtaaggatgggaccaagatcccaatgttcatcgtatccaagaaggagatcagcctggacggatcgcacccggcactactgttcggctacggcggcttcggcgtgagcgtgacgccgcagttcagcgtcgcccgcgtggtcctgatgaggaacctggggttcgtggcgtgcgtcgccaacctcaggggcggcggggagtacggcgagggctggcacagggccgggtcgctcgccaacaagcagaactgcttcgacgacttcgtcgccgccggcgagttcctcgtgtccgctggctacaccagcccggcgaggctgtgcgtcgagggcggcagcaacgggggcctcctggtagctgcctgcgtgaaccagcgccctgatctgtttggctgtgccctggcccatgtcggagtgatggacatgctacggttccacaagttcaccataggtcgtgcatggacatgcgacttcgggtgttcggagaacgaggaagagttccagtggcttatcaagtactcccccctgcacaacgtgcggcggccgtgggagaacaaacgggcggccgcagctgccaacggcgacgcaagctgccggggcttaggcggccagtaccctgcaaccatgctgctgacggcggaccacgacgaccgcgtggtgccgtcgcacacgctcaaattcctcgcgacgatgcagcacgtcctgcgccccggcgcggatggcagcccgcagacgaaccccgtcgtcgcccggatcgagcgcaagagcggccactgctgcggccgctccacgcagaagatcatcgacgaggctgcggatcggtacgcattcgccgcgaagatgatgggagtctcttggatggactgactgagtaacccaccaaatgagtactgcgcatttggctcaggctgttaggttacaatgtatcggtgctgtattgtaagcggccaggctggcaacttggcgtgacacatgtttggttctgcttctggtttggaaaattagaagctgaactaaaagggcttcttttctgcgactactttaaaaaaaacagcttttctttagtgtaaatttgagaccttgttattgatacttacgaagtttgttatattaatgcacagtaaattgaaactagattagaatttaaataattaagtgttataataaacgag

SEQ ID NO: 24353 - DNA, 1685 bp, Zea Mays
acgccgcccagctcgtgagcgagagccgaaaggttcgaggcctactacgggctcatcgctaacgacggcacccagttcacgttcctcacgaacaaagacgctccaaggtacaagctggcgagggtggacgtcgacgacgacgagcccgggtcgccgtggtggaccgacgtggttcccgaggacgaggacgggaaggcggtcctggagtcggcgtgcgccgtccacggccacaagctgctggtgagctacctgtcggatgtcaggtgcgtcctgcagatgaggagcctggtcactggggagctgcttcacgacatacccgtcgacatcggcactgtcagcgggatctccggcagacgatgcgacgccgaggtgttcgtcgagttcgcgagcttccttacccccgggatcatctacaggtgcgatgtcggctctgcggtcccggagatggacgtgtacagagagatctcggttccaggattcgatcgaaacgagtttgaagcgaagcaggtgttttatccgagtaaggatgggaccaagatcccaatgttcatcgtatccaagaaggagatcagcctggacggatcgcacccggcactactgttcggctacggcggcttcggcgtgagcgtgacgccgcagttcagcgtcgcccgcgtggtcctgatgaggaacctggggttcgtggcgtgcgtcgccaacctcaggggcggcggggagtacggcgagggctggcacagggccgggtcgctcgccaacaagcagaactgcttcgacgacttcgtcgccgccggcgagttcctcgtgtccgctggctacaccagcccggcgaggctgtgcgtcgagggcggcagcaacgggggcctcctggtagctgcctgcgtgaaccagcgccctgatctgtttggctgtgccctggcccatgtcggagtgatggacatgctacggttccacaagttcaccataggtcgtgcatggacatgcgacttcgggtgttcggagaacgaggaagagttccagtggcttatcaagtactcccccctgcacaacgtgcggcggccgtgggagaacaaacgggcggccgcagctgccaacggcgacgcaagctgccggggcttaggcggccagtaccctgcaaccatgctgctgacggcggaccacgacgaccgcgtggtgccgtcgcacacgctcaaattcctcgcgacgatgcagcacgtcctgcgccccggcgcggatggcagcccgcagacgaaccccgtcgtcgcccggatcgagcgcaagagcggccactgctgcggccgctccacgcagaagatcatcgacgaggctgcggatcggtacgcattcgccgcgaagatgatgggagtctcttggatggactgactgagtaacccaccaaatgagtactgcgcatttggctcaggctgttaggttacaatgtatcggtgctgtattgtaagcggccaggctggcaacttggcgtgacacatgtttggttctgcttctggtttggaaaattagaagctgaactaaaagggcttcttttctgcgactactttaaaaaaaacagcttttctttagtgtaaatttgagaccttgttattgatacttacgaagtttgttatattaatgcacagtaaattgaaactagattagaatttaaataattaagtgttataataaacgag

SEQ ID NO: 24354 - DNA, 3091 bp, Zea Mays
ccagcgagacggcctgttcctgagcagctgattcgtcgtttgggttgcccactgccggggccatggatcagcagcggaggagcagcatcaggttgtacgggtccaacgcctcgtcccggtcggggtccttcgacttcgaacacgaccaggacaaggaacgcgctgaccagcccagcgacggcgaccgccgggaggtcgtcgtgaagatcgacgccgagccgcactcgccggtctccctccacgcggccggaggcatgtccgggcacagctccgcggtcagcacgccgcgggccggcggcgcggtgagcatgctcgcggcgtctgcgtccggctcgagcgcgtcgacctccagcgctgggggcgatgcgccccgctccggcgagtcgttcagtttcaagaaccgcacgccgcagtcttcggccggcggcggggagtccagcgaagatccgccgagccgcctcattggcagcttcctccggaagcaggcggccgctggcggcgagctgtccatcgaccccgacttcgaggtggacgagatgagaaggccgccacgcgcgccgacatctgtcaacgcctccagggagctgcgcgtctcgttccaggatccccggaaacggttctccccgtccacgtcgtcggcgtcctcctcctcctacgacgccagccacaaccggaaccagagcaccatcgacttggacactgccgaggtgctacgctgcacgtcgacgtccaccggttcctccctgctggcgcgcagcaagacgcgatctcggctaatggatcccccgccaccgtcgacgtcgagcgcccccgccagcgaggtggatccccgaaagtcatttgtctccaaggggctgccgcccaagtccggccagctccggtcgggtcttatcggcaagtcggggctcattggcaaatcagggcccatcggcaagtcaggtgccttcgaggatgaggacgacgacccgttcatggacgagggcatgacctcggacttcaagcgcgacaccatggactgccttctcatcatggagtgggtgagcctggtggtcatcgtgggcgcgctcatctgcagcgttaccatacccagcctgtccataaagaagctctcggggctccacctctggaagtgggagctcctcgtgttcgtgctcatctgcggccgcctcgtgtccggctgggtcatccgcatcgccgtcttcttcgtcgagcgcaacttccttctgcgaaagaaggtgctctacttcgtgtacggcgtgcggcgggccgtgcggaacgtgctctggctgggtgtcgcgctcgtgtcctggcacctcctgttcgacaaggccgccaagcgggagacgcacacgctggtgctgccctacgtcaccaaggtgctgtgctgcctcctcgtggccaccgtgatccgcctcatcaagacgttgctgctcaaggtgctcgcctcgtccttccacgtctccacctacttcgacaggatccaggaagcgctcttcaaccagtacgtcatcgagaccctctccggcccgccgctagtggacgagagccggatgatggctgaggtgcagaggctccagagcgcgggggcgtccatccccagtgagctcgaagcgacagcgatgccgggcaagtccgggcccactgcccaagagtgggcgcctcacgacggccacaaaacagagcgccatctggatgacggcatctcgattgaccagctccacaagctcagccagaagaacatctctgcgtggagcatgaagaggctgatgaagattgttcggtacggggcgctgacaacgatggacgagcagctcaagcatgcaacgggcgaggacgagctggccacggagatacacagcgagtacgaggccaaggttgctgccaagaggatcttccagaacgtcgccaagcctggatccaagaagaagctctgaaggcgatggatcttttcgaaggagcgcaggagcacaacagggtcagcaagaggaaacatgaaacaaaatcccgtggcgtccaatcgctgtcgtctggatactgtaggtaaacgcgttcagagagcgcaaagctctcgccctgacgctcaacgacaccaagaccgcagtgaacaagctgcaccagatggccaacgtcgtggtcgcgctcatcgttctcgcgctctggctcctcatcctggggatcgcgacgtccaagttcttcgtcctgctcagctcgcagctgctcgtggcggtgttcatgttcgggaacactctcaggaccatcttcgaggcgatcgtgttcctgttcgtgatgcatcctttcgatgtcggcgaccgatgcgaagttgatggaatgcaggtggtcgtggaggagatgaacatcatgacgacgatcttcctccgatatgacaacctcaaggtgtactatccaaacagtaagctagcccagctaccgatcatgaattactacaggagtcctgacatgggagattcggtggacttcactgttcatgtcgcaacgccggtggagaaactgtccctcatgaaggagagactgatgcattaccttgacaacaagaaggagcactggtaccctggctccatggtggtcctgcgcgacgtggacgacacgaacaagctgaaggcctccatctggtgtcgccagacgatcaacttccacgacatggggatgaggttcgagcggagagagctgctgctccaggagatgatcaaggtcctgagagacctcgagatcgagtaccggatgctgccgctcgacatcaacgtccggaacgcgcctgccatccagtcctcaaggatgccgtcgacatggacgtttagttattgagatgagatgagatttgtgctgctagaggtagtagttcctgagtgagttgagctgtgacagcgttctgacgagaggcggcaacaggttttgctgtcgctgcagccatcacttgagctttttcctgtagttattgtgttgttggtccaagtactccatagttatctttagtccatctcagatatctttagttcatctcagttatattacctgatgcttgtcattctattacagatggtattgaataattgatttcatcacttggtaatga

SEQ ID NO: 24355 - DNA, 3096 bp, Zea Mays
ccagcgagacggcctgttcctgagcagctgattcgtcgtttgggttgcccactgccggggccatggatcagcagcggaggagcagcatcaggttgtacgggtccaacgcctcgtcccggtcggggtccttcgacttcgaacacgaccaggacaaggaacgcgctgaccagcccagcgacggcgaccgccgggaggtcgtcgtgaagatcgacgccgagccgcactcgccggtctccctccacgcggccggaggcatgtccgggcacagctccgcggtcagcacgccgcgggccggcggcgcggtgagcatgctcgcggcgtctgcgtccggctcgagcgcgtcgacctccagcgctgggggcgatgcgccccgctccggcgagtcgttcagtttcaagaaccgcacgccgcagtcttcggccggcggcggggagtccagcgaagatccgccgagccgcctcattggcagcttcctccggaagcaggcggccgctggcggcgagctgtccatcgaccccgacttcgaggtggacgagatgagaaggccgccacgcgcgccgacatctgtcaacgcctccagggagctgcgcgtctcgttccaggatccccggaaacggttctccccgtccacgtcgtcggcgtcctcctcctcctacgacgccagccacaaccggaaccagagcaccatcgacttggacactgccgaggtgctacgctgcacgtcgacgtccaccggttcctccctgctggcgcgcagcaagacgcgatctcggctaatggatcccccgccaccgtcgacgtcgagcgcccccgccagcgaggtggatccccgaaagtcatttgtctccaaggggctgccgcccaagtccggccagctccggtcgggtcttatcggcaagtcggggctcattggcaaatcagggcccatcggcaagtcaggtgccttcgaggatgaggacgacgacccgttcatggacgagggcatgacctcggacttcaagcgcgacaccatggactgccttctcatcatggagtgggtgagcctggtggtcatcgtgggcgcgctcatctgcagcgttaccatacccagcctgtccataaagaagctctcggggctccacctctggaagtgggagctcctcgtgttcgtgctcatctgcggccgcctcgtgtccggctgggtcatccgcatcgccgtcttcttcgtcgagcgcaacttccttctgcgaaagaaggtgctctacttcgtgtacggcgtgcggcgggccgtgcggaacgtgctctggctgggtgtcgcgctcgtgtcctggcacctcctgttcgacaaggccgccaagcgggagacgcacacgctggtgctgccctacgtcaccaaggtgctgtgctgcctcctcgtggccaccgtgatccgcctcatcaagacgttgctgctcaaggtgctcgcctcgtccttccacgtctccacctacttcgacaggatccaggaagcgctcttcaaccagtacgtcatcgagaccctctccggcccgccgctagtggacgagagccggatgatggctgaggtgcagaggctccagagcgcgggggcgtccatccccagtgagctcgaagcgacagcgatgccgggcaagtccgggcccactgcccaagagtgggcgcctcacgacggccacaaaacagagcgccatctggatgacggcatctcgattgaccagctccacaagctcagccagaagaacatctctgcgtggagcatgaagaggctgatgaagattgttcggtacggggcgctgacaacgatggacgagcagctcaagcatgcaacgggcgaggacgagctggccacggagatacacagcgagtacgaggccaaggttgctgccaagaggatcttccagaacgtcgccaagcctggatccaagcacatatacctgtcagacttgatgcgtttcatgagacaggaagaagctctgaaggcgatggatcttttcgaaggagcgcaggagcacaacagggtcagcaagaggtcactcaagaactgggtggtaaacgcgttcagagagcgcaaagctctcgccctgacgctcaacgacaccaagaccgcagtgaacaagctgcaccagatggccaacgtcgtggtcgcgctcatcgttctcgcgctctggctcctcatcctggggatcgcgacgtccaagttcttcgtcctgctcagctcgcagctgctcgtggcggtgttcatgttcgggaacactctcaggaccatcttcgaggcgatcgtgttcctgttcgtgatgcatcctttcgatgtcggcgaccgatgcgaagttgatggaatgcaggtggtcgtggaggagatgaacatcatgacgacgatcttcctccgatatgacaacctcaaggtgtactatccaaacagtaagctagcccagctaccgatcatgaattactacaggagtcctgacatgggagattcggtggacttcactgttcatgtcgcaacgccggtggagaaactgtccctcatgaaggagagactgatgcattaccttgacaacaagaaggagcactggtaccctggctccatggtggtcctgcgcgacgtggacgacacgaacaagctgaaggcctccatctggtgtcgccagacgatcaacttccacgacatggggatgaggttcgagcggagagagctgctgctccaggagatgatcaaggtcctgagagacctcgagatcgagtaccggatgctgccgctcgacatcaacgtccggaacgcgcctgccatccagtcctcaaggatgccgtcgacatggacgtttagttattgagatgagatgagatttgtgctgctagaggtagtagttcctgagtgagttgagctgtgacagcgttctgacgagaggcggcaacaggttttgctgtcgctgcagccatcacttgagctttttcctgtagttattgtgttgttggtccaagtactccatagttatctttagtccatctcagatatctttagttcatctcagttatattacctgatgcttgtcattctattacagatggtattgaataattgatttcatcacttggtaatga

SEQ ID NO: 24356 - DNA, 3139 bp, Zea Mays
gcgtccgcgcaatgtctctctgccgccccgcgttccgagcagagtttccccgctaatatccagcgagacggcctgttcctgagcagctgattcgtcgtttgggttgcccactgccggggccatggatcagcagcggaggagcagcatcaggttgtacgggtccaacgcctcgtcccggtcggggtccttcgacttcgaacacgaccaggacaaggaacgcgctgaccagcccagcgacggcgaccgccgggaggtcgtcgtgaagatcgacgccgagccgcactcgccggtctccctccacgcggccggaggcatgtccgggcacagctccgcggtcagcacgccgcgggccggcggcgcggtgagcatgctcgcggcgtctgcgtccggctcgagcgcgtcgacctccagcgctgggggcgatgcgccccgctccggcgagtcgttcagtttcaagaaccgcacgccgcagtcttcggccggcggcggggagtccagcgaagatccgccgagccgcctcattggcagcttcctccggaagcaggcggccgctggcggcgagctgtccatcgaccccgacttcgaggtggacgagatgagaaggccgccacgcgcgccgacatctgtcaacgcctccagggagctgcgcgtctcgttccaggatccccggaaacggttctccccgtccacgtcgtcggcgtcctcctcctcctacgacgccagccacaaccggaaccagagcaccatcgacttggacactgccgaggtgctacgctgcacgtcgacgtccaccggttcctccctgctggcgcgcagcaagacgcgatctcggctaatggatcccccgccaccgtcgacgtcgagcgcccccgccagcgaggtggatccccgaaagtcatttgtctccaaggggctgccgcccaagtccggccagctccggtcgggtcttatcggcaagtcggggctcattggcaaatcagggcccatcggcaagtcaggtgccttcgaggatgaggacgacgacccgttcatggacgagggcatgacctcggacttcaagcgcgacaccatggactgccttctcatcatggagtgggtgagcctggtggtcatcgtgggcgcgctcatctgcagcgttaccatacccagcctgtccataaagaagctctcggggctccacctctggaagtgggagctcctcgtgttcgtgctcatctgcggccgcctcgtgtccggctgggtcatccgcatcgccgtcttcttcgtcgagcgcaacttccttctgcgaaagaaggtgctctacttcgtgtacggcgtgcggcgggccgtgcggaacgtgctctggctgggtgtcgcgctcgtgtcctggcacctcctgttcgacaaggccgccaagcgggagacgcacacgctggtgctgccctacgtcaccaaggtgctgtgctgcctcctcgtggccaccgtgatccgcctcatcaagacgttgctgctcaaggtgctcgcctcgtccttccacgtctccacctacttcgacaggatccaggaagcgctcttcaaccagtacgtcatcgagaccctctccggcccgccgctagtggacgagagccggatgatggctgaggtgcagaggctccagagcgcgggggcgtccatccccagtgagctcgaagcgacagcgatgccgggcaagtccgggcccactgcccaagagtgggcgcctcacgacggccacaaaacagagcgccatctggatgacggcatctcgattgaccagctccacaagctcagccagaagaacatctctgcgtggagcatgaagaggctgatgaagattgttcggtacggggcgctgacaacgatggacgagcagctcaagcatgcaacgggcgaggacgagctggccacggagatacacagcgagtacgaggccaaggttgctgccaagaggatcttccagaacgtcgccaagcctggatccaagaagaagctctgaaggcgatggatcttttcgaaggagcgcaggagcacaacagggaaacatgaaacaaaatcccgtggcgtccaatcgctgtcgtctggatactgtaggtaaacgcgttcagagagcgcaaagctctcgccctgacgctcaacgacaccaagaccgcagtgaacaagctgcaccagatggccaacgtcgtggtcgcgctcatcgttctcgcgctctggctcctcatcctggggatcgcgacgtccaagttcttcgtcctgctcagctcgcagctgctcgtggcggtgttcatgttcgggaacactctcaggaccatcttcgaggcgatcgtgttcctgttcgtgatgcatcctttcgatgtcggcgaccgatgcgaagttgatggaatgcaggtggtcgtggaggagatgaacatcatgacgacgatcttcctccgatatgacaacctcaaggtgtactatccaaacagtaagctagcccagctaccgatcatgaattactacaggagtcctgacatgggagattcggtggacttcactgttcatgtcgcaacgccggtggagaaactgtccctcatgaaggagagactgatgcattaccttgacaacaagaaggagcactggtaccctggctccatggtggtcctgcgcgacgtggacgacacgaacaagctgaaggcctccatctggtgtcgccagacgatcaacttccacgacatggggatgaggttcgagcggagagagctgctgctccaggagatgatcaaggtcctgagagacctcgagatcgagtaccggatgctgccgctcgacatcaacgtccggaacgcgcctgccatccagtcctcaaggatgccgtcgacatggacgtttagttattgagatgagatgagatttgtgctgctagaggtagtagttcctgagtgagttgagctgtgacagcgttctgacgagaggcggcaacaggttttgctgtcgctgcagccatcacttgagctttttcctgtagttattgtgttgttggtccaagtactccatagttatctttagtccatctcagatatctttagttcatctcagttatattacctgatgcttgtcattctattacagatggtattgaataattgatttcatcacttggtaatga

SEQ ID NO: 24357 - DNA, 1979 bp, Zea Mays
ctgactggcgttcgtgttccgtgttcgactcgacgcgctcgtgcgtggcatacagacgaacacctcacaaggacaaccagtcccctcactcaggaagcttcccggggaaagaatgtgcgggtgtgcggccctcgtcgccggagcccggccgccacggcccgtcctcccccgcaggctccgtcgccgtcgagggagctccgtccgagcagaggtctcaccaggcggtgagtcccagccgaagaaggtcaccgtcgcaggcgccggctgggccggctttgccgccgcgcaccacctcattaaacaggggtacgatgtcacgcttcttgctgcggagagtggcccaacggaggaggttggcctcagaggattctggcaaccgtatcgcaacatcttcgctttagtcgacgagctggggatctcgcctttcacgggctggaataaagcagcatactattctacggagggccttgctgtcgaatttcccatatttcataaccagccccgattaccagctccctttggagtctttgcatatccagaattccctaatcttcctttgagtgataggctgacatcaattcctgtcatagctgcagtcattgacttcgacaacactgacactgcttggaggaaatatgatgcaatgactgcaaaagagctttttaagatgtatggttgctctcaaaggctctacagggaaatttttgagctagttattcaggctgccctgtttgctcctggtgagcaatgtagtgcagctgcaacactggggatgctgtactattatgtgttgtctcatcaggttctgtgctcttctgcattataaagatcgattttcaccagacgataatttcttaaatgaacctttgtcatcttattgtctctgtagatttagtttttataaatgaatgccctattttgcaggaaaattctgacttcttgctgtgccgtggtgaagtagaagaaaaaattttctctccttggctgcaatcattggagcttaaaggcttaaaatttgtagaaaataaagttccaacaagtttgactacagatgtggatagcggatgcatctcttctattgtttgtggtgatgatgtgtacgaggcagatgcatttgttttagccatgggactctcttctctacaatccatcgtcaaaaacaggaatcttcttcacctatctacagtcgatgtgatctctgtaaaattatggtttgataaaaagatcataattccaaaggttgccaatgtgtgttctggttttgatgattcatctggctgggcattctttgaccttacctcagtatatgatgattattgtgaagaatcaataaccattgtggaggctgaatttcttcatcacatcttatcaaatgcatacaagattttgagggcgcaattgtgataagatattcaatcagaagatctcctaattctgtaatcaactttcttccagttgaaggagatgagccccatatagagacattgcgaagtctcaatagaagagccaatgaactgaagtcacaaattccattctcagaattctttctccaataattttgttgggatttttctgtgtttgttgagcattgccattgttgtaggcattgttattaagtcggtaaggtaaagcgtggcgacctagccctttgagtcgactagacgcttaaggcgcgcagcgaggtgtcgccatacagatgtcctaacctacaggagagcaatagaaacataccttgttgatgccaattttggagctccagtttcgcttgttccatgtagcgtgtatcccccttacagattgcaacatgaacatgttgtgaattataattaatgtaagaaacaatttataatgcaatgattgaatgaatcatctgtgtaaaatatagattggcttgaaggggatttaaccatcttgataaatgtcttctttataatcaacaagaagaaacagcacaacacattctggtggcttgcatattt

SEQ ID NO: 24358 - DNA, 2320 bp, Zea Mays
ctgactggcgttcgtgttccgtgttcgactcgacgcgctcgtgcgtggcatacagacgaacacctcacaaggacaaccagtcccctcactcaggaagcttcccggggaaagaatgtgcgggtgtgcggccctcgtcgccggagcccggccgccacggcccgtcctcccccgcaggctccgtcgccgtcgagggagctccgtccgagcagaggtctcaccaggcggtgagtcccagccgaagaaggtcaccgtcgcaggcgccggctgggccggctttgccgccgcgcaccacctcattaaacaggggtacgatgtcacgcttcttgctgcggagagtggcccaacggaggaggttggcctcagaggattctggcaaccgtatcgcaacatcttcgctttagtcgacgagctggggatctcgcctttcacgggctggaataaagcagcatactattctacggagggccttgctgtcgaatttcccatatttcataaccagccccgattaccagctccctttggagtctttgcatatccagaattccctaatcttcctttgagtgataggctgacatcaattcctgtcatagctgcagtcattgacttcgacaacactgacactgcttggaggaaatatgatgcaagtaaggaagttccattgtctatccagttagttcagattagtgtacgtgtcacatgtactacatgtcttcataatgggttatctttatcaaattattgttggtatcttcatctgtagtgactgcaaaagagctttttaagatgtatggttgctctcaaaggctctacagggaaatttttgagctagttattcaggctgccctgtttgctcctggtgagcaatgtagtgcagctgcaacactggggatgctgtactattatgtgttgtctcatcaggttctgtgctcttctgcattataaagatcgattttcaccagacgataatttcttaaatgaacctttgtcatcttattgtctctgtagatttagtttttataaatgaatgccctattttgcaggaaaattctgacttcttgctgtgccgtggtgaagtagaagaaaaaattttctctccttggctgcaatcattggagcttaaaggcttaaaatttgtagaaaataaagttccaacaagtttgactacagatgtggatagcggatgcatctcttctattgtttgtggtgatgatgtgtacgaggcagatgcatttgttttagccatgggactctcttctctacaatccatcgtcaaaaacaggtaacaccgtatatgtcacacgttaatcttgggtcagttttgccttaccttagaaccttaccttactacattcagtaatgttggaagccaagaatggtaagaacatatatcctataacacttaaagcagccatacgtttcagttttcacaacctgaattctgcatttaatttatatgcttttctgacatgtaaagtccattcctacggtctgatcgagaattcaggaatcttcttcacctatctacagtcgatgtgatctctgtaaaattatggtttgataaaaagatcataattccaaaggttgccaatgtgtgttctggttttgatgattcatctggctgggcattctttgaccttacctcagtatatgatgattattgtgaagaatcaataaccattgtggaggctgaatttcttcatcacatcttatcaaatgcatacaagattttgagggcgcaattgtgataagatattcaatcagaagatctcctaattctgtaatcaactttcttccagttgaaggagatgagccccatatagagacattgcgaagtctcaatagaagagccaatgaactgaagtcacaaattccattctcagaattctttctccaataattttgttgggatttttctgtgtttgttgagcattgccattgttgtaggcattgttattaagtcggtaaggtaaagcgtggcgacctagccctttgagtcgactagacgcttaaggcgcgcagcgaggtgtcgccatacagatgtcctaacctacaggagagcaatagaaacataccttgttgatgccaattttggagctccagtttcgcttgttccatgtagcgtgtatcccccttacagattgcaacatgaacatgttgtgaattataattaatgtaagaaacaatttataatgcaatgattgaatgaatcatctgtgtaaaatatagattggcttgaaggggatttaaccatcttgataaatgtcttctttataatcaacaagaagaaacagcacaacacattctggtggcttgcatattt

SEQ ID NO: 24359 - DNA, 1961 bp, Zea Mays
ctgactggcgttcgtgttccgtgttcgactcgacgcgctcgtgcgtggcatacagacgaacacctcacaaggacaaccagtcccctcactcaggaagcttcccggggaaagaatgtgcgggtgtgcggccctcgtcgccggagcccggccgccacggcccgtcctcccccgcaggctccgtcgccgtcgagggagctccgtccgagcagaggtctcaccaggcggtgagtcccagccgaagaaggtcaccgtcgcaggcgccggctgggccggctttgccgccgcgcaccacctcattaaacaggggtacgatgtcacgcttcttgctgcggagagtggcccaacggaggaggttggcctcagaggattctggcaaccgtatcgcaacatcttcgctttagtcgacgagctggggatctcgcctttcacgggctggaataaagcagcatactattctacggagggccttgctgtcgaatttcccatatttcataaccagccccgattaccagctccctttggagtctttgcatatccagaattccctaatcttcctttgagtgataggctgacatcaattcctgtcatagctgcagtcattgacttcgacaacactgacactgcttggaggaaatatgatgcaagaaaattctgacttcttgctgtgccgtggtgaagtagaagaaaaaattttctctccttggctgcaatcattggagcttaaaggcttaaaatttgtagaaaataaagttccaacaagtttgactacagatgtggatagcggatgcatctcttctattgtttgtggtgatgatgtgtacgaggcagatgcatttgttttagccatgggactctcttctctacaatccatcgtcaaaaacagtccattcctacggtctgatcgagaattcaggaatcttcttcacctatctacagtcgatgtgatctctgtaaaattatggtttgataaaaagatcataattccaaaggttgccaatgtgtgttctggttttgatgattcatctggctgggcattctttgaccttacctcagtatatgatgattattgtgaagaatcaataaccattgtggaggctgaattttataatgctagccatttggtactcttaagtgatgatgatattgtctatgaagcttcatcacatcttatcaaatgcatacaagattttgagggcgcaattgtgataagatattcaatcagaagatctcctaattctgtaatcaactttcttccaggctcgtataagtacacactgagaggatcaacttcctttccaaatttgtttattgctggtgattggattgtcaaccgacatgggtccttttctaaagaaaaagcatatgtgactggacttgaagctggtaatagggtagtagactattttgacattggggactttgccaaaataattgcagttgaaggagatgagccccatatagagacattgcgaagtctcaatagaagagccaatgaactgaagtcacaaattccattctcagaattctttctccaataattttgttgggatttttctgtgtttgttgagcattgccattgttgtaggcattgttattaagtcggtaaggtaaagcgtggcgacctagccctttgagtcgactagacgcttaaggcgcgcagcgaggtgtcgccatacagatgtcctaacctacaggagagcaatagaaacataccttgttgatgccaattttggagctccagtttcgcttgttccatgtagcgtgtatcccccttacagattgcaacatgaacatgttgtgaattataattaatgtaagaaacaatttataatgcaatgattgaatgaatcatctgtgtaaaatatagattggcttgaaggggatttaaccatcttgataaatgtcttctttataatcaacaagaagaaacagcacaacacattctggtggcttgcatattt

SEQ ID NO: 24360 - DNA, 1763 bp, Zea Mays
ctgactggcgttcgtgttccgtgttcgactcgacgcgctcgtgcgtggcatacagacgaacacctcacaaggacaaccagtcccctcactcaggaagcttcccggggaaagaatgtgcgggtgtgcggccctcgtcgccggagcccggccgccacggcccgtcctcccccgcaggctccgtcgccgtcgagggagctccgtccgagcagaggtctcaccaggcggtgagtcccagccgaagaaggtcaccgtcgcaggcgccggctgggccggctttgccgccgcgcaccacctcattaaacagtcattgacttcgacaacactgacactgcttggaggaaatatgatgcaagtaaggaagttccattgtctatccagttagttcagattagtgtacgtgtcacatgtactacatgtcttcataatgggttatctttatcaaattattgttggtatcttcatctgtagtgactgcaaaagagctttttaagatgtatggttgctctcaaaggctctacagggaaatttttgagctagttattcaggctgccctgtttgctcctggtgagcaatgtagtgcagctgcaacactggggatgctgtactattatgtgttgtctcatcaggaaaattctgacttcttgctgtgccgtggtgaagtagaagaaaaaattttctctccttggctgcaatcattggagcttaaaggcttaaaatttgtagaaaataaagttccaacaagtttgactacagatgtggatagcggatgcatctcttctattgtttgtggtgatgatgtgtacgaggcagatgcatttgttttagccatgggactctcttctctacaatccatcgtcaaaaacagtccattcctacggtctgatcgagaattcaggaatcttcttcacctatctacagtcgatgtgatctctgtaaaattatggtttgataaaaagatcataattccaaaggttgccaatgtgtgttctggttttgatgattcatctggctgggcattctttgaccttacctcagtatatgatgattattgtgaagaatcaataaccattgtggaggctgaattttataatgctagccatttggtactcttaagtgatgatgatattgtctatgaagcttcatcacatcttatcaaatgcatacaagattttgagggcgcaattgtgataagatattcaatcagaagatctcctaattctgtaatcaactttcttccagttgaaggagatgagccccatatagagacattgcgaagtctcaatagaagagccaatgaactgaagtcacaaattccattctcagaattctttctccaataattttgttgggatttttctgtgtttgttgagcattgccattgttgtaggcattgttattaagtcggtaaggtaaagcgtggcgacctagccctttgagtcgactagacgcttaaggcgcgcagcgaggtgtcgccatacagatgtcctaacctacaggagagcaatagaaacataccttgttgatgccaattttggagctccagtttcgcttgttccatgtagcgtgtatcccccttacagattgcaacatgaacatgttgtgaattataattaatgtaagaaacaatttataatgcaatgattgaatgaatcatctgtgtaaaatatagattggcttgaaggggatttaaccatcttgataaatgtcttctttataatcaacaagaagaaacagcacaacacattctggtggcttgcatattt

SEQ ID NO: 24361 - DNA, 1328 bp, Zea Mays
aaaattctgggccttatggggcttctccctcatcgggtcatccctctccgccccgcatctccctcatcgccccgcgcggccgcgcctccctcggtccctccccgctacctcgaacctctcctcctcctcctccgccgccgccttccctccggccagcgcatcctcctcctccgcctccgccgtcctccggctggaggcacatcctctgcctcctctgcctcccctcatgtgacacagcgcacatcgcttccgaagtcccaagagccacgtcgctcgtgccaccggccgccgctgtacgtccatcctctgtctccagactccaacagtgtgcatccgtcccagttcctgattacttttccgcgaccgtgagctgggagtatggccgaggcagcgaacgaggaggacgccaagaggacaggactggaaggcactggcctgccgctgcaaggcggctcccacggcaaccttcgtagcgctggcagcgaccagcagttgaggcagatgctcgattcgctcaaatcctcaaagtccccggctgtgatcaactatggtgcctcatggtatgcccctttgtctcttgcttgtgtggagacattcattatttttttttaaaaggctacacatacgttaaagctctatagtcctatggtttggacctaaactctctaggcagcctgatggtttgcgtatttacatttgttctgttgaaatatgcattccacacttcaattttttaaaggttttggaaaagtagatcttttgctatgccatggaagtctaaagttctgcttatactgataaccatatgtggtgattgaatttgcctgtccacttgattctgcatgatcaatcaaactcactcctccttatacgtaggtgccgtgtctgcagtcagattcttccatccttctgcaagtgcagtgataagttcaagaaacttactttcatctatgtggacattgacgagtgccctgaaacaacccaaaacatacgctacaccccgaccttccatttttacagagacggcgaaagggtcgatgagatgctcggcgcaggagaagagagactacatgatcggctatggttgcattcttgattgattggcctccacctccgttgtttcatgaaccatttatgttgaatgcaactatgttttttgtctctccaaatttctacttgtcaaactcaatgtttcagagaaccttgtctaccagcctttgtgttagtcataagagcaagtattataagtacacctcagcaggctgtaaggtgttccacgttatcagattcttacgtggaggggtgagaaaccaagaaagagaaagaaa

SEQ ID NO: 24362 - DNA, 3102 bp, Zea Mays
atggctaacgccgggacagggaggggaggacagacaccggagagcacgcaccagcacaccttaagaacggcggtgagcaacaccagggaggccgcggagagcccgcctttggctgtcgacgacaagattttcgttgctgtccccgaagaactcaagcacggcaagagcaacttgctgtgggcgctgcacaacttggccagggacgcctccagctcccggattgccattgctcatgtccacgttcctgcccagatgataaccaccaactgctcaactgtgcccgaagagattaacctgtctgattataggcaaattaatattttatgcacgaaattttgtcatgaggttaattgcgacatagtagctattcaaaatgacgacatagctaatggggtcatcaatcttatttctttacatgggatcaaaaagcttgtcgtgggagccgcatcagataaaaaatattcaaagacaatgaaagcaccaacgtccaatacagcattgaagataatggaaggagcagcttcaccatgcaagatatggtttacttgcaaaggatctctaattgttgtcaagtaaggttgagatgggttggtagtaaggcacctaaattaattacgttgctcttttctcggtagtgctatctatctgtatctagctgtttaggatatatagtgattcatcattaatctacatcagcaaattacagtgtgctatcagcctctttttcggacaagtatagtaccttgtaggatataacaataattgtgattgttaactgtcactttgacaggggcggcaatgcagatacacctacagtaccatcatcacaaaacacagcaccattaccagtattcaacatttctagccaaatgagatcaatgatgatccacaattcaaaggacaaagcatcaagctcaaatttaagtatggcgaacgatatgggagaatcaagaacagatgtaccttgctctctatatgaaaatgctggtgatacactgcttcaatcatttgaagatgttgagtccactttcaaaggcaagccaaggagactacggagtttagaggacttcactgttgactcaggcagatcgcagacgcagaactctgattccagttgtccaccaaatgatggggcagccagtatctctagaacagcagtggttgataacgataacataagtgaagttgcatcaaatatgcatctttcaactaacaattcatacgaccatatttcaccaacaccacatgacctggtatgtactgtgtgctattgttctcaatggggattatctcagtcctaaatggcatataggttctgatacatcaaatttaatggctcaggacaaacttaaggaaactctcactaaaatacagcttctagaaaaagaagtgcaagaagaatgcaataaacagcaaaatgctgaaagagaactgcaatcagctcttcaaaaggtacaggatttgctcattcgctatgctagtccagaatccagattgaatgtttgtttattaatgaaatcacatgtattcttgcagagcaaagaattagaaaaatcgtatatgaacgaattaaggcagcagaaggcactcaaggaaatgcttgaaaaacagaggcaggagattgatgtgatgagaagacagcaagaagaagcatatgctgcgctatacaatgcaaatgagcagaaggtcacactagaacaacgaataagtgagattgagctatatgttaaagataaggaagatgagctagcaagaaacaaacaccaactggaagcgctccaagcagattgtgacaggatacaacaagaaagagatgctgccataagggaagctactgaactgcatgaaaagaatcggctgggagtttttgcaccatctgaagccctaaacaccaagttctctcttattgagctgcaacaagcaacacaagacttcaatccaatgttcaaggttggtgaaggtggtttcggaagtgtctataaaggtttcctccgcaatacaacagtagctataaagttgctacatccagaaagcatgcagagacaatcagaattccatcaagaggcttctgttctcagcacagtaaggcatccaaaccttgtcacgctgattggtacatgcccagaagcttttggtctagtatacgagttctttccaaatggaagccttgaagattgcttgggatgcaagaacaacacgcgaccactaacatggcagacccgcactcgaataattggagagatgtgttctgctctcatttttcttcattcaaacaaacctcaccctgtggtacacggtgatctaaagccagaccacattcttcttgatgccaattattctagcaaattaggagattttggaatttctcgattgttgatacagacaaacacctgcagcacaaatctttaccgaacaacaaacccaagaggaaccttctcttatatggatcctgaatttctgaccactggtgaactcacaccacggtctgatgtgtactcctttggcattatcatcctgcgactactgacagggaaacaacctcaaaggattgccgaaatagtggaagatgccattgagaaagaaaatttgcattccatcatcgatagcactgctggaagttggcctttcatacaggccaaccaacttgcgcatattgccttgagatgtgctgagttaagtaggagacgaaggccagatctaacagtggatgtgtggaaagtggttgagccactaatgaaggcagcttcaatgacagcacgaccactttcatgcacagctccatcagatgagacttgcatcccatcgtacttcatatgtccaattttgcaggagatcatgagagacccttacgttgcagcggatggattcacttatgagggtgaagctattaggggctggcttgacagcgggcatagcacatcacccatgacgaatctcgacctcgagcgcagccttctcgtgccgaacagggcccttcgttcggcaatactcgagtggaaccagcaggagaggcagtgacgacgacgaacgacccatgcatggatgcagatgatgctgttttgccatcgtgtgactgtaagttacaaagttgcatgcgcagag

SEQ ID NO: 24363 - DNA, 3350 bp, Zea Mays
atggctaacgccgggacagggaggggaggacagacaccggagagcacgcaccagcacaccttaagaacggcggtgagcaacaccagggaggccgcggagagcccgcctttggctgtcgacgacaagattttcgttgctgtccccgaagaactcaagcacggcaagagcaacttgctgtgggcgctgcacaacttggccagggacgcctccagctcccggattgccattgctcatgtccacgttcctgcccagatgataaccaccaactgctcaactgtgcccgaagagattaacctgtctgattataggcaaattaatattttatgcacgaaattttgtcatgaggttaattgcgacatagtagctattcaaaatgacgacatagctaatggggtcatcaatcttatttctttacatgggatcaaaaagcttgtcgtgggagccgcatcagataaaaaatattcaaagtatggctcaagcatctatagtgtctcaaatttctagttctagcatctgtcatttgtcgacaatagaggactctagccattaaaggatcaagggatgatgtttatccaaattatgataagtttcttaaaatctagcagttgagtaatcaaaactgcaagagtagcttctcatatagtaaagaacgatttgtcaactatagaaatgtggatggtcagacagttccctgatagctcaatgtttaaaatctagcattcaaagtactccaaaagttctatggttatgaaagttgaaaactgatgtgcaggttcccatttatttcaaaaaaataatcttatgaacttcgagcacaaagagtaagaaaagatttgctaagtatagttcctttaattgacaacctaacaaatgttatcaaatcataggacaatgaaagcaccaacgtccaatacagcattgaagataatggaaggagcagcttcaccatgcaagatatggtttacttgcaaaggatctctaattgttgtcaagtaaggttgagatgggttggtagtaaggcacctaaattaattacgttgctcttttctcggtagtgctatctatctgtatctagctgtttaggatatatagtgattcatcattaatctacatcagcaaattacagtgtgctatcagcctctttttcggacaagtatagtaccttgtaggatataacaataattgtgattgttaactgtcactttgacaggggcggcaatgcagatacacctacagtaccatcatcacaaaacacagcaccattaccagtattcaacatttctagccaaatgagatcaatgatgatccacaattcaaaggacaaagcatcaagctcaaatttaagtatggcgaacgatatgggagaatcaagaacagatgtaccttgctctctatatgaaaatgctggtgatacactgcttcaatcatttgaagatgttgagtccactttcaaaggcaagccaaggagactacggagtttagaggacttcactgttgactcaggcagatcgcagacgcagaactctgattccagttgtccaccaaatgatggggcagccagtatctctagaacagcagtggttgataacgataacataagtgaagttgcatcaaatatgcatctttcaactaacaattcatacgaccatatttcaccaacaccacatgacctggacaaacttaaggaaactctcactaaaatacagcttctagaaaaagaagtgcaagaagaatgcaataaacagcaaaatgctgaaagagaactgcaatcagctcttcaaaagagcaaagaattagaaaaatcgtatatgaacgaattaaggcagcagaaggcactcaaggaaatgcttgaaaaacagaggcaggagattgatgtgatgagaagacagcaagaagaagcatatgctgcgctatacaatgcaaatgagcagaaggtcacactagaacaacgaataagtgagattgagctatatgttaaagataaggaagatgagctagcaagaaacaaacaccaactggaagcgctccaagcagattgtgacaggatacaacaagaaagagatgctgccataagggaagctactgaactgcatgaaaagaatcggctgggagtttttgcaccatctgaagccctaaacaccaagttctctcttattgagctgcaacaagcaacacaagacttcaatccaatgttcaaggttggtgaaggtggtttcggaagtgtctataaaggtttcctccgcaatacaacagtagctataaagttgctacatccagaaagcatgcagagacaatcagaattccatcaagaggcttctgttctcagcacagtaaggcatccaaaccttgtcacgctgattggtacatgcccagaagcttttggtctagtatacgagttctttccaaatggaagccttgaagattgcttgggatgcaagaacaacacgcgaccactaacatggcagacccgcactcgaataattggagagatgtgttctgctctcatttttcttcattcaaacaaacctcaccctgtggtacacggtgatctaaagccagaccacattcttcttgatgccaattattctagcaaattaggagattttggaatttctcgattgttgatacagacaaacacctgcagcacaaatctttaccgaacaacaaacccaagaggaaccttctcttatatggatcctgaatttctgaccactggtgaactcacaccacggtctgatgtgtactcctttggcattatcatcctgcgactactgacagggaaacaacctcaaaggattgccgaaatagtggaagatgccattgagaaagaaaatttgcattccatcatcgatagcactgctggaagttggcctttcatacaggccaaccaacttgcgcatattgccttgagatgtgctgagttaagtaggagacgaaggccagatctaacagtggatgtgtggaaagtggttgagccactaatgaaggcagcttcaatgacagcacgaccactttcatgcacagctccatcagatgagacttgcatcccatcgtacttcatatgtccaattttgcaggagatcatgagagacccttacgttgcagcggatggattcacttatgagggtgaagctattaggggctggcttgacagcgggcatagcacatcacccatgacgaatctcgacctcgagcgcagccttctcgtgccgaacagggcccttcgttcggcaatactcgagtggaaccagcaggagaggcagtgacgacgacgaacgacccatgcatggatgcagatgatgctgttttgccatcgtgtgactgtaagttacaaagttgcatgcgcagag

SEQ ID NO: 24364 - DNA, 3180 bp, Zea Mays
atggctaacgccgggacagggaggggaggacagacaccggagagcacgcaccagcacaccttaagaacggcggtgagcaacaccagggaggccgcggagagcccgcctttggctgtcgacgacaagattttcgttgctgtccccgaagaactcaagcacggcaagagcaacttgctgtgggcgctgcacaacttggccagggacgcctccagctcccggattgccattgctcatgtccacgttcctgcccagatgataaccaccaactgctcaactgtgcccgaagagattaacctgtctgattataggcaaattaatattttatgcacgaaattttgtcatgaggtactccatgttgtgttcctacactaaagtttgtttcatggtacaaagaaacttcatagtctattatattttccagctcaaacatatttcatgttttcccagtggggctaggggcaagtgttcattacagcacaatgagaccacaagaactccgtgcatacaggcagcatgagcgagaaaagatggagaaaaaactaaacgaatatgttttgatatgcaggcgattgaaggtgtttgtttacgttctcttatttgtcattgttaattcaatctaaattattttccctttttttgagaacaagaacaggaatgaaatcttaagagatgaggaacatatatcccaatattgcataatgatcatccaaattttcctgtgccaggttaattgcgacatagtagctattcaaaatgacgacatagctaatggggtcatcaatcttatttctttacatgggatcaaaaagcttgtcgtgggagccgcatcagataaaaaatattcaaagacaatgaaagcaccaacgtccaatacagcattgaagataatggaaggagcagcttcaccatgcaagatatggtttacttgcaaaggatctctaattgttgtcaagggcggcaatgcagatacacctacagtaccatcatcacaaaacacagcaccattaccagtattcaacatttctagccaaatgagatcaatgatgatccacaattcaaaggacaaagcatcaagctcaaatttaagtatggcgaacgatatgggagaatcaagaacagatgtaccttgctctctatatgaaaatgctggtgatacactgcttcaatcatttgaagatgttgagtccactttcaaaggcaagccaaggagactacggagtttagaggacttcactgttgactcaggcagatcgcagacgcagaactctgattccagttgtccaccaaatgatggggcagccagtatctctagaacagcagtggttgataacgataacataagtgaagttgcatcaaatatgcatctttcaactaacaattcatacgaccatatttcaccaacaccacatgacctggtatgtactgtgtgctattgttctcaatggggattatctcagtcctaaatggcatataggttctgatacatcaaatttaatggctcaggacaaacttaaggaaactctcactaaaatacagcttctagaaaaagaagtgcaagaagaatgcaataaacagcaaaatgctgaaagagaactgcaatcagctcttcaaaagagcaaagaattagaaaaatcgtatatgaacgaattaaggcagcagaaggcactcaaggaaatgcttgaaaaacagaggcaggagattgatgtgatgagaagacagcaagaagaagcatatgctgcgctatacaatgcaaatgagcagaaggtcacactagaacaacgaataagtgagattgagctatatgttaaagataaggaagatgagctagcaagaaacaaacaccaactggaagcgctccaagcagattgtgacaggatacaacaagaaagagatgctgccataagggaagctactgaactgcatgaaaagaatcggctgggagtttttgcaccatctgaagccctaaacaccaagttctctcttattgagctgcaacaagcaacacaagacttcaatccaatgttcaaggttggtgaaggtggtttcggaagtgtctataaaggtttcctccgcaatacaacagtagctataaagttgctacatccagaaagcatgcagagacaatcagaattccatcaagaggcttctgttctcagcacagtaaggcatccaaaccttgtcacgctgattggtacatgcccagaagcttttggtctagtatacgagttctttccaaatggaagccttgaagattgcttgggatgcaagaacaacacgcgaccactaacatggcagacccgcactcgaataattggagagatgtgttctgctctcatttttcttcattcaaacaaacctcaccctgtggtacacggtgatctaaagccagaccacattcttcttgatgccaattattctagcaaattaggagattttggaatttctcgattgttgatacagacaaacacctgcagcacaaatctttaccgaacaacaaacccaagaggaaccttctcttatatggatcctgaatttctgaccactggtgaactcacaccacggtctgatgtgtactcctttggcattatcatcctgcgactactgacagggaaacaacctcaaaggattgccgaaatagtggaagatgccattgagaaagaaaatttgcattccatcatcgatagcactgctggaagttggcctttcatacaggccaaccaacttgcgcatattgccttgagatgtgctgagttaagtaggagacgaaggccagatctaacagtggatgtgtggaaagtggttgagccactaatgaaggcagcttcaatgacagcacgaccactttcatgcacagctccatcagatgagacttgcatcccatcgtacttcatatgtccaattttgcaggagatcatgagagacccttacgttgcagcggatggattcacttatgagggtgaagctattaggggctggcttgacagcgggcatagcacatcacccatgacgaatctcgacctcgagcgcagccttctcgtgccgaacagggcccttcgttcggcaatactcgagtggaaccagcaggagaggcagtgacgacgacgaacgacccatgcatggatgcagatgatgctgttttgccatcgtgtgactgtaagttacaaagttgcatgcgcagag

SEQ ID NO: 24365 - DNA, 5655 bp, Zea Mays
atggctaacgccgggacagggaggggaggacagacaccggagagcacgcaccagcacaccttaagaacggcggtgagcaacaccagggaggccgcggagagcccgcctttggctgtcgacgacaagattttcgttgctgtccccgaagaactcaagcacggcaagagcaacttgctgtgggcgctgcacaacttggccagggacgcctccagctcccggattgccattgctcatgtccacgttcctgcccagatgataaccagtaagtaactcagctagccaggaacaccgctcttttttctgcctcaaggtaaacagcgaattctccaactaatttcgttttaggttccataacttcctctctgaaaaattgtaactttttcaggcacatttatgggcagagcgtccatggcccattgggtttagtatgttctagccataacaattgcattattagagcccaggccatctcctggagactagcaattcgccaattcccaatcctctaagttccagcagtttgcacacttttccccatgccaccactcaatgccccgcctttagcttccttccggtctctccgttaaaagtattttctaaccttatcaatagcctcaacagttcatttaggatatgtttggtttgacgttaaaataggttaaaataggatgaggcgagagcgacaccgtcccctcgattttttaggatcacgccgccacaaaaaattactttggtgttcacctcgtcctcacatgactctcattcaaacaatatagaaattatggctgcatcattccatccttccttatacatccaaccaaaacacacccttagatagatccagagccatggctaaataaaccagcaagttgggcagctagccattggaggctagcaactttctaacaacacactggaccggtccggtgagccaccagtgtacaccacactaggtccaaggatagccattatcgaccttggagctgtgcgtccgatgcgccggatcaggtctggtatgccacgtgctccagtctttagctagtcttcattctgttcataggtcccaccggccggtacggtgcacctctatgtagccagaatttcttttttctaagtttcttttttgggcttttcttgtcttgtgtcttggatttttgcgtaacgttggtaagtctttaatgagtcttctaagagcatctccaacaacgtgatttataaaaatgtcctataatttaaaaataaatatactttatagaatttagggcaccaacaaaacacctcgctccaacagtaaagccccaaatcttgattatagggcagctcactacggtgtaatatatttgaggcacttgagagagtcctatagttttttgacaaaattttataaaataaggcattgttggagtggtttttcctgtgtagagcccatatttcaatttgaggcactagtttgaggcattgttggagatgctctaatgtcttctttaaggtgttgctctccatagctcagtccaagtccactctgcatactttgaactataaacactagccaacgtattagtccaaaagtttatgttgatcatcacactaaaatcactaacaatttggacggcggttcattttccttacacttaggtagcttcttcaagaatatgagaactctcaaatatttacaaggaaagttaaacatctcacatggtatcaggttttgtaaggtttccatctctgtttctccacaccgataggatagcttcttaatatttgtgtttgtctaattttgatcctaaactaaaaaaaggtattgttggcacgccaactatcaaaacatatagttttgacccccgagctagtttgattagtttttagatgagtctaggatcaaaattgaatggctttgatagttgagttgcccaaatgagaaatgacccaatcttgtagttaggagttaaaattatagaaaggtgagagttgataggccaaacataaacttaatcctttttaaccattttttgtagccaactgctcaactgtgcccgaagagattaacctgtctgattataggcaaattaatattttatgcacgaaattttgtcatgaggtactccatgttgtgttcctacactaaagtttgtttcatggtacaaagaaacttcatagtctattatattttccagctcaaacatatttcatgttttcccagtggggctaggggcaagtgttcattacagcacaatgagaccacaagaactccgtgcatacaggcagcatgagcgagaaaagatggagaaaaaactaaacgaatatgttttgatatgcaggcgattgaaggtgtttgtttacgttctcttatttgtcattgttaattcaatctaaattattttccctttttttgagaacaagaacaggaatgaaatcttaagagatgaggaacatatatcccaatattgcataatgatcatccaaattttcctgtgccaggttaattgcgacatagtagctattcaaaatgacgacatagctaatggggtcatcaatcttatttctttacatgggatcaaaaagcttgtcgtgggagccgcatcagataaaaaatattcaaagtatggctcaagcatctatagtgtctcaaatttctagttctagcatctgtcatttgtcgacaatagaggactctagccattaaaggatcaagggatgatgtttatccaaattatgataagtttcttaaaatctagcagttgagtaatcaaaactgcaagagtagcttctcatatagtaaagaacgatttgtcaactatagaaatgtggatggtcagacagttccctgatagctcaatgtttaaaatctagcattcaaagtactccaaaagttctatggttatgaaagttgaaaactgatgtgcaggttcccatttatttcaaaaaaataatcttatgaacttcgagcacaaagagtaagaaaagatttgctaagtatagttcctttaattgacaacctaacaaatgttatcaaatcataggacaatgaaagcaccaacgtccaatacagcattgaagataatggaaggagcagcttcaccatgcaagatatggtttacttgcaaaggatctctaattgttgtcaagtaaggttgagatgggttggtagtaaggcacctaaattaattacgttgctcttttctcggtagtgctatctatctgtatctagctgtttaggatatatagtgattcatcattaatctacatcagcaaattacagtgtgctatcagcctctttttcggacaagtatagtaccttgtaggatataacaataattgtgattgttaactgtcactttgacaggggcggcaatgcagatacacctacagtaccatcatcacaaaacacagcaccattaccagtattcaacatttctagccaaatgagatcaatgatgatccacaattcaaaggacaaagcatcaagctcaaatttaagtatggcgaacgatatgggagaatcaagaacagatgtaccttgctctctatatgaaaatgctggtgatacactgcttcaatcatttgaagatgttgagtccactttcaaaggcaagccaaggagactacggagtttagaggacttcactgttgactcaggcagatcgcagacgcagaactctgattccagttgtccaccaaatgatggggcagccagtatctctagaacagcagtggttgataacgataacataagtgaagttgcatcaaatatgcatctttcaactaacaattcatacgaccatatttcaccaacaccacatgacctggtatgtactgtgtgctattgttctcaatggggattatctcagtcctaaatggcatataggttctgatacatcaaatttaatggctcaggacaaacttaaggaaactctcactaaaatacagcttctagaaaaagaagtgcaagaagaatgcaataaacagcaaaatgctgaaagagaactgcaatcagctcttcaaaaggtacaggatttgctcattcgctatgctagtccagaatccagattgaatgtttgtttattaatgaaatcacatgtattcttgcagagcaaagaattagaaaaatcgtatatgaacgaattaaggcagcagaaggcactcaaggaaatgcttgaaaaacagaggcaggagattgatgtgatgagaagacagcaagaagaagcatatgctgcgctatacaatgcaaatgagcagaaggtcacactagaacaacgaataagtgagattgagctatatgttaaagataaggaagatgagctagcaagaaacaaacaccaactggaagcgctccaagcagattgtgacaggatacaacaagaaagagatgctgccataagggaagctactgaactgcatgaaaagaatcggctgggagtttttgcaccatctgaagccctaaacaccaagttctctcttattgagctgcaacaagcaacacaagacttcaatccaatgttcaaggttggtgaaggtggtttcggaagtgtctataaaggtttcctccgcaatacaacagtagctataaagttgctacatccagaaagcatgcagagacaatcagaattccatcaagaggcttctgttctcagcacagtaaggcatccaaaccttgtcacgctgattggtacatgcccagaagcttttggtctagtatacgagttctttccaaatggaagccttgaagattgcttgggatgcaagaacaacacgcgaccactaacatggcagacccgcactcgaataattggagagatgtgttctgctctcatttttcttcattcaaacaaacctcaccctgtggtacacggtgatctaaagccagaccacattcttcttgatgccaattattctagcaaattaggagattttggaatttctcgattgttgatacagacaaacacctgcagcacaaatctttaccgaacaacaaacccaagaggaaccttctcttatatggatcctgaatttctgaccactggtgaactcacaccacggtctgatgtgtactcctttggcattatcatcctgcgactactgacagggaaacaacctcaaaggattgccgaaatagtggaagatgccattgagaaagaaaatttgcattccatcatcgatagcactgctggaagttggcctttcatacaggccaaccaacttgcgcatattgccttgagatgtgctgagttaagtaggagacgaaggccagatctaacagtggatgtgtggaaagtggttgagccactaatgaaggcagcttcaatgacagcacgaccactttcatgcacagctccatcagatgagacttgcatcccatcgtacttcatatgtccaattttgcaggagatcatgagagacccttacgttgcagcggatggattcacttatgagggtgaagctattaggggctggcttgacagcgggcatagcacatcacccatgacgaatctcgacctcgagcgcagccttctcgtgccgaacagggcccttcgttcggcaatactcgagtggaaccagcaggagaggcagtgacgacgacgaacgacccatgcatggatgcagatgatgctgttttgccatcgtgtgactgtaagttacaaagttgcatgcgcagag

SEQ ID NO: 24366 - DNA, 2652 bp, Zea Mays
gcagcattacaatccatgctgcgcgccgcgtgactgcaatctttcgttctttcctgcgcagaagcagcaaagtctgaaatggctaacgccgggacagggaggggaggacagacaccggagagcacgcaccagcacaccttaagaacggcggtgagcaacaccagggaggccgcggagagcccgcctttggctgtcgacgacaagattttcgttgctgtccccgaagaactcaagcacggcaagagcaacttgctgtgggcgctgcacaacttggccagggacgcctccagctcccggattgccattgctcatgtccacgttcctgcccagatgataaccagggcggcaatgcagatacacctacagtaccatcatcacaaaacacagcaccattaccagtattcaacatttctagccaaatgagatcaatgatgatccacaattcaaaggacaaagcatcaagctcaaatttaagtatggcgaacgatatgggagaatcaagaacagatgtaccttgctctctatatgaaaatgctggtgatacactgcttcaatcatttgaagatgttgagtccactttcaaaggcaagccaaggagactacggagtttagaggacttcactgttgactcaggcagatcgcagacgcagaactctgattccagttgtccaccaaatgatggggcagccagtatctctagaacagcagtggttgataacgataacataagtgaagttgcatcaaatatgcatctttcaactaacaattcatacgaccatatttcaccaacaccacatgacctggtatgtactgtgtgctattgttctcaatggggattatctcagtcctaaatggcatataggttctgatacatcaaatttaatggctcaggacaaacttaaggaaactctcactaaaatacagcttctagaaaaagaagtgcaagaagaatgcaataaacagcaaaatgctgaaagagaactgcaatcagctcttcaaaaggtacaggatttgctcattcgctatgctagtccagaatccagattgaatgtttgtttattaatgaaatcacatgtattcttgcagagcaaagaattagaaaaatcgtatatgaacgaattaaggcagcagaaggcactcaaggaaatgcttgaaaaacagaggcaggagattgatgtgatgagaagacagcaagaagaagcatatgctgcgctatacaatgcaaatgagcagaaggtcacactagaacaacgaataagtgagattgagctatatgttaaagataaggaagatgagctagcaagaaacaaacaccaactggaagcgctccaagcagattgtgacaggatacaacaagaaagagatgctgccataagggaagctactgaactgcatgaaaagaatcggctgggagtttttgcaccatctgaagccctaaacaccaagttctctcttattgagctgcaacaagcaacacaagacttcaatccaatgttcaaggttggtgaaggtggtttcggaagtgtctataaaggtttcctccgcaatacaacagtagctataaagttgctacatccagaaagcatgcagagacaatcagaattccatcaagaggcttctgttctcagcacagtaaggcatccaaaccttgtcacgctgattggtacatgcccagaagcttttggtctagtatacgagttctttccaaatggaagccttgaagattgcttgggatgcaagaacaacacgcgaccactaacatggcagacccgcactcgaataattggagagatgtgttctgctctcatttttcttcattcaaacaaacctcaccctgtggtacacggtgatctaaagccagaccacattcttcttgatgccaattattctagcaaattaggagattttggaatttctcgattgttgatacagacaaacacctgcagcacaaatctttaccgaacaacaaacccaagaggaaccttctcttatatggatcctgaatttctgaccactggtgaactcacaccacggtctgatgtgtactcctttggcattatcatcctgcgactactgacagggaaacaacctcaaaggattgccgaaatagtggaagatgccattgagaaagaaaatttgcattccatcatcgatagcactgctggaagttggcctttcatacaggccaaccaacttgcgcatattgccttgagatgtgctgagttaagtaggagacgaaggccagatctaacagtggatgtgtggaaagtggttgagccactaatgaaggcagcttcaatgacagcacgaccactttcatgcacagctccatcagatgagacttgcatcccatcgtacttcatatgtccaattttgcaggagatcatgagagacccttacgttgcagcggatggattcacttatgagggtgaagctattaggggctggcttgacagcgggcatagcacatcacccatgacgaatctcgacctcgagcgcagccttctcgtgccgaacagggcccttcgttcggcaatactcgagtggaaccagcaggagaggcagtgacgacgacgaacgacccatgcatggatgcagatgatgctgttttgccatcgtgtgactgtaagttacaaagttgcatgcgcagag

SEQ ID NO: 24367 - DNA, 2757 bp, Zea Mays
cggtgcgcggtgcgcccgcttcaacccctgccccctctccctggctcctgtgctccccatttccagttttccacccgacgagaggcaaaagcctcgcgccccacgccggtccggcggcgacccccgccgtttcccgcagcgaccaagacgcgggctgtggtcgcctccgccccgtgcctacccggccgcgggcgtagcagcctcctggaccgcagcgccctcccccctcctttctcccgagcgacttctgatccagccgcgtcgcaacaactggtcgttcgagtctgatctccgccaccgcggcggaacgaggcgtctccggtccccgaggcgattcggtgaattcgaagctcgtacgacgggatcctgttgagttttgacaatgcggggctacggggtaaccaccaggaagtggaagatgagtacggagatgagtactatgatcaagatgagtatgatgaggaaggttcgggtgctggggatgagtattttgaggaggaagagcctacagagggacaaaaggagatcctagaattgagagaacgattaaaagagcagattaggcgaaaggcaaaggctgctgcttcctgcacagctggcagatcgtcttctttacaaatacctcaagccagggacaaatttggctctttctttgggccatccaagccggtgatttctcgtcgagtgattgaagaaagaaaatcattgaaagaactgcatagcacagttgcaagggagccaaggccttcgggagtacataaggacattccgtcgtcctctaaagtgcaaagtaaagtaaatggacatcagcataaacagaaaattgttaatcaggtaaagaagaaggccgaggcacttaaggataaccgggattattcatttctactctcggatgatgctgacctgtcatcctctccaaaggagaagcctgctgctagatcttccttgactcaaagggctgatcgtgaggtgatgcgaacaacagtgaagagcaaggcaccaacaagtcaacctgcacgggtgtcaaatggatatggatctaagaacaaaatgtcaactcaaaggcatgccgaaggtagggtagataccatgagaaaggaggctttcttgaacagagaaagggttgtctcacgtgacaatgaaaggatgcatgaaagggttgtttcacgtggcaatgagaggatgcatggtagtgcaataaatgggtccaaccaggcaagtactagcaaaaccacaatccaaaagcttacaagcagaggttccattgctaataagcaagcttccacggatctgaatgatgctgctctgaggaagagcagtgtagccccaaagcaccatttctcagaggttgacagatcaaaatccttgcaaagccagaagatgcagtcagctggtcagagactgcagcattcttcccatggtcagaggccacatcaatccatgcagcataggccgcagcagtcattgcagagtcggaggccacagcaaatgactcaggatcagaagccacaacagtctttgcagagtcaaaggactcaacagtccttgcagaataaaaggcaacagcagtcctcacatattcagaaattgcagtcctcacatactcagaaatcgcagtcctcacaagcacacagaccacagtcgctaagtaacaggtcccaggagttacgaggacaaaggcctctttcttcacagggacaatacttggagcaaagaagagtacaggcaaatgatagagtcaaacaagctgaaaggcacattcggcctccctcgaagtccatgccatctcgaccagtctcctctaatggaattcgcgatgatcatgcaaagagaaagcaagtggtaaaaagaagatttgatgacgacgacgatgaggacgaccccttggcaatgatcagaaatatgttcgggtatgatcctagtagatatgcagggagagatgaggatgtcagtgacatggaagcagattttgctactatagaaatggaagagaaaagaagtgcgaggatagctaggcaggaggacgaagagcaacttcgcttgattgaggaagaagagagacgcgagcaggagaggaagaggcgaaagatggcacgaggccgatagtccaacacgcgtcatatttgggtgttataattgcacagacctgattgcctgaagacgaggcccatggtcgatcatacgggcgcgttgcagacaacaggaaaacttgccacgtggattatatggcggcaaatcaaggaaaacggcaggtgggcaacgctgggcacctgtaacaagcagaatgttaggcgcagtggtttagttgacgaagctgacatagacccatatataagctctcatcagattgtttggatcacacaaggctcccaacgttgcagcgcttcatcagattattctaaattctagccacatgctgattctttctgttaagcctatataaggatgcctaatccaagtagctcctttgttcatttttgtttgggtgtagtgttgtactccctccattttttttatctgacggttgttagtttaaatttgaactgtccggcgccaaataaaaaaatagaggtagcaacaaacaatgtgtttgatttttttggtacaattttgaccttcgtcagacgatcactgcacagcagatttcgagtttctatgcctgtgatcacatgaagtctattccgctcgcaattgtaaccgagtttcagatctttattgtacgcttttaatcaataattcagctataagcaattaaat

SEQ ID NO: 24368 - DNA, 2704 bp, Zea Mays
cggtgcgcggtgcgcccgcttcaacccctgccccctctccctggctcctgtgctccccatttccagttttccacccgacgagaggcaaaagcctcgcgccccacgccggtccggcggcgacccccgccgtttcccgcagcgaccaagacgcgggctgtggtcgcctccgccccgtgcctacccggccgcgggcgtagcagcctcctggaccgcagcgccctcccccctcctttctcccgagcgacttctgatccagccgcgtcgcaacaactggtcgttcgagtctgatctccgccaccgcggcggaacgaggcgtctccggtccccgagggtaaccaccaggaagtggaagatgagtacggagatgagtactatgatcaagatgagtatgatgaggaaggttcgggtgctggggatgagtattttgaggaggaagagcctacagagggacaaaaggagatcctagaattgagagaacgattaaaagagcagattaggcgaaaggcaaaggctgctgcttcctgcacagctggcagatcgtcttctttacaaatacctcaagccagggacaaatttggctctttctttgggccatccaagccggtgatttctcgtcgagtgattgaagaaagaaaatcattgaaagaactgcatagcacagttgcaagggagccaaggccttcgggagtacataaggacattccgtcgtcctctaaagtgcaaagtaaagtaaatggacatcagcataaacagaaaattgttaatcagttgcaatttgcaggtaaagaagaaggccgaggcacttaaggataaccgggattattcatttctactctcggatgatgctgacctgtcatcctctccaaaggagaagcctgctgctagatcttccttgactcaaagggctgatcgtgaggtgatgcgaacaacagtgaagagcaaggcaccaacaagtcaacctgcacgggtgtcaaatggatatggatctaagaacaaaatgtcaactcaaaggcatgccgaaggtagggtagataccatgagaaaggaggctttcttgaacagagaaagggttgtctcacgtgacaatgaaaggatgcatgaaagggttgtttcacgtggcaatgagaggatgcatggtagtgcaataaatgggtccaaccaggcaagtactagcaaaaccacaatccaaaagcttacaagcagaggttccattgctaataagcaagcttccacggatctgaatgatgctgctctgaggaagagcagtgtagccccaaagcaccatttctcagaggttgacagatcaaaatccttgcaaagccagaagatgcagtcagctggtcagagactgcagcattcttcccatggtcagaggccacatcaatccatgcagcataggccgcagcagtcattgcagagtcggaggccacagcaaatgactcaggatcagaagccacaacagtctttgcagagtcaaaggactcaacagtccttgcagaataaaaggcaacagcagtcctcacatattcagaaattgcagtcctcacatactcagaaatcgcagtcctcacaagcacacagaccacagtcgctaagtaacaggtcccaggagttacgaggacaaaggcctctttcttcacagggacaatacttggagcaaagaagagtacaggcaaatgatagagtcaaacaagctgaaaggcacattcggcctccctcgaagtccatgccatctcgaccagtctcctctaatggaattcgcgatgatcatgcaaagagaaagcaagtggtaaaaagaagatttgatgacgacgacgatgaggacgaccccttggcaatgatcagaaatatgttcgggtatgatcctagtagatatgcagggagagatgaggatgtcagtgacatggaagcagattttgctactatagaaatggaagagaaaagaagtgcgaggatagctaggcaggaggacgaagagcaacttcgcttgattgaggaagaagagagacgcgagcaggagaggaagaggcgaaagatggcacgaggccgatagtccaacacgcgtcatatttgggtgttataattgcacagacctgattgcctgaagacgaggcccatggtcgatcatacgggcgcgttgcagacaacaggaaaacttgccacgtggattatatggcggcaaatcaaggaaaacggcaggtgggcaacgctgggcacctgtaacaagcagaatgttaggcgcagtggtttagttgacgaagctgacatagacccatatataagctctcatcagattgtttggatcacacaaggctcccaacgttgcagcgcttcatcagattattctaaattctagccacatgctgattctttctgttaagcctatataaggatgcctaatccaagtagctcctttgttcatttttgtttgggtgtagtgttgtactccctccattttttttatctgacggttgttagtttaaatttgaactgtccggcgccaaataaaaaaatagaggtagcaacaaacaatgtgtttgatttttttggtacaattttgaccttcgtcagacgatcactgcacagcagatttcgagtttctatgcctgtgatcacatgaagtctattccgctcgcaattgtaaccgagtttcagatctttattgtacgcttttaatcaataattcagctataagcaattaaat

SEQ ID NO: 24369 - DNA, 2786 bp, Zea Mays
cggtgcgcggtgcgcccgcttcaacccctgccccctctccctggctcctgtgctccccatttccagttttccacccgacgagaggcaaaagcctcgcgccccacgccggtccggcggcgacccccgccgtttcccgcagcgaccaagacgcgggctgtggtcgcctccgccccgtgcctacccggccgcgggcgtagcagcctcctggaccgcagcgccctcccccctcctttctcccgagcgacttctgatccagccgcgtcgcaacaactggtcgttcgagtctgatctccgccaccgcggcggaacgaggcgtctccggtccccgaggcgattcggtgaattcgaagctcgtacgacgggatcctgttgagttttgacaatgcggggctacgggtacgagaccaatggtaaccaccaggaagtggaagatgagtacggagatgagtactatgatcaagatgagtatgatgaggaaggttcgggtgctggggatgagtattttgaggaggaagagcctacagagggacaaaaggagatcctagaattgagagaacgattaaaagagcagattaggcgaaaggcaaaggctgctgcttcctgcacagctggcagatcgtcttctttacaaatacctcaagccagggacaaatttggctctttctttgggccatccaagccggtgatttctcgtcgagtgattgaagaaagaaaatcattgaaagaactgcatagcacagttgcaagggagccaaggccttcgggagtacataaggacattccgtcgtcctctaaagtgcaaagtaaagtaaatggacatcagcataaacagaaaattgttaatcagcagttgcaatttgcaggtaaagaagaaggccgaggcacttaaggataaccgggattattcatttctactctcggatgatgctgacctgtcatcctctccaaaggagaagcctgctgctagatcttccttgactcaaagggctgatcgtgaggtgatgcgaacaacagtgaagagcaaggcaccaacaagtcaacctgcacgggtgtcaaatggatatggatctaagaacaaaatgtcaactcaaaggcatgccgaaggtagggtagataccatgagaaaggaggctttcttgaacagagaaagggttgtctcacgtgacaatgaaaggatgcatgaaagggttgtttcacgtggcaatgagaggatgcatggtagtgcaataaatgggtccaaccaggcaagtactagcaaaaccacaatccaaaagcttacaagcagaggttccattgctaataagcaagcttccacggatctgaatgatgctgctctgaggaagagcagtgtagccccaaagcaccatttctcagaggttgacagatcaaaatccttgcaaagccagaagatgcagtcagctggtcagagactgcagcattcttcccatggtcagaggccacatcaatccatgcagcataggccgcagcagtcattgcagagtcggaggccacagcaaatgactcaggatcagaagccacaacagtctttgcagagtcaaaggactcaacagtccttgcagaataaaaggcaacagcagtcctcacatattcagaaattgcagtcctcacatactcagaaatcgcagtcctcacaagcacacagaccacagtcgctaagtaacaggtcccaggagttacgaggacaaaggcctctttcttcacagggacaatacttggagcaaagaagagtacaggcaaatgatagagtcaaacaagctgaaaggcacattcggcctccctcgaagtccatgccatctcgaccagtctcctctaatggaattcgcgatgatcatgcaaagagaaagcaagtggtaaaaagaagatttgatgacgacgacgatgaggacgaccccttggcaatgatcagaaatatgttcgggtatgatcctagtagatatgcagggagagatgaggatgtcagtgacatggaagcagattttgctactatagaaatggaagagaaaagaagtgcgaggatagctaggcaggaggacgaagagcaacttcgcttgattgaggaagaagagagacgcgagcaggagaggaagaggcgaaagatggcacgaggccgatagtccaacacgcgtcatatttgggtgttataattgcacagacctgattgcctgaagacgaggcccatggtcgatcatacgggcgcgttgcagacaacaggaaaacttgccacgtggattatatggcggcaaatcaaggaaaacggcaggtgggcaacgctgggcacctgtaacaagcagaatgttaggcgcagtggtttagttgacgaagctgacatagacccatatataagctctcatcagattgtttggatcacacaaggctcccaacgttgcagcgcttcatcagattattctaaattctagccacatgctgattctttctgttaagcctatataaggatgcctaatccaagtagctcctttgttcatttttgtttgggtgtagtgttgtactccctccattttttttatctgacggttgttagtttaaatttgaactgtccggcgccaaataaaaaaatagaggtagcaacaaacaatgtgtttgatttttttggtacaattttgaccttcgtcagacgatcactgcacagcagatttcgagtttctatgcctgtgatcacatgaagtctattccgctcgcaattgtaaccgagtttcagatctttattgtacgcttttaatcaataattcagctataagcaattaaat

SEQ ID NO: 24370 - DNA, 2691 bp, Zea Mays
cggtgcgcggtgcgcccgcttcaacccctgccccctctccctggctcctgtgctccccatttccagttttccacccgacgagaggcaaaagcctcgcgccccacgccggtccggcggcgacccccgccgtttcccgcagcgaccaagacgcgggctgtggtcgcctccgccccgtgcctacccggccgcgggcgtagcagcctcctggaccgcagcgccctcccccctcctttctcccgagcgacttctgatccagccgcgtcgcaacaactggtcgttcgagtctgatctccgccaccgcggcggaacgaggcgtctccggtccccgagggtaaccaccaggaagtggaagatgagtacggagatgagtactatgatcaagatgagtatgatgaggaaggttcgggtgctggggatgagtattttgaggaggaagagcctacagagggacaaaaggagatcctagaattgagagaacgattaaaagagcagattaggcgaaaggcaaaggctgctgcttcctgcacagctggcagatcgtcttctttacaaatacctcaagccagggacaaatttggctctttctttgggccatccaagccggtgatttctcgtcgagtgattgaagaaagaaaatcattgaaagaactgcatagcacagttgcaagggagccaaggccttcgggagtacataaggacattccgtcgtcctctaaagtgcaaagtaaagtaaatggacatcagcataaacagaaaattgttaatcaggtaaagaagaaggccgaggcacttaaggataaccgggattattcatttctactctcggatgatgctgacctgtcatcctctccaaaggagaagcctgctgctagatcttccttgactcaaagggctgatcgtgaggtgatgcgaacaacagtgaagagcaaggcaccaacaagtcaacctgcacgggtgtcaaatggatatggatctaagaacaaaatgtcaactcaaaggcatgccgaaggtagggtagataccatgagaaaggaggctttcttgaacagagaaagggttgtctcacgtgacaatgaaaggatgcatgaaagggttgtttcacgtggcaatgagaggatgcatggtagtgcaataaatgggtccaaccaggcaagtactagcaaaaccacaatccaaaagcttacaagcagaggttccattgctaataagcaagcttccacggatctgaatgatgctgctctgaggaagagcagtgtagccccaaagcaccatttctcagaggttgacagatcaaaatccttgcaaagccagaagatgcagtcagctggtcagagactgcagcattcttcccatggtcagaggccacatcaatccatgcagcataggccgcagcagtcattgcagagtcggaggccacagcaaatgactcaggatcagaagccacaacagtctttgcagagtcaaaggactcaacagtccttgcagaataaaaggcaacagcagtcctcacatattcagaaattgcagtcctcacatactcagaaatcgcagtcctcacaagcacacagaccacagtcgctaagtaacaggtcccaggagttacgaggacaaaggcctctttcttcacagggacaatacttggagcaaagaagagtacaggcaaatgatagagtcaaacaagctgaaaggcacattcggcctccctcgaagtccatgccatctcgaccagtctcctctaatggaattcgcgatgatcatgcaaagagaaagcaagtggtaaaaagaagatttgatgacgacgacgatgaggacgaccccttggcaatgatcagaaatatgttcgggtatgatcctagtagatatgcagggagagatgaggatgtcagtgacatggaagcagattttgctactatagaaatggaagagaaaagaagtgcgaggatagctaggcaggaggacgaagagcaacttcgcttgattgaggaagaagagagacgcgagcaggagaggaagaggcgaaagatggcacgaggccgatagtccaacacgcgtcatatttgggtgttataattgcacagacctgattgcctgaagacgaggcccatggtcgatcatacgggcgcgttgcagacaacaggaaaacttgccacgtggattatatggcggcaaatcaaggaaaacggcaggtgggcaacgctgggcacctgtaacaagcagaatgttaggcgcagtggtttagttgacgaagctgacatagacccatatataagctctcatcagattgtttggatcacacaaggctcccaacgttgcagcgcttcatcagattattctaaattctagccacatgctgattctttctgttaagcctatataaggatgcctaatccaagtagctcctttgttcatttttgtttgggtgtagtgttgtactccctccattttttttatctgacggttgttagtttaaatttgaactgtccggcgccaaataaaaaaatagaggtagcaacaaacaatgtgtttgatttttttggtacaattttgaccttcgtcagacgatcactgcacagcagatttcgagtttctatgcctgtgatcacatgaagtctattccgctcgcaattgtaaccgagtttcagatctttattgtacgcttttaatcaataattcagctataagcaattaaat

SEQ ID NO: 24371 - DNA, 2449 bp, Zea Mays
cggtgcgcggtgcgcccgcttcaacccctgccccctctccctggctcctgtgctccccatttccagttttccacccgacgagaggcaaaagcctcgcgccccacgccggtccggcggcgacccccgccgtttcccgcagcgaccaagacgcgggctgtggtcgcctccgccccgtgcctacccggccgcgggcgtagcagcctcctggaccgcagcgccctcccccctcctttctcccgagcgacttctgatccagccgcgtcgcaacaactggtcgttcgagtctgatctccgccaccgcggcggaacgaggcgtctccggtccccgagatttggctctttctttgggccatccaagccggtgatttctcgtcgagtgattgaagaaagaaaatcattgaaagaactgcatagcacagttgcaagggagccaaggccttcgggagtacataaggacattccgtcgtcctctaaagtgcaaagtaaagtaaatggacatcagcataaacagaaaattgttaatcaggtaaagaagaaggccgaggcacttaaggataaccgggattattcatttctactctcggatgatgctgacctgtcatcctctccaaaggagaagcctgctgctagatcttccttgactcaaagggctgatcgtgaggtgatgcgaacaacagtgaagagcaaggcaccaacaagtcaacctgcacgggtgtcaaatggatatggatctaagaacaaaatgtcaactcaaaggcatgccgaaggtagggtagataccatgagaaaggaggctttcttgaacagagaaagggttgtctcacgtgacaatgaaaggatgcatgaaagggttgtttcacgtggcaatgagaggatgcatggtagtgcaataaatgggtccaaccaggcaagtactagcaaaaccacaatccaaaagcttacaagcagaggttccattgctaataagcaagcttccacggatctgaatgatgctgctctgaggaagagcagtgtagccccaaagcaccatttctcagaggttgacagatcaaaatccttgcaaagccagaagatgcagtcagctggtcagagactgcagcattcttcccatggtcagaggccacatcaatccatgcagcataggccgcagcagtcattgcagagtcggaggccacagcaaatgactcaggatcagaagccacaacagtctttgcagagtcaaaggactcaacagtccttgcagaataaaaggcaacagcagtcctcacatattcagaaattgcagtcctcacatactcagaaatcgcagtcctcacaagcacacagaccacagtcgctaagtaacaggtcccaggagttacgaggacaaaggcctctttcttcacagggacaatacttggagcaaagaagagtacaggcaaatgatagagtcaaacaagctgaaaggcacattcggcctccctcgaagtccatgccatctcgaccagtctcctctaatggaattcgcgatgatcatgcaaagagaaagcaagtggtaaaaagaagatttgatgacgacgacgatgaggacgaccccttggcaatgatcagaaatatgttcgggtatgatcctagtagatatgcagggagagatgaggatgtcagtgacatggaagcagattttgctactatagaaatggaagagaaaagaagtgcgaggatagctaggcaggaggacgaagagcaacttcgcttgattgaggaagaagagagacgcgagcaggagaggaagaggcgaaagatggcacgaggccgatagtccaacacgcgtcatatttgggtgttataattgcacagacctgattgcctgaagacgaggcccatggtcgatcatacgggcgcgttgcagacaacaggaaaacttgccacgtggattatatggcggcaaatcaaggaaaacggcaggtgggcaacgctgggcacctgtaacaagcagaatgttaggcgcagtggtttagttgacgaagctgacatagacccatatataagctctcatcagattgtttggatcacacaaggctcccaacgttgcagcgcttcatcagattattctaaattctagccacatgctgattctttctgttaagcctatataaggatgcctaatccaagtagctcctttgttcatttttgtttgggtgtagtgttgtactccctccattttttttatctgacggttgttagtttaaatttgaactgtccggcgccaaataaaaaaatagaggtagcaacaaacaatgtgtttgatttttttggtacaattttgaccttcgtcagacgatcactgcacagcagatttcgagtttctatgcctgtgatcacatgaagtctattccgctcgcaattgtaaccgagtttcagatctttattgtacgcttttaatcaataattcagctataagcaattaaat

SEQ ID NO: 24372 - DNA, 2835 bp, Zea Mays
cagcgcgacgtcaggcttctttacccggcgcaggcgaaacgcgcctatttaacggtgcgcggtgcgcccgcttcaacccctgccccctctccctggctcctgtgctccccatttccagttttccacccgacgagaggcaaaagcctcgcgccccacgccggtccggcggcgacccccgccgtttcccgcagcgaccaagacgcgggctgtggtcgcctccgccccgtgcctacccggccgcgggcgtagcagcctcctggaccgcagcgccctcccccctcctttctcccgagcgacttctgatccagccgcgtcgcaacaactggtcgttcgagtctgatctccgccaccgcggcggaacgaggcgtctccggtccccgaggcgattcggtgaattcgaagctcgtacgacgggatcctgttgagttttgacaatgcggggctacgggtacgagaccaatggtaaccaccaggaagtggaagatgagtacggagatgagtactatgatcaagatgagtatgatgaggaaggttcgggtgctggggatgagtattttgaggaggaagagcctacagagggacaaaaggagatcctagaattgagagaacgattaaaagagcagattaggcgaaaggcaaaggctgctgcttcctgcacagctggcagatcgtcttctttacaaatacctcaagccagggacaaatttggctctttctttgggccatccaagccggtgatttctcgtcgagtgattgaagaaagaaaatcattgaaagaactgcatagcacagttgcaagggagccaaggccttcgggagtacataaggacattccgtcgtcctctaaagtgcaaagtaaagtaaatggacatcagcataaacagaaaattgttaatcagttgcaatttgcaggtaaagaagaaggccgaggcacttaaggataaccgggattattcatttctactctcggatgatgctgacctgtcatcctctccaaaggagaagcctgctgctagatcttccttgactcaaagggctgatcgtgaggtgatgcgaacaacagtgaagagcaaggcaccaacaagtcaacctgcacgggtgtcaaatggatatggatctaagaacaaaatgtcaactcaaaggcatgccgaaggtagggtagataccatgagaaaggaggctttcttgaacagagaaagggttgtctcacgtgacaatgaaaggatgcatgaaagggttgtttcacgtggcaatgagaggatgcatggtagtgcaataaatgggtccaaccaggcaagtactagcaaaaccacaatccaaaagcttacaagcagaggttccattgctaataagcaagcttccacggatctgaatgatgctgctctgaggaagagcagtgtagccccaaagcaccatttctcagaggttgacagatcaaaatccttgcaaagccagaagatgcagtcagctggtcagagactgcagcattcttcccatggtcagaggccacatcaatccatgcagcataggccgcagcagtcattgcagagtcggaggccacagcaaatgactcaggatcagaagccacaacagtctttgcagagtcaaaggactcaacagtccttgcagaataaaaggcaacagcagtcctcacatattcagaaattgcagtcctcacatactcagaaatcgcagtcctcacaagcacacagaccacagtcgctaagtaacaggtcccaggagttacgaggacaaaggcctctttcttcacagggacaatacttggagcaaagaagagtacaggcaaatgatagagtcaaacaagctgaaaggcacattcggcctccctcgaagtccatgccatctcgaccagtctcctctaatggaattcgcgatgatcatgcaaagagaaagcaagtggtaaaaagaagatttgatgacgacgacgatgaggacgaccccttggcaatgatcagaaatatgttcgggtatgatcctagtagatatgcagggagagatgaggatgtcagtgacatggaagcagattttgctactatagaaatggaagagaaaagaagtgcgaggatagctaggcaggaggacgaagagcaacttcgcttgattgaggaagaagagagacgcgagcaggagaggaagaggcgaaagatggcacgaggccgatagtccaacacgcgtcatatttgggtgttataattgcacagacctgattgcctgaagacgaggcccatggtcgatcatacgggcgcgttgcagacaacaggaaaacttgccacgtggattatatggcggcaaatcaaggaaaacggcaggtgggcaacgctgggcacctgtaacaagcagaatgttaggcgcagtggtttagttgacgaagctgacatagacccatatataagctctcatcagattgtttggatcacacaaggctcccaacgttgcagcgcttcatcagattattctaaattctagccacatgctgattctttctgttaagcctatataaggatgcctaatccaagtagctcctttgttcatttttgtttgggtgtagtgttgtactccctccattttttttatctgacggttgttagtttaaatttgaactgtccggcgccaaataaaaaaatagaggtagcaacaaacaatgtgtttgatttttttggtacaattttgaccttcgtcagacgatcactgcacagcagatttcgagtttctatgcctgtgatcacatgaagtctattccgctcgcaattgtaaccgagtttcagatctttattgtacgcttttaatcaataattcagctataagcaattaaat

SEQ ID NO: 24373 - DNA, 558 bp, Zea Mays
cgcctccgtgcgtagattccagaggtggatgcgagcggcaaagacgttgacctcagcacctacaaggggaaggttcttctcattgttaacgtcgcatcccagtgtggcttaaccaactccaactacactgagctggcccagctctatgagaagtacaaggaccaaggctttgaaatcctggctttcccatgcaaccagtttggtgggcaggagcctggtaccaatgaggagattgtccagtttgcctgcacacgcttcaaggctgagtaccccatcttcgacaaggttgatgtcaacggtagcaatgctgcgcccatctacaagttcttgaaatctagcaaaggtggccttttcggcgacagcatcaagtggaacttttccaagttcttggttgacaaggagggacgtgttgtggatcgctatgcttcaatcctcccgggatccccttgtcaccaaatcagccctcgaatgaattccaatgctgtatcagtttgctaccccattttcgtgtgactaatctgataagagcatgtttgggagaaggtgaatggagaggct

SEQ ID NO: 24374 - DNA, 3399 bp, Zea Mays
cgaaaatccccagccacccccagcgcgcttgctacgagggaggggagtggtcggctggttgcaccgcacagcaatggtggcgactactcgtcgagctctgttcctctcctgcttccacggcggctcagagatgagcccccgcctctccctgcgcccgcggtacccgtcaatgccgcggcggccgaagggagtggcggctgctggcggcggaggaaacggcgacctggaggccgcagtcggtacgggggacgacgaggaggagaaggtggcggtgttctccgtgtcggggatgacctgcgctgcgtgcgcggggtcggtggagaaggccgtgaagcggctccccggcatccacgacgccgccgtcgacgtcctctggggccgcgcgcaggtcgtcttctacccagccttcgtctcggagattgtgatcatgtgaaccttttggacaggagaacaaaattaccgaagccattgaggatgttggttttgaagcaaaattgattgatgaggaggtcaaggaaaagaacattctactatgcaggctacatataaaaggaatggcctgcaagtattgcacaagcacagttgaatttgccttgcaagcttctcctggggttcaaagagcttcagttgcattggctactgaagaggctgagatccgttacgatcgcaggataatttctgctagccagctaatccaagcagtggaagaaactggctttgaagctttactagtgaccgcaggagaagaccagagcaggatagacctcaaaatggatggtgttctcgatgagaggttgataatgatcttgaaaagctctatacaggcccttcctggtgtggaaaacgttaaattcaactctgaactacacaaggtcaccgtctcatacaatcctgaccacacaggcccccgggacctcattgaagtcatcaaggcagccacatttggtcatgtcaatgcatcaatatatctggaagcagatggaagggaccagcataggtatggggaaataaaacaatacagacagtcgttcttgtggagcttaatattcaccattccagtttttctcacctccatggtgttcatgtatatcccttggctgaaggatgggctggaaaaaaaagttgtcaacatgatgagcattggtgaactacttcggtggattttgtcaacaccggtccaatttgttatcggtcgcaaattttatactggtgcttacaaggcaatgtgccgtggctcaccaaacatggatgtccttattgctctagggacaaacacggcttacttgtactcggtttactcagttcttcgagcagctacctccgggaattacatgtcaactgatttttttgagactagttccatgctcatttcatttattcttcttggaaagtaccttgagatcttggcaaaaggaaaaacatctgaggctattgccaagctgatggatcttgcgccagaaactgcaacactgttagtgtatgactatgaaggaaatgtggtaggagaaaaggagattgacagcaggctgattcagaaaaatgatgtgatcaaagtagtcccgggtggaaaagttgcttccgatggatttgttatttggggccagagccatgtgaatgaaagcatgattactggcgaatcacagccagtagcaaagagaaagggtgacactgtaattggaggtacagtgaatgagaatggtgtgcttcatgttcgggctacatttgtgggatcagagagtgcattggcgcagattgtaaggctagttgagtcggcgcaaatggcaaaggctcctgtccagaagttcgctgaccatatatctagagtctttgttcccctggtgattctgctttcaatggttacttggctcgcatggtttgtcgcggggaggctccatagctaccctcagtcatggataccacgattcatggatagcttccagctcgctcttcagtttgggatatcagttatggtgattgcctgtccttgcgccctagggctggctaccccaactgctgtgatggttgcgactggagttggtgcctcacatggtgttctgatcaagggtgggcaagctctggagagtgcacagaaggtcgactgcatcgtttttgacaagacagggacgctaactattgggaagcctgtcgttgttgacacaaggcttctcaaaaatatggtcttgcgtgaattctatgactatgctgctgctgcagaagtcaacagtgagcaccccctggcaaaagcgatagtggagcatgccaaaaagttgcgtccagaaggaaaccacatgtggccggaagcaagggaatttatttcagtaaccgggcaaggcgtcaaggcggaggttagtggcaagagtgtcatcgtggggaacaaaggcctcatgctgtcctctggcattggtatccccttggaagcttcagaaatcctcgtggaagaggaggggaaggcaaggacagggattatcgtggcagtggaccgagaagtggcgggcgtaatctctgtatccgatccgacaaaaccaaacgccctccaagtgatatcgtacctcaagtccatgaacgtggagagcataatggtgaccggcgacaactgggggacggctaatgctatcggccgagaggttggcatcgagaagataatcgctgaagcgaaaccggagcagaaggccgagagggtgaaggaactccagctgtctggaaggaccgtggcgatggttggcgacgggatcaacgactcccccgcgctcgtctcggccgacgtggggctggcgataggcgcggggacggacgtcgccatcgaggctgcggacatcgtgctcatgaagagcaacctggaggacgtggtgaccgccatcgacctgtccaggaaggccttcttccgcatacggatgaactacgtctgggcgctcgggtacaacgtcgtcggcatcccgatcgctgcgggggtgctcttcccgtccaccgggttccgcctgccgccgtgggtcgccggcgctgcgatggcggcctcgtccgtcagcgtcgtctgctggtccctgctgctgaggtactacaaggctccgaagattgccggcacagctaaagaaattggaattactaccctgtaggcaggtatcactggcactgctgctggaacgggaaggttgtggctggctgctaagtgctaacaatcgctgaaacagaagtctaaaaagaatcgctggaacaagcaagctgtacatatgtgttacaagtatatatacggcgatgctaagtgaagtggtggtgtaacgtaagtactgctactgatctgccatcgttgcatggatgtataccgttttcttttcctctcgaaatgaaaagtggtcctatggcacactactgctatgatggggcctgaataattttgaatcaata

SEQ ID NO: 24375 - DNA, 3418 bp, Zea Mays
ccgcgttctataaatgccggcgcggttcaaaccaaatcacccggacgaaaatccccagccacccccagcgcgcttgctacgagggaggggagtggtcggctggttgcaccgcacagcaatggtggcgactactcgtcgagctctgttcctctcctgcttccacggcggctcagagatgagcccccgcctctccctgcgcccgcggtacccgtcaatgccgcggcggccgaagggagtggcggctgctggcggcggaggaaacggcgacctggaggccgcagtcggtacgggggacgacgaggaggagaaggtggcggtgttctccgtgtcggggatgacctgcgctgcgtgcgcggggtcggtggagaaggccgtgaagcggctccccggcatccacgacgccgccgtcgacgtcctctggggccgcgcgcaggtcgtcttctacccagccttcgtctcggagaacaaaattaccgaagccattgaggatgttggttttgaagcaaaattgattgatgaggaggtcaaggaaaagaacattctactatgcaggctacatataaaaggaatggcctgcaagtattgcacaagcacagttgaatttgccttgcaagcttctcctggggttcaaagagcttcagttgcattggctactgaagaggctgagatccgttacgatcgcaggataatttctgctagccagctaatccaagcagtggaagaaactggctttgaagctttactagtgaccgcaggagaagaccagagcaggatagacctcaaaatggatggtgttctcgatgagaggttgataatgatcttgaaaagctctatacaggcccttcctggtgtggaaaacgttaaattcaactctgaactacacaaggtcaccgtctcatacaatcctgaccacacaggcccccgggacctcattgaagtcatcaaggcagccacatttggtcatgtcaatgcatcaatatatctggaagcagatggaagggaccagcataggtatggggaaataaaacaatacagacagtcgttcttgtggagcttaatattcaccattccagtttttctcacctccatggtgttcatgtatatcccttggctgaaggatgggctggaaaaaaaagttgtcaacatgatgagcattggtgaactacttcggtggattttgtcaacaccggtccaatttgttatcggtcgcaaattttatactggtgcttacaaggcaatgtgccgtggctcaccaaacatggatgtccttattgctctagggacaaacacggcttacttgtactcggtttactcagttcttcgagcagctacctccgggaattacatgtcaactgatttttttgagactagttccatgctcatttcatttattcttcttggaaagtaccttgagatcttggcaaaaggaaaaacatctgaggctattgccaagctgatggatcttgcgccagaaactgcaacactgttagtgtatgactatgaaggaaatgtggtaggagaaaaggagattgacagcaggctgattcagaaaaatgatgtgatcaaagtagtcccgggtggaaaagttgcttccgatggatttgttatttggggccagagccatgtgaatgaaagcatgattactggcgaatcacagccagtagcaaagagaaagggtgacactgtaattggaggtacagtgaatgagaatggtgtgcttcatgttcgggctacatttgtgggatcagagagtgcattggcgcagattgtaaggctagttgagtcggcgcaaatggcaaaggctcctgtccagaagttcgctgaccatatatctagagtctttgttcccctggtgattctgctttcaatggttacttggctcgcatggtttgtcgcggggaggctccatagctaccctcagtcatggataccacgattcatggatagcttccagctcgctcttcagtttgggatatcagttatggtgattgcctgtccttgcgccctagggctggctaccccaactgctgtgatggttgcgactggagttggtgcctcacatggtgttctgatcaagggtgggcaagctctggagagtgcacagaaggtcgactgcatcgtttttgacaagacagggacgctaactattgggaagcctgtcgttgttgacacaaggcttctcaaaaatatggtcttgcgtgaattctatgactatgctgctgctgcagaagtcaacagtgagcaccccctggcaaaagcgatagtggagcatgccaaaaagttgcgtccagaaggaaaccacatgtggccggaagcaagggaatttatttcagtaaccgggcaaggcgtcaaggcggaggttagtggcaagagtgtcatcgtggggaacaaaggcctcatgctgtcctctggcattggtatccccttggaagcttcagaaatcctcgtggaagaggaggggaaggcaaggacagggattatcgtggcagtggaccgagaagtggcgggcgtaatctctgtatccgatccgacaaaaccaaacgccctccaagtgatatcgtacctcaagtccatgaacgtggagagcataatggtgaccggcgacaactgggggacggctaatgctatcggccgagaggttggcatcgagaagataatcgctgaagcgaaaccggagcagaaggccgagagggtgaaggaactccaggtgagctgtctggaaggaccgtggcgatggttggcgacgggatcaacgactcccccgcgctcgtctcggccgacgtggggctggcgataggcgcggggacggacgtcgccatcgaggctgcggacatcgtgctcatgaagagcaacctggaggacgtggtgaccgccatcgacctgtccaggaaggccttcttccgcatacggatgaactacgtctgggcgctcgggtacaacgtcgtcggcatcccgatcgctgcgggggtgctcttcccgtccaccgggttccgcctgccgccgtgggtcgccggcgctgcgatggcggcctcgtccgtcagcgtcgtctgctggtccctgctgctgaggtactacaaggctccgaagattgccggcacagctaaagaaattggaattactaccctgtaggcaggtatcactggcactgctgctggaacgggaaggttgtggctggctgctaagtgctaacaatcgctgaaacagaagtctaaaaagaatcgctggaacaagcaagctgtacatatgtgttacaagtatatatacggcgatgctaagtgaagtggtggtgtaacgtaagtactgctactgatctgccatcgttgcatggatgtataccgttttcttttcctctcgaaatgaaaagtggtcctatggcacactactgctatgatggggcctgaataattttgaatcaata

SEQ ID NO: 24376 - DNA, 3037 bp, Zea Mays
atgggtgtgttagcgctaattattactctggccatgttccagccatgcctgctcgccaacgcctccagctccactggaggtgtgcatctagggtcccagcaagcggccctcctccagtggaagtccaccctacggagcagctcagcgtcgctggattcatggcgggccgggaccagcccgtgcagcagcaactggacgggcgttgtttgcggcgccgtggcgcaccgtggtcgccgcgccacgcctcaggcggtggtccgcatcgacctgccgaacgccggtgtcgacgggcgcctcggtgcgctcaacttctcggcgctcccgttcctccgatacatcgacctcagctacaacagccttcgcggtgagatccctcggtccatcgcctcattaccggagctctcccaccttgacctcaccggcaacaggctccatgggcacgtaccacgggagatgggcagcatgggaagcctgaccgtgctgttgctctccctgaacaacctcacaggaaccatccctgcgtccattggcaacctaactaggctagttcagcttaccatccacaaaacctcgctcatagggtccatcccggaggagctcagcaagctcaccagcctagagtatttgcagctaagtggcgacttactgagcggccggataccggaaagccttggcaacctgaccaagctaagcctcctgcgcctttacgacaaccagctatcaggtcccattccgtccactctcggcaaccttgttgagctgcagagtctccagctcagtaggaaccagctcgtaggccgtatcccaccgagcctggggaaccttagcgcactctacgaaatctggatgtacgagaacgagctggcaggctcagtcccagctgaaattggcgctttggcgggcctgcagacgctgcatttagccgagaatctcatttcaggtccagtccctgaaactctcaccggcctcacgaatctgaacatgctccagatcttcagcaacaagctctccggtcctctgcctctagggttttcaaaccttagcaagctggaagtgctcgatcttgccaataactctttctcgggagacttgccctctgggttctgcaatcaggggaacctcatacagttcactgtctccttgaacatgttcaccggccctattcccagagacatcgagacatgcaggagcctgcatatacttgacgtggcttccaaccaactctcaggagacgtatcaggtctggggccatacccgcaccttttctttgcgaacctggagagaaacagcctccatggacgcctgtcagcagagagctgggcctcgagcatcaacctgaccatcttcgacgtggccagcaacatggtgaccggaagcttgccgcctgagctatcaaggctagtgaagctggaggaactgcttctccacgacaacaacatgaccggcagcataccgccagagttaagcaatctgaccaacctgtactcgctcagcttgtcacagaaccaattctcaggcaacatcccgcctgaattcggtcggatgagcagcttacagtaccttgatatacagctgaacagccttagtgggccgataccgcaggagcttggcagctgcactcagctgctgttcttgcggatcaatggcaacaggttgaccgggcatctgccggtaacccttggaagcctgtggaagctgcagattgtgttggatgtcagcagcaacgaactcacgggtgagctaccgccgcagcttgggaacctggtgatgttggagctcttaaacctctcccacaacaacttcagtggcagcataccttcctccttctccagcatggctagcttgtcaacccttgacgtcacatacaacgacttggaaggccctcttccaacggggcggctgttttcaaatgcctcgtcaccagtaacatggttcctccacaacaatggcctctgcggaaatctcaccgggcttccagcatgctcttcacctccaacaatagggtaccaccacaacagtcgaaggaggaggactcgcatcttggttgcaacgaccatttctgttcccttgtgcatgctcaccgttctttttggaatcattgtgatcatccgcagaagcgataaaccacacaagcaggcaacaacgacgaccacagctggtagaggtgatgtgttttcggtgtggaattttgatggaagactagcatttgaggacatcgttcgggcgacagaaaacttcagcgagaggtacgttgttgggtcaggcgggtgtggaaccgtctacagagttcagctacaagggggcagactggttgcagtgaaaaagctccatgaaactggagaaggttgtgttgtcagtgatgaggagagattcacgggtgaaatcgatgtgctgacaaggatcaggcaccgaagcattgtcaagctatatgggttttgctcccacccaaggtacagatttttagtgtacgattatgtcgatagagggagccttcgcgcgtccttggaaaacgtggagatcgcaggggagctgggctgggagagacgagtcgccattgcaagggacgttgctcaagctctgtattacttacaccacgagtcttgcttgacacagaatttaaggcttacgtttcagacttcggcatatcaaagatcgtaagacctgattcgtcaaactggagcgaactagcaggaacatacggttatatagctccagagctttcacacacgccagcggtgacgacgaaatgcgatgtctacagcttcggtgtggttctgctggagatagtgatggggagataccctactgagctgcggtccaataattcactgcaaggacagcatcaccagcttgcaacggagactttggacaagcgtccatcatcgccaacattagcggagaggcacgagatttctctgcttgtccaagtagcacttgcatgcctgcaaccttcccccaaatcgaggccagagatgcaggaagtttatcagaaactgactcatgaccatacttaagggacttgctccaaaagttcaag

SEQ ID NO: 24377 - DNA, 1943 bp, Zea Mays
ccacacgtttctttaccctaacctttccactgctccatcttcctcgcagcgccggcgatccatcctccgctccctcccttactcgcgctcggcacgcaggcgacgccggcggtggtcaggctcgggctctaagcgacggcgtcagtgtcttcccctcccacctctcggcagtcgcctcgcgccctcgcctccggtcctccacgcaccagccggctactctgcgctgagctgattgtcccattcaataaagaaagcgaagggcatagataccagaagcaacactgagcccatcttgcttggaattctatctgctgttggaacaacttacaccaatatcatggcaaaccttgctgattcttttctagcggatcttgatgaactgtcagacaatgaaggctatcctgaagaagacaatgctgaggcagcgggtagggatgacgacgaagatgatgatatgcctgaccttgagtctcttaattatgatgaccttgatagtgtctcaaagttgcaaaagacacaacgctataatgatataatgcaaaaagttgaaaatgcacttcagaaaggttgaagtttcctgaactggagtcccttgttcatcacccaatcgattatgcccgtgttgtcaagaagattggaaacgagatggatttaacactagtagatctggaaggacttttaccttctgcaattataatggttgtctcagtgacagcatcaacaacaagtgggaagcctctttctgaagacaatttggaaaaaaccactgaagcatgtgacagagcccttacccttgatgcgtcaaagaagaaagtgcttgattttgtagagagcagaatggggtacattgcaccaaacctttctgcaattgttggcagtgctgttgcttccaaactgatgggtactgcaggtggtctgggagcacttgcaaaaatgcctgcttgtaatgttcagttactcggtgcaaagaggaaaaatcttgctggattttctactgccacttctcagtttcgtgttggctatcttgaacaaactgaagtatttcagagcacccctccacctttaaggactcgcgcctgcagacttattgctgcaaaatcaactctggcagcaaggattgattcaattagaggtgatccaactggaaaagctggacggaacttgttagaagaaattcgtaagaagattgagaagtggcaagaaccgcctcctgcgaagcttccaaagccactcccagttccggactctgagcctaaaaagaagagagggggccgtcgtcttcgaaagatgaaagaaagatatgcgcagactgatatgatgaagcttgcaaatcgaatgcagtttgggattccggaggagagctcactaggtgatggcttgggggaaggttatggcatgcttggacaagcagggagtggcaagctacgtgtctcagctggacaaagcaaacttgctgctaaagtggcgaaaaagttcaaggagaagagctatggtagcagtggtgcaacatcaggattgacatccagtttggcatttacaccagttcagggaatagagttgtcaaatccacaggtccaaggaaaccttctcggaggcggaactcaaagtacttacttttccgagaccggcacattttcaaagatcaggaggacgcaatagaatcctctttgcaaccatcacatctcatttgcactgcatttgttgatatccttgggatgcactgtagaaaattcaaaagtcaatcttgcaatgttccagagactttagaatggcaattcacagttaacagtgatgcttcgagcacttaatcccaggatatttgcgaccgaacctgacttttgagaattctgatgtccatagtctatattgcctcgtgtacaagttcaagcgaacaatttttatctcatggttactactagatgagattggttcacgggtctggc

SEQ ID NO: 24378 - DNA, 818 bp, Zea Mays
atcaatacaacatcatttttactcataatgtttacatcctgacttaggttgcagggcagcgatcaagtctccactctccggggatataacggcgatccgaatcgatttactcagttgaggatctctaaccacacgacatatgtagcacttaacccttgcatatgtcaatcgttcccacggatcctccactacatgaacaggtccacgccacccgagagcacaccaccccttttaggcgatcctttgccaggagggtacgtgccactctcgccatctctccactcccagtgcgcgattgtcttttcatgtatggaatagccgggttcaagcttaccctgtcccatatccagggcatgtggctagttaagatagtccttgatcaacaggcctacatacgcatccaatccttaactaacctgggtagaacatcacctgttcgtagcccaagtcccgatttaagtacttccatccttaggattgtttatgttcctaggatgaaaagagcatcaaagggaactttgcagtaagatcccaccacgctctcaatgaaaatattcttgcaggtagaagccatctttcctcaggataacccctgagctaggccttaatgcaaaagacaacctctatccacaagatctgagcagggctaagcatttttgtaaatcagattttgatacttcaccagaagtatctataaaggtatggatatcaaggaaggcaatgcatcaaagggttccaagcaactcctataaacttaatgcacatttcactagacttaaagtgtgtaaaaattatttaaaaatacaaggaaggggttg

SEQ ID NO: 24379 - DNA, 1003 bp, Zea Mays
attttttttggagagagcatagtgatatgttttatgtttaaacttgtggagcaatcacagggttgcaatccctgcgttaaccgaacagatggtttcaaagagagggattagagagggagaggggtcactaaaccgtaaacccccaaaggattgaatgccgtaggaacgatccagtcaatccctctctggataggatatatatacttgggggattacccctatcaaccgtgcaaatcctgaggtgacttgtacgagtggaattcctgctgtgcctgccatttgttagtatcccagatgcttcgggttaagttttggctatccattgcatcatcagcacgtctctactctctagaatgatgagttgaatggtagtcctaaatttgtttgccatcccaggaataaataattgaaggcaggtatcgaaggaccttctgttctgtctcgcaacatcaagtaaatcgaggagaagctccaaagaaccttgcatcctgattagtgttagcacagctgagacagtttgaacagtacacacatctcagttctcatttatttatttatttatttatacgatttgattgatgtacaaaatttagcggaacgaattgaaccatatacacgaccatgacagcacagaagagagaccgccaaagcagtgagtagaatttgctttccttcgtgcttgcatcttattatctgttactactactatatatattacgcctctagtagtagtagtcgtcgtcgtttatgcaaccttgcaggagaaaacttccttggctcttgctgctaactccgggaatacccgagttggacggaagtccttgttgaggcaaacgacggtcgctctgccttccatgacgagctgccaaatgccaagagactaggagcacgcctccgcttcatgtgtaccttacgatccggcagggcctcgatcatgtgctccacaatcatccgcacgcctttgatttggacaggcttcaccttcacgacgaacctgtcgccg

SEQ ID NO: 24380 - DNA, 2465 bp, Zea Mays
aaaccgttcgccgtttccccatctggccatctctttccccacccccacccacacgcactccagtcaccgccggcgccaagccgatctccgaccaccgcagccatgtctttcgccgccgcgctccacctacgccccacctccgccacgacgcacccgcgcctccaccaatccacccgcaaatcgtacttcctccgcttacagccgtctcgccgccgcctacccgtcccgcgcctgtccctcacgcccaccaccgccagcaatagcaacagctctcctcccccaccgtccccttcgcccgcccccgccgccccgggttccctgctcgccaactggtccccgccgcgcgcgatctggcgggggctgtcggcgctgctcctcgcgggccaggtcttccaccgcgtcctcacgggccgcgtccaccgccgcaacctcctggcgcagctccgtagggtgggtcccgggagcgcgggggtcgcgctcctcaccgctgccttcgtgggcatggccttcaccatccagttcgtgcgcgagttcacccgcctcggcctccaccgctccgtcggcggcgtcctcgcgctcgcgctcgcgcgcgagctctcgccggtcgtcacggccgtcgtcgccgcgggccgcgtcggctccgcgttcgccgccgagctcggcaccatgcaggtgtcggagcagaccgacaccttacgcgtcctcggtgcccaccccgtcgactacctcgtggtccctcgcgtgctcgcctgcgtgctcgcgctcccggtcttgacattgatcagcttcgcgctcggcctcgcgtcctcggcgttcctggccgattctgtgtttggcgtcagcgtcagcatcattttggagtcggcgcgcagggcgctgcggccatgggacttgatcagctctttgctcaaatctcaagtgtttggtgccattatcgcggtggtgagctgtgcctggggagttacaacccatggaggagccaagggtgttggcgagtctacaacatctgccgtagttgtttccttggttggaatcttcattgcagactttgctctctcgtgcctgttcttccagggtgctggtgattcgctcaagtatgcaatgggttgagagatctagaagcccccaagcctctacccaccacatagatcatcttcttctgcagctacgaaaattatagcaagaccttgatatcagcgctccctgcaagcatgctcatgtgcacgacaagaagcagcatacctgcaatgaacccgagtatccgagggtatttctgcctggaactagcatcatatttttttttgttattgcaagaacttgagtcttgctgtacttatctgctctcaaatacaaaacatctcaagatgttcttgtttagattaactgaatctgtctaccttttccgattccttatatgcagtctgcctgtccgagctttagcctgagttcctaatatgtgcttctgcaccccccctgtccgagctttagcctgaatctgtctacctcttccgattccttatatgcagtaatttaagatgcatctctctggctgaggattatccacactgattgtagcatattactcattaacagactcagtgattttttccccattttctactgctacatgtacacttgaaaattaacaacgatacccattatattataggaccatttattgtattattgtctcatattctttttttgttgcaatctactttggtttattgtgcatattcgctcgtttgtctcatggtgttatagggtgggagaaagcaatcggatcagagaaagaggaagtaaatttatattctgccagttgaggcatctttaggcttgatgtttgtagcacttgaaggaataaataattgaaggcaggtatcgaaggaccttctgttctgtctcgcaacatcaagtaaatcgaggagaagctccaaagaaccttgcatcctgattagtgttagcacagctgagacagtttgaacagtacacacatctcagttctcatttatttatttatttatttatacgatttgattgatgtacaaaatttagcggaacgaattgaaccatatacacgaccatgacagcacagaagagagaccgccaaagcagtgagtagaatttgctttccttcgtgcttgcatcttattatctgttactactactatatatattacgcctctagtagtagtagtcgtcgtcgtttatgcaaccttgcaggagaaaacttccttggctcttgctgctaactccgggaatacccgagttggacggaagtccttgttgaggcaaacgacggtcgctctgccttccatgacgagctgccaaatgccaagagactaggagcacgcctccgcttcatgtgtaccttacgatccggcagggcctcgatcatgtgctccacaatcatccgcacgcctttgatttggacaggcttcaccttcacgacgaacctgtcgccg
